United States Patent Application Publication US 2007/0214517 A1 - sequence listing, part 54

SEQ ID NO: 72386 - protein, 435 aa, Arabidopsis thaliana
  peptide (1)..(435): Ceres Seq. ID no. 4931387
  misc_feature (1)..(427): Pfam Name: Cytochrome P450 Pfam Description: Cytochrome P450
  misc_feature (1)..(435): Homolog of NCBI NO: 15231542 NR Description: cytochrome p450 family; protein id: At3g26330.1
  misc_feature (1)..(435): Homolog of NCBI NO: 9294291 NR Description: cytochrome p450 [Arabidopsis thaliana]
  misc_feature (1)..(434): Homolog of NCBI NO: 15231541 NR Description: cytochrome p450 family; protein id: At3g26320.1 thaliana] >gi|13878377|sp|Q9LIP4|C72X_ARATH Cytochrome P450 71B36
  misc_feature (1)..(433): Homolog of NCBI NO: 15227003 NR Description: cytochrome p450 family; protein id: At2g02580.1, by cDNA: gi_18175890 [Arabidopsis thaliana] Cytochrome P450 71B9 >gi|20197089|gb|AAC18928.2| putative
  misc_feature (1)..(433): Homolog of NCBI NO: 18175891 NR Description: putative cytochrome P450 protein [Arabidopsis
  misc_feature (1)..(433): Homolog of NCBI NO: 7430672 NR Description: probable cytochrome P450 At2g02580 [imported] -
  misc_feature (1)..(434): Homolog of NCBI NO: 15231538 NR Description: cytochrome p450 family; protein id: At3g26300.1 thaliana] >gi|13878379|sp|Q9LIP6|C72V_ARATH Cytochrome P450 71B34
  misc_feature (1)..(429): Homolog of NCBI NO: 15231539 NR Description: cytochrome p450 family; protein id: At3g26310.1 thaliana] >gi|13878378|sp|Q9LIP5|C72W_ARATH Cytochrome P450 71B35
  misc_feature (1)..(434): Homolog of NCBI NO: 15231537 NR Description: cytochrome p450 family; protein id: At3g26290.1 thaliana] >gi|13878380|sp|Q9LTL0|C72Q_ARATH Cytochrome P450 71B26
  misc_feature (1)..(433): Homolog of NCBI NO: 13878390 NR Description: Cytochrome P450 71B10 >gi|8777359|dbj|BAA96949.1|
MLLKFGSIPTVVVSSSETAKQALKIHDLNCCSRPSLAGPRALSYNYLDIVFSPFNDYWKELRRMCVQELFSPKQVHLIQPIREEEVKKLMNSFSESAAQKTPVNLSEKLASLTVGVICKAAFGVSFQGTVLNSDNFDKLIHDAFLFLGSFSASDYFPNVGWIIDWLTGLQGQRERSVRGLDAFYEQMFDLHKQGNKEGVEDFVDLLLKLEKEETVLGYGKLTRNHIKAVLMNVLLGGIGTSAITMTWAMTELMRNPRVMKKVQSEIRNQIGGKSMICLDDIDQLHYLKMVINETWRLHPPAPLLVPREVMSEFEINGYTIPAKTRLYVNVWGIGRDPDTWKDPEEFLPERFVNSNIDAKGQNFELLPFGSGRRMCPAMYMGTTMVEFGLANLLYHFDWKLPEGMVVEDIDMEESPGLNASKKNELVLVPRKYLNL

SEQ ID NO: 72387 - protein, 372 aa, Arabidopsis thaliana; identical to SEQ ID NO: 71353
  peptide (1)..(372): Ceres Seq. ID no. 4931388
  misc_feature (1)..(364): Pfam Name: Cytochrome P450 Pfam Description: Cytochrome P450
  misc_feature (1)..(372): Homolog of NCBI NO: 15231542 NR Description: cytochrome p450 family; protein id: At3g26330.1
  misc_feature (1)..(372): Homolog of NCBI NO: 9294291 NR Description: cytochrome p450 [Arabidopsis thaliana]
  misc_feature (1)..(371): Homolog of NCBI NO: 15231541 NR Description: cytochrome p450 family; protein id: At3g26320.1 thaliana] >gi|13878377|sp|Q9LIP4|C72X_ARATH Cytochrome P450 71B36
  misc_feature (1)..(370): Homolog of NCBI NO: 15227003 NR Description: cytochrome p450 family; protein id: At2g02580.1, by cDNA: gi_18175890 [Arabidopsis thaliana] Cytochrome P450 71B9 >gi|20197089|gb|AAC18928.2| putative
  misc_feature (1)..(370): Homolog of NCBI NO: 18175891 NR Description: putative cytochrome P450 protein [Arabidopsis
  misc_feature (1)..(370): Homolog of NCBI NO: 7430672 NR Description: probable cytochrome P450 At2g02580 [imported] -
  misc_feature (1)..(371): Homolog of NCBI NO: 15231538 NR Description: cytochrome p450 family; protein id: At3g26300.1 thaliana] >gi|13878379|sp|Q9LIP6|C72V_ARATH Cytochrome P450 71B34
  misc_feature (1)..(366): Homolog of NCBI NO: 15231539 NR Description: cytochrome p450 family; protein id: At3g26310.1 thaliana] >gi|13878378|sp|Q9LIP5|C72W_ARATH Cytochrome P450 71B35
  misc_feature (1)..(371): Homolog of NCBI NO: 15231537 NR Description: cytochrome p450 family; protein id: At3g26290.1 thaliana] >gi|13878380|sp|Q9LTL0|C72Q_ARATH Cytochrome P450 71B26
  misc_feature (1)..(370): Homolog of NCBI NO: 13878390 NR Description: Cytochrome P450 71B10 >gi|8777359|dbj|BAA96949.1|

SEQ ID NO: 72388 - DNA, 1503 bp, Arabidopsis thaliana
  misc_feature (1)..(1503): Ceres Seq. ID no. 4931393
  misc_feature: MA Experiment ID: 20000179 Result: Up-regulated in Transcription
  misc_feature: MA Experiment 20000179 PARAMETER Experiment Name: At_Germinating_Seeds_P Parameter: Age (hr) Value: 6 vs. 0
  misc_feature: MA Experiment 20000179 PARAMETER Experiment Name: At_Germinating_Seeds_P Parameter: Tissue Value: Germinating Seeds
  misc_feature: MA Experiment ID: 20000180 Result: Up-regulated in Transcription
  misc_feature: MA Experiment 20000180 PARAMETER Experiment Name: At_Germinating_Seeds_P Parameter: Age (hr) Value: 24 vs. 0
  misc_feature: MA Experiment 20000180 PARAMETER Experiment Name: At_Germinating_Seeds_P Parameter: Tissue Value: Germinating Seeds
  misc_feature: MA Experiment ID: 20000184 Result: Down-regulated in Transcription
  misc_feature: MA Experiment 20000184 PARAMETER Experiment Name: At_Shoots__P Parameter: Age (day) Value: 7
  misc_feature: MA Experiment 20000184 PARAMETER Experiment Name: At_Shoots__P Parameter: Tissue Value: Shoots vs. Whole Plant
  misc_feature: MA Experiment ID: 20001905 Result: Down-regulated in Transcription
  misc_feature: MA Experiment 20001905 PARAMETER Experiment Name: At_Drought_Reproduction_P Parameter: Age (day) Value: 40
  misc_feature: MA Experiment 20001905 PARAMETER Experiment Name: At_Drought_Reproduction_P Parameter: Organism Value: A. thaliana
  misc_feature: MA Experiment 20001905 PARAMETER Experiment Name: At_Drought_Reproduction_P Parameter: Plant Line Value: WS
  misc_feature: MA Experiment 20001905 PARAMETER Experiment Name: At_Drought_Reproduction_P Parameter: Timepoint (day) Value: 10
  misc_feature: MA Experiment 20001905 PARAMETER Experiment Name: At_Drought_Reproduction_P Parameter: Tissue Value: Rosettes
  misc_feature: MA Experiment 20001905 PARAMETER Experiment Name: At_Drought_Reproduction_P Parameter: Treatment Value: Drought vs. No Drought
atgacaaacatttggcttctgtcacttatcttcgtcatttgtattcttgtagccgtgttcaaccacaagaatcggaggaattatcaacggacaccaccgtctcctcctggctgtcctatcatcggaaacttgcatcaactcggagaattaccacatcaatctctatggaaactctccaaaaagtatggccctgtgatgcttttaaagcttggaagagtaccaacagtcatagtttcttcctctgaaacagcaaaacaagctttgaaaatccatgacctccattgttgtagtcgtccaggctttgcaggggcaagagagctctcttacaactatctagacattgctttttctccttatgatgattattggaaagaagtaaggaagctcgctgttcaagaacttttcagtagtaaacaagttcactctatacaaccgataaaggacgaggaggtcaagaaactgatcgattcaatctccgaatcagctgctcagaagactccgatcaacttgaacaagacattgctggctttaactgttagtgtggtctgcaggacagcgtttagtgtgaattttgagggaactgtgctcaacagtgaacgattcaataacatagtccgtgaggcgctcgagatgttgggaagcttttctgcctcagatttcattccgtatgtcggaaggatcatcgacttgttgacgggtttgcaaggacggcgagagagaagcatgagagatctcgatgctttctatgaacaaatgtttgatctgcataaacagaaaaaggaagaaggtagtgaagactttgtggacttgctgttgaggttggagaaagaagaagctgttcttggaaatgacaagctcactagaaaccatatcaaagcgatattgatggatgttcttctagcaggaatggatacttctgcaataaccatgacatgggcaatggcagaactcgcaaagaatccacgagtgatgaaaaaagttcaatccgaaatcagaagtcaaatcaagaacaaagaaagaatcagctttgatgacactgataagcttgagtacctcaaaatggttatcaaagaaacatggaggttacatcctacaacacctcttctaatcccaagggaagcaatgtctgaatttgagatcaacggctacacgattccagttaagacacggcttcacgtgaatgtatgggctattggtcgtgatcccgatacctggaaagaccctgaagtgtttctcccggagaggtttacggataataatattgatgcaaaaggacagcattttgagctgttaccgtttggaggcggccggagaatgtgtcctgcagtttatatggggacaacaatggtcgagtttggtttggctaatcttttgtatcattttgattggaagttaccagaaggcatgaaggttgacgatattgacatggaagaagctcccggactcactgtcaacaagaaaaacgagcttatacttgtgccaacgaagtttctagatccttaa

SEQ ID NO: 72389 - protein, 500 aa, Arabidopsis thaliana
  peptide (1)..(500): Ceres Seq. ID no. 4931394
  misc_feature (32)..(492): Pfam Name: Cytochrome P450 Pfam Description: Cytochrome P450
  misc_feature (1)..(500): Homolog of NCBI NO: 15231538 NR Description: cytochrome p450 family; protein id: At3g26300.1 thaliana] >gi|13878379|sp|Q9LIP6|C72V_ARATH Cytochrome P450 71B34
  misc_feature (1)..(494): Homolog of NCBI NO: 15231539 NR Description: cytochrome p450 family; protein id: At3g26310.1 thaliana] >gi|13878378|sp|Q9LIP5|C72W_ARATH Cytochrome P450 71B35
  misc_feature (1)..(499): Homolog of NCBI NO: 15231537 NR Description: cytochrome p450 family; protein id: At3g26290.1 thaliana] >gi|13878380|sp|Q9LTL0|C72Q_ARATH Cytochrome P450 71B26
  misc_feature (1)..(499): Homolog of NCBI NO: 15231542 NR Description: cytochrome p450 family; protein id: At3g26330.1
  misc_feature (1)..(499): Homolog of NCBI NO: 9294291 NR Description: cytochrome p450 [Arabidopsis thaliana]
  misc_feature (1)..(499): Homolog of NCBI NO: 15231541 NR Description: cytochrome p450 family; protein id: At3g26320.1 thaliana] >gi|13878377|sp|Q9LIP4|C72X_ARATH Cytochrome P450 71B36
  misc_feature (1)..(498): Homolog of NCBI NO: 15227003 NR Description: cytochrome p450 family; protein id: At2g02580.1, by cDNA: gi_18175890 [Arabidopsis thaliana] Cytochrome P450 71B9 >gi|20197089|gb|AAC18928.2| putative
  misc_feature (1)..(498): Homolog of NCBI NO: 18175891 NR Description: putative cytochrome P450 protein [Arabidopsis
  misc_feature (1)..(498): Homolog of NCBI NO: 7430672 NR Description: probable cytochrome P450 At2g02580 [imported] -
  misc_feature (1)..(498): Homolog of NCBI NO: 13878390 NR Description: Cytochrome P450 71B10 >gi|8777359|dbj|BAA96949.1|
MTNIWLLSLIFVICILVAVFNHKNRRNYQRTPPSPPGCPIIGNLHQLGELPHQSLWKLSKKYGPVMLLKLGRVPTVIVSSSETAKQALKIHDLHCCSRPGFAGARELSYNYLDIAFSPYDDYWKEVRKLAVQELFSSKQVHSIQPIKDEEVKKLIDSISESAAQKTPINLNKTLLALTVSVVCRTAFSVNFEGTVLNSERFNNIVREALEMLGSFSASDFIPYVGRIIDLLTGLQGRRERSMRDLDAFYEQMFDLHKQKKEEGSEDFVDLLLRLEKEEAVLGNDKLTRNHIKAILMDVLLAGMDTSAITMTWAMAELAKNPRVMKKVQSEIRSQIKNKERISFDDTDKLEYLKMVIKETWRLHPTTPLLIPREAMSEFEINGYTIPVKTRLHVNVWAIGRDPDTWKDPEVFLPERFTDNNIDAKGQHFELLPFGGGRRMCPAVYMGTTMVEFGLANLLYHFDWKLPEGMKVDDIDMEEAPGLTVNKKNELILVPTKFLDP

SEQ ID NO: 72390 - protein, 435 aa, Arabidopsis thaliana
  peptide (1)..(435): Ceres Seq. ID no. 4931395
  misc_feature (1)..(427): Pfam Name: Cytochrome P450 Pfam Description: Cytochrome P450
  misc_feature (1)..(435): Homolog of NCBI NO: 15231538 NR Description: cytochrome p450 family; protein id: At3g26300.1 thaliana] >gi|13878379|sp|Q9LIP6|C72V_ARATH Cytochrome P450 71B34
  misc_feature (1)..(429): Homolog of NCBI NO: 15231539 NR Description: cytochrome p450 family; protein id: At3g26310.1 thaliana] >gi|13878378|sp|Q9LIP5|C72W_ARATH Cytochrome P450 71B35
  misc_feature (1)..(434): Homolog of NCBI NO: 15231537 NR Description: cytochrome p450 family; protein id: At3g26290.1 thaliana] >gi|13878380|sp|Q9LTL0|C72Q_ARATH Cytochrome P450 71B26
  misc_feature (1)..(434): Homolog of NCBI NO: 15231542 NR Description: cytochrome p450 family; protein id: At3g26330.1
  misc_feature (1)..(434): Homolog of NCBI NO: 9294291 NR Description: cytochrome p450 [Arabidopsis thaliana]
  misc_feature (1)..(434): Homolog of NCBI NO: 15231541 NR Description: cytochrome p450 family; protein id: At3g26320.1 thaliana] >gi|13878377|sp|Q9LIP4|C72X_ARATH Cytochrome P450 71B36
  misc_feature (1)..(433): Homolog of NCBI NO: 15227003 NR Description: cytochrome p450 family; protein id: At2g02580.1, by cDNA: gi_18175890 [Arabidopsis thaliana] Cytochrome P450 71B9 >gi|20197089|gb|AAC18928.2| putative
  misc_feature (1)..(433): Homolog of NCBI NO: 18175891 NR Description: putative cytochrome P450 protein [Arabidopsis
  misc_feature (1)..(433): Homolog of NCBI NO: 7430672 NR Description: probable cytochrome P450 At2g02580 [imported] -
  misc_feature (1)..(433): Homolog of NCBI NO: 13878390 NR Description: Cytochrome P450 71B10 >gi|8777359|dbj|BAA96949.1|
MLLKLGRVPTVIVSSSETAKQALKIHDLHCCSRPGFAGARELSYNYLDIAFSPYDDYWKEVRKLAVQELFSSKQVHSIQPIKDEEVKKLIDSISESAAQKTPINLNKTLLALTVSVVCRTAFSVNFEGTVLNSERFNNIVREALEMLGSFSASDFIPYVGRIIDLLTGLQGRRERSMRDLDAFYEQMFDLHKQKKEEGSEDFVDLLLRLEKEEAVLGNDKLTRNHIKAILMDVLLAGMDTSAITMTWAMAELAKNPRVMKKVQSEIRSQIKNKERISFDDTDKLEYLKMVIKETWRLHPTTPLLIPREAMSEFEINGYTIPVKTRLHVNVWAIGRDPDTWKDPEVFLPERFTDNNIDAKGQHFELLPFGGGRRMCPAVYMGTTMVEFGLANLLYHFDWKLPEGMKVDDIDMEEAPGLTVNKKNELILVPTKFLDP

SEQ ID NO: 72391 - protein, 290 aa, Arabidopsis thaliana
  peptide (1)..(290): Ceres Seq. ID no. 4931396
  misc_feature (1)..(282): Pfam Name: Cytochrome P450 Pfam Description: Cytochrome P450
  misc_feature (1)..(290): Homolog of NCBI NO: 15231538 NR Description: cytochrome p450 family; protein id: At3g26300.1 thaliana] >gi|13878379|sp|Q9LIP6|C72V_ARATH Cytochrome P450 71B34
  misc_feature (1)..(284): Homolog of NCBI NO: 15231539 NR Description: cytochrome p450 family; protein id: At3g26310.1 thaliana] >gi|13878378|sp|Q9LIP5|C72W_ARATH Cytochrome P450 71B35
  misc_feature (1)..(289): Homolog of NCBI NO: 15231537 NR Description: cytochrome p450 family; protein id: At3g26290.1 thaliana] >gi|13878380|sp|Q9LTL0|C72Q_ARATH Cytochrome P450 71B26
  misc_feature (1)..(289): Homolog of NCBI NO: 15231542 NR Description: cytochrome p450 family; protein id: At3g26330.1
  misc_feature (1)..(289): Homolog of NCBI NO: 9294291 NR Description: cytochrome p450 [Arabidopsis thaliana]
  misc_feature (1)..(289): Homolog of NCBI NO: 15231541 NR Description: cytochrome p450 family; protein id: At3g26320.1 thaliana] >gi|13878377|sp|Q9LIP4|C72X_ARATH Cytochrome P450 71B36
  misc_feature (1)..(288): Homolog of NCBI NO: 15227003 NR Description: cytochrome p450 family; protein id: At2g02580.1, by cDNA: gi_18175890 [Arabidopsis thaliana] Cytochrome P450 71B9 >gi|20197089|gb|AAC18928.2| putative
  misc_feature (1)..(288): Homolog of NCBI NO: 18175891 NR Description: putative cytochrome P450 protein [Arabidopsis
  misc_feature (1)..(288): Homolog of NCBI NO: 7430672 NR Description: probable cytochrome P450 At2g02580 [imported] -
  misc_feature (1)..(288): Homolog of NCBI NO: 13878390 NR Description: Cytochrome P450 71B10 >gi|8777359|dbj|BAA96949.1|
MLGSFSASDFIPYVGRIIDLLTGLQGRRERSMRDLDAFYEQMFDLHKQKKEEGSEDFVDLLLRLEKEEAVLGNDKLTRNHIKAILMDVLLAGMDTSAITMTWAMAELAKNPRVMKKVQSEIRSQIKNKERISFDDTDKLEYLKMVIKETWRLHPTTPLLIPREAMSEFEINGYTIPVKTRLHVNVWAIGRDPDTWKDPEVFLPERFTDNNIDAKGQHFELLPFGGGRRMCPAVYMGTTMVEFGLANLLYHFDWKLPEGMKVDDIDMEEAPGLTVNKKNELILVPTKFLDP

SEQ ID NO: 72392 - DNA, 2103 bp, Arabidopsis thaliana
  misc_feature (1)..(2103): Ceres Seq. ID no. 4931483
  misc_feature: MA Experiment ID: 20001451 Result: Down-regulated in Transcription
  misc_feature: MA Experiment 20001451 PARAMETER Experiment Name: At_Far-red-induction_P Parameter: Age (day) Value: 7
  misc_feature: MA Experiment 20001451 PARAMETER Experiment Name: At_Far-red-induction_P Parameter: Light Value: Far-red vs. White
  misc_feature: MA Experiment 20001451 PARAMETER Experiment Name: At_Far-red-induction_P Parameter: Organism Value: A. thaliana
  misc_feature: MA Experiment 20001451 PARAMETER Experiment Name: At_Far-red-induction_P Parameter: Plant Line Value: Columbia
  misc_feature: MA Experiment 20001451 PARAMETER Experiment Name: At_Far-red-induction_P Parameter: Timepoint (hr) Value: 24
  misc_feature: MA Experiment 20001451 PARAMETER Experiment Name: At_Far-red-induction_P Parameter: Tissue Value: Whole Plant
  misc_feature: MA Experiment ID: 20001757 Result: Up-regulated in Transcription
  misc_feature: MA Experiment 20001757 PARAMETER Experiment Name: At_50mM_NH4NO3_L-to-H_P Parameter: Timepoint (hr) Value: 6
  misc_feature: MA Experiment 20001757 PARAMETER Experiment Name: At_50mM_NH4NO3_L-to-H_P Parameter: Tissue Value: Leaf
  misc_feature: MA Experiment 20001757 PARAMETER Experiment Name: At_50mM_NH4NO3_L-to-H_P Parameter: Treatment Value: 50mM NH4NO3 vs 100mM Mannitol
atggcagtgaccggagtttcttctgcttttggccgtcttttcaaacaagataaaacccacaagcgtgttatcggcaccggaaccaaacttacagtgacccgtcagattcttgagcatctcgaaggcggtaatgtctcgaaagccgtctctgttctctttgcttctccagagccagttagttattggctatacgagcgtcttttccgttcttgttcctcgaaagctcttgttgtgcaagcccgtaaagtccaatctcacttagtaactttctctccgttgcctccgattttcctcttgaacagagccattgaggcttatggtaaatgtgggtgtgttgatgatgcacgagagctgttcgaggaaatgcctgaacgagatggtgggtcttggaacgctgtgattactgcttgtgcgcaaaacggtgtctctgatgaggtgtttcgtatgtttcgtagaatgaatagagatggcgtacgagctacggagacttcttttgctggtgttttaaagtcatgtggtttaatcttggacttgagattattgaggcagctgcattgtgctgtggtgaagtatgggtattcggggaatgtagatttggagacttcgattgttgatgtttatgggaagtgtcgggtgatgagtgatgcgagaagagtgtttgatgagattgtaaaccctagtgatgtatcttggaatgtgattgtgcggcggtatcttgagatggggtttaatgatgaggcagtggtgatgtttttcaagatgctggagttgaatgttcgacctttgaatcacacggtttctagtgtaatgttagcttgttcgagatccttggcccttgaggtgggaaaggtaatccatgccattgctgtgaaacttagtgttgtggcagatacagttgtttctacttctgtatttgatatgtatgtaaaatgtgacagattggagagtgctcgcagagtatttgaccaaactagatctaaagatttgaaatcttggacttcggcgatgtcgggatatgcaatgagtggtttaactagagaggcaagggagctctttgatttgatgcctgaacggaatatagtctcatggaacgcaatgttgggcggatatgtacatgcccatgaatgggatgaggcactggattttctcactttgatgcgccaggagattgaaaatattgataatgtcactcttgtgtggatcctaaatgtctgctctggtatatcagatgttcaaatggggaagcaagctcatggttttatctaccgacatggatatgatacgaatgtaattgtagccaatgcacttcttgatatgtatggaaaatgcgggaccttgcagagtgccaatatttggttccgccaaatgagtgaactaagggatgaggtttcatggaatgctttattgactggtgtagctcgagttggcaggagtgaacaagccttatctttctttgaagggatgcaagtggaggccaaaccaagcaaatacacactggcaacgctcttagcaggttgtgcgaacattcctgctttaaatttaggcaaagcaatccacggattcctgatcagagatggctataaaattgatgttgttatacggggtgcaatggttgacatgtattccaaatgccgatgtttcgactatgctatcgaagtattcaaagaggcagctacacgggacttgattctatggaactctattatccgtggatgttgtcgtaatggaagaagcaaggaggtctttgagttgttcatgcttttggaaaatgaaggagttaagcctgaccatgtcacctttttgggaatcttacaagcttgcatacgtgaaggtcatgtcgaactcggttttcagtatttcagttctatgagcaccaaatatcatatatcaccacaggttgagcattatgattgtatgattgaactctactgcaagtatggatgcttgcatcagcttgaagaatttctcctcttgatgccttttgatccacctatgcaaatgttgacaaggataaatgatgcttgccaaagataccgctggtcaaagttaggagcatgggctgctaaacggcttatgaatgatcattaccttcagccaccatga

SEQ ID NO: 72393 - protein, 700 aa, Arabidopsis thaliana
  peptide (1)..(700): Ceres Seq. ID no. 4931484
  misc_feature (563)..(597): Pfam Name: PPR repeat Pfam Description: PPR repeat
  misc_feature (63)..(699): Homolog of NCBI NO: 38344064 NR Description: OSJNBa0006B20.8 [Oryza sativa (japonica
  misc_feature (339)..(692): Homolog of NCBI NO: 15231798 NR Description: putative protein; protein id: At3g53360.1
  misc_feature (64)..(355): Homolog of NCBI NO: 15231798 NR Description: putative protein; protein id: At3g53360.1
  misc_feature (346)..(691): Homolog of NCBI NO: 34897084 NR Description: hypothetical protein [Oryza sativa (japonica group)] >gi|12957718|gb|AAK09236.1| hypothetical protein [Oryza
  misc_feature (54)..(360): Homolog of NCBI NO: 34897084 NR Description: hypothetical protein [Oryza sativa (japonica group)] >gi|12957718|gb|AAK09236.1| hypothetical protein [Oryza
  misc_feature (339)..(689): Homolog of NCBI NO: 38423978 NR Description: PPR-repeat protein-like [Oryza sativa (japonica
  misc_feature (93)..(352): Homolog of NCBI NO: 38423978 NR Description: PPR-repeat protein-like [Oryza sativa (japonica
  misc_feature (330)..(691): Homolog of NCBI NO: 34912348 NR Description: P0518F01.9 [Oryza sativa (japonica
  misc_feature (64)..(360): Homolog of NCBI NO: 34912348 NR Description: P0518F01.9 [Oryza sativa (japonica
  misc_feature (336)..(691): Homolog of NCBI NO: 15242550 NR Description: selenium-binding protein-like; protein id:
MAVTGVSSAFGRLFKQDKTHKRVIGTGTKLTVTRQILEHLEGGNVSKAVSVLFASPEPVSYWLYERLFRSCSSKALVVQARKVQSHLVTFSPLPPIFLLNRAIEAYGKCGCVDDARELFEEMPERDGGSWNAVITACAQNGVSDEVFRMFRRMNRDGVRATETSFAGVLKSCGLILDLRLLRQLHCAVVKYGYSGNVDLETSIVDVYGKCRVMSDARRVFDEIVNPSDVSWNVIVRRYLEMGFNDEAVVMFFKMLELNVRPLNHTVSSVMLACSRSLALEVGKVIHAIAVKLSVVADTVVSTSVFDMYVKCDRLESARRVFDQTRSKDLKSWTSAMSGYAMSGLTREARELFDLMPERNIVSWNAMLGGYVHAHEWDEALDFLTLMRQEIENIDNVTLVWILNVCSGISDVQMGKQAHGFIYRHGYDTNVIVANALLDMYGKCGTLQSANIWFRQMSELRDEVSWNALLTGVARVGRSEQALSFFEGMQVEAKPSKYTLATLLAGCANIPALNLGKAIHGFLIRDGYKIDVVIRGAMVDMYSKCRCFDYAIEVFKEAATRDLILWNSIIRGCCRNGRSKEVFELFMLLENEGVKPDHVTFLGILQACIREGHVELGFQYFSSMSTKYHISPQVEHYDCMIELYCKYGCLHQLEEFLLLMPFDPPMQMLTRINDACQRYRWSKLGAWAAKRLMNDHYLQPP

SEQ ID NO: 72394 - protein, 579 aa, Arabidopsis thaliana
  peptide (1)..(579): Ceres Seq. ID no. 4931485
  misc_feature (442)..(476): Pfam Name: PPR repeat Pfam Description: PPR repeat
  misc_feature (1)..(578): Homolog of NCBI NO: 38344064 NR Description: OSJNBa0006B20.8 [Oryza sativa (japonica
  misc_feature (218)..(571): Homolog of NCBI NO: 15231798 NR Description: putative protein; protein id: At3g53360.1
  misc_feature (1)..(234): Homolog of NCBI NO: 15231798 NR Description: putative protein; protein id: At3g53360.1
  misc_feature (225)..(570): Homolog of NCBI NO: 34897084 NR Description: hypothetical protein [Oryza sativa (japonica group)] >gi|12957718|gb|AAK09236.1| hypothetical protein [Oryza
  misc_feature (1)..(239): Homolog of NCBI NO: 34897084 NR Description: hypothetical protein [Oryza sativa (japonica group)] >gi|12957718|gb|AAK09236.1| hypothetical protein [Oryza
  misc_feature (218)..(568): Homolog of NCBI NO: 38423978 NR Description: PPR-repeat protein-like [Oryza sativa (japonica
  misc_feature (1)..(231): Homolog of NCBI NO: 38423978 NR Description: PPR-repeat protein-like [Oryza sativa (japonica
  misc_feature (209)..(570): Homolog of NCBI NO: 34912348 NR Description: P0518F01.9 [Oryza sativa (japonica
  misc_feature (1)..(239): Homolog of NCBI NO: 34912348 NR Description: P0518F01.9 [Oryza sativa (japonica
  misc_feature (215)..(570): Homolog of NCBI NO: 15242550 NR Description: selenium-binding protein-like; protein id:
MPERDGGSWNAVITACAQNGVSDEVFRMFRRMNRDGVRATETSFAGVLKSCGLILDLRLLRQLHCAVVKYGYSGNVDLETSIVDVYGKCRVMSDARRVFDEIVNPSDVSWNVIVRRYLEMGFNDEAVVMFFKMLELNVRPLNHTVSSVMLACSRSLALEVGKVIHAIAVKLSVVADTVVSTSVFDMYVKCDRLESARRVFDQTRSKDLKSWTSAMSGYAMSGLTREARELFDLMPERNIVSWNAMLGGYVHAHEWDEALDFLTLMRQEIENIDNVTLVWILNVCSGISDVQMGKQAHGFIYRHGYDTNVIVANALLDMYGKCGTLQSANIWFRQMSELRDEVSWNALLTGVARVGRSEQALSFFEGMQVEAKPSKYTLATLLAGCANIPALNLGKAIHGFLIRDGYKIDVVIRGAMVDMYSKCRCFDYAIEVFKEAATRDLILWNSIIRGCCRNGRSKEVFELFMLLENEGVKPDHVTFLGILQACIREGHVELGFQYFSSMSTKYHISPQVEHYDCMIELYCKYGCLHQLEEFLLLMPFDPPMQMLTRINDACQRYRWSKLGAWAAKRLMNDHYLQPP

SEQ ID NO: 72395 - protein, 552 aa, Arabidopsis thaliana
  peptide (1)..(552): Ceres Seq. ID no. 4931486
  misc_feature (415)..(449): Pfam Name: PPR repeat Pfam Description: PPR repeat
  misc_feature (1)..(551): Homolog of NCBI NO: 38344064 NR Description: OSJNBa0006B20.8 [Oryza sativa (japonica
  misc_feature (191)..(544): Homolog of NCBI NO: 15231798 NR Description: putative protein; protein id: At3g53360.1
  misc_feature (1)..(207): Homolog of NCBI NO: 15231798 NR Description: putative protein; protein id: At3g53360.1
  misc_feature (198)..(543): Homolog of NCBI NO: 34897084 NR Description: hypothetical protein [Oryza sativa (japonica group)] >gi|12957718|gb|AAK09236.1| hypothetical protein [Oryza
  misc_feature (1)..(212): Homolog of NCBI NO: 34897084 NR Description: hypothetical protein [Oryza sativa (japonica group)] >gi|12957718|gb|AAK09236.1| hypothetical protein [Oryza
  misc_feature (191)..(541): Homolog of NCBI NO: 38423978 NR Description: PPR-repeat protein-like [Oryza sativa (japonica
  misc_feature (1)..(204): Homolog of NCBI NO: 38423978 NR Description: PPR-repeat protein-like [Oryza sativa (japonica
  misc_feature (182)..(543): Homolog of NCBI NO: 34912348 NR Description: P0518F01.9 [Oryza sativa (japonica
  misc_feature (1)..(212): Homolog of NCBI NO: 34912348 NR Description: P0518F01.9 [Oryza sativa (japonica
  misc_feature (188)..(543): Homolog of NCBI NO: 15242550 NR Description: selenium-binding protein-like; protein id:
MFRRMNRDGVRATETSFAGVLKSCGLILDLRLLRQLHCAVVKYGYSGNVDLETSIVDVYGKCRVMSDARRVFDEIVNPSDVSWNVIVRRYLEMGFNDEAVVMFFKMLELNVRPLNHTVSSVMLACSRSLALEVGKVIHAIAVKLSVVADTVVSTSVFDMYVKCDRLESARRVFDQTRSKDLKSWTSAMSGYAMSGLTREARELFDLMPERNIVSWNAMLGGYVHAHEWDEALDFLTLMRQEIENIDNVTLVWILNVCSGISDVQMGKQAHGFIYRHGYDTNVIVANALLDMYGKCGTLQSANIWFRQMSELRDEVSWNALLTGVARVGRSEQALSFFEGMQVEAKPSKYTLATLLAGCANIPALNLGKAIHGFLIRDGYKIDVVIRGAMVDMYSKCRCFDYAIEVFKEAATRDLILWNSIIRGCCRNGRSKEVFELFMLLENEGVKPDHVTFLGILQACIREGHVELGFQYFSSMSTKYHISPQVEHYDCMIELYCKYGCLHQLEEFLLLMPFDPPMQMLTRINDACQRYRWSKLGAWAAKRLMNDHYLQPP

SEQ ID NO: 72396 - DNA, 1107 bp, Arabidopsis thaliana
  misc_feature (1)..(1107): Ceres Seq. ID no. 4931487
  misc_feature: MA Experiment ID: 20000182 Result: Up-regulated in Transcription
  misc_feature: MA Experiment 20000182 PARAMETER Experiment Name: At_2mM_SA_P Parameter: Age (day) Value: 14
  misc_feature: MA Experiment 20000182 PARAMETER Experiment Name: At_2mM_SA_P Parameter: Organism Value: A. thaliana
  misc_feature: MA Experiment 20000182 PARAMETER Experiment Name: At_2mM_SA_P Parameter: Plant Line Value: WS
  misc_feature: MA Experiment 20000182 PARAMETER Experiment Name: At_2mM_SA_P Parameter: Timepoint (hr) Value: 6
  misc_feature: MA Experiment 20000182 PARAMETER Experiment Name: At_2mM_SA_P Parameter: Tissue Value: Aerial
  misc_feature: MA Experiment 20000182 PARAMETER Experiment Name: At_2mM_SA_P Parameter: Treatment Value: 2mM SA vs. No Treatment
  misc_feature: MA Experiment ID: 20000184 Result: Down-regulated in Transcription
  misc_feature: MA Experiment 20000184 PARAMETER Experiment Name: At_Shoots__P Parameter: Age (day) Value: 7
  misc_feature: MA Experiment 20000184 PARAMETER Experiment Name: At_Shoots__P Parameter: Tissue Value: Shoots vs. Whole Plant
  misc_feature: MA Experiment ID: 20000234 Result: Down-regulated in Transcription
  misc_feature: MA Experiment 20000234 PARAMETER Experiment Name: At_Siliques_P Parameter: Age (day) Value: 21
  misc_feature: MA Experiment 20000234 PARAMETER Experiment Name: At_Siliques_P Parameter: Organism Value: A. thaliana
  misc_feature: MA Experiment 20000234 PARAMETER Experiment Name: At_Siliques_P Parameter: Plant Line Value: WS
  misc_feature: MA Experiment 20000234 PARAMETER Experiment Name: At_Siliques_P Parameter: Tissue Value: Less Than 5mm Siliques vs. Whole Plant
  misc_feature: MA Experiment ID: 20000235 Result: Down-regulated in Transcription
  misc_feature: MA Experiment 20000235 PARAMETER Experiment Name: At_Siliques_P Parameter: Age (day) Value: 21
  misc_feature: MA Experiment 20000235 PARAMETER Experiment Name: At_Siliques_P Parameter: Organism Value: A. thaliana
  misc_feature: MA Experiment 20000235 PARAMETER Experiment Name: At_Siliques_P Parameter: Plant Line Value: WS
  misc_feature: MA Experiment 20000235 PARAMETER Experiment Name: At_Siliques_P Parameter: Tissue Value: 5-10mm Siliques vs. Whole Plant
  misc_feature: MA Experiment ID: 20000264 Result: Down-regulated in Transcription
  misc_feature: MA Experiment 20000264 PARAMETER Experiment Name: At_Open_Flower_P Parameter: Age (day) Value: 21
  misc_feature: MA Experiment 20000264 PARAMETER Experiment Name: At_Open_Flower_P Parameter: Plant Line Value: WS
  misc_feature: MA Experiment 20000264 PARAMETER Experiment Name: At_Open_Flower_P Parameter: Tissue Value: Open Flower vs. Whole Plant
  misc_feature: MA Experiment ID: 20000265 Result: Down-regulated in Transcription
  misc_feature: MA Experiment 20000265 PARAMETER Experiment Name: At_Open_Flower_P Parameter: Age (day) Value: 21
  misc_feature: MA Experiment 20000265 PARAMETER Experiment Name: At_Open_Flower_P Parameter: Plant Line Value: WS
  misc_feature: MA Experiment 20000265 PARAMETER Experiment Name: At_Open_Flower_P Parameter: Tissue Value: Closed Flower vs. Whole Plant
  misc_feature: MA Experiment ID: 20000286 Result: Down-regulated in Transcription
  misc_feature: MA Experiment 20000286 PARAMETER Experiment Name: At_Open_Flower_P Parameter: Age (day) Value: 21
  misc_feature: MA Experiment 20000286 PARAMETER Experiment Name: At_Open_Flower_P Parameter: Plant Line Value: WS
  misc_feature: MA Experiment 20000286 PARAMETER Experiment Name: At_Open_Flower_P Parameter: Tissue Value: Half Open vs. Whole Plant
  misc_feature: MA Experiment ID: 20000438 Result: Down-regulated in Transcription
  misc_feature: MA Experiment 20000438 PARAMETER Experiment Name: At_Shoots__P Parameter: Age (day) Value: 14
  misc_feature: MA Experiment 20000438 PARAMETER Experiment Name: At_Shoots__P Parameter: Tissue Value: Shoots vs. Whole Plant
  misc_feature: MA Experiment ID: 20000575 Result: Down-regulated in Transcription
  misc_feature: MA Experiment 20000575 PARAMETER Experiment Name: At_100uM_ABA_Mutants__P Parameter: Organism Value: A. thaliana
  misc_feature: MA Experiment 20000575 PARAMETER Experiment Name: At_100uM_ABA_Mutants__P Parameter: Plant Line Value: CS22
  misc_feature: MA Experiment 20000575 PARAMETER Experiment Name: At_100uM_ABA_Mutants__P Parameter: Timepoint (hr) Value: 6
  misc_feature: MA Experiment 20000575 PARAMETER Experiment Name: At_100uM_ABA_Mutants__P Parameter: Tissue Value: Whole Plant
  misc_feature: MA Experiment 20000575 PARAMETER Experiment Name: At_100uM_ABA_Mutants__P Parameter: Treatment Value: 1uM ABA vs. No Treatment
  misc_feature: MA Experiment ID: 20000794 Result: Down-regulated in Transcription
  misc_feature: MA Experiment 20000794 PARAMETER Experiment Name: At_Petals_P Parameter: Age (day) Value: 23-25 days
  misc_feature: MA Experiment 20000794 PARAMETER Experiment Name: At_Petals_P Parameter: Plant Line Value: WS
  misc_feature: MA Experiment 20000794 PARAMETER Experiment Name: At_Petals_P Parameter: Tissue Value: Petals vs. Whole plant
  misc_feature: MA Experiment ID: 20001248 Result: Up-regulated in Transcription
  misc_feature: MA Experiment 20001248 PARAMETER Experiment Name: At_Far-red-induction_P Parameter: Age (day) Value: 7
  misc_feature: MA Experiment 20001248 PARAMETER Experiment Name: At_Far-red-induction_P Parameter: Light Value: Far-red vs. White
  misc_feature: MA Experiment 20001248 PARAMETER Experiment Name: At_Far-red-induction_P Parameter: Organism Value: A. thaliana
  misc_feature: MA Experiment 20001248 PARAMETER Experiment Name: At_Far-red-induction_P Parameter: Plant Line Value: Columbia
  misc_feature: MA Experiment 20001248 PARAMETER Experiment Name: At_Far-red-induction_P Parameter: Timepoint (hr) Value: 4
  misc_feature: MA Experiment 20001248 PARAMETER Experiment Name: At_Far-red-induction_P Parameter: Tissue Value: Whole Plant
  misc_feature: MA Experiment ID: 20001451 Result: Up-regulated in Transcription
  misc_feature: MA Experiment 20001451 PARAMETER Experiment Name: At_Far-red-induction_P Parameter: Age (day) Value: 7
  misc_feature: MA Experiment 20001451 PARAMETER Experiment Name: At_Far-red-induction_P Parameter: Light Value: Far-red vs. White
  misc_feature: MA Experiment 20001451 PARAMETER Experiment Name: At_Far-red-induction_P Parameter: Organism Value: A. thaliana
  misc_feature: MA Experiment 20001451 PARAMETER Experiment Name: At_Far-red-induction_P Parameter: Plant Line Value: Columbia
  misc_feature: MA Experiment 20001451 PARAMETER Experiment Name: At_Far-red-induction_P Parameter: Timepoint (hr) Value: 24
  misc_feature: MA Experiment 20001451 PARAMETER Experiment Name: At_Far-red-induction_P Parameter: Tissue Value: Whole Plant
  misc_feature: MA Experiment ID: 20001554 Result: Down-regulated in Transcription
  misc_feature: MA Experiment 20001554 PARAMETER Experiment Name: At_Drought_Soil_Dry_P Parameter: Age (day) Value: 21
  misc_feature: MA Experiment 20001554 PARAMETER Experiment Name: At_Drought_Soil_Dry_P Parameter: Organism Value: A. thaliana
  misc_feature: MA Experiment 20001554 PARAMETER Experiment Name: At_Drought_Soil_Dry_P Parameter: Plant Line Value: WS
  misc_feature: MA Experiment 20001554 PARAMETER Experiment Name: At_Drought_Soil_Dry_P Parameter: Post Timepoint (hr) Value: None
  misc_feature: MA Experiment 20001554 PARAMETER Experiment Name: At_Drought_Soil_Dry_P Parameter: Post-Treatment Value: None
  misc_feature: MA Experiment 20001554 PARAMETER Experiment Name: At_Drought_Soil_Dry_P Parameter: Timepoint (day) Value: 7
  misc_feature: MA Experiment 20001554 PARAMETER Experiment Name: At_Drought_Soil_Dry_P Parameter: Treatment Value: Drought vs. No Drought
  misc_feature: MA Experiment ID: 20001555 Result: Down-regulated in Transcription
  misc_feature: MA Experiment 20001555 PARAMETER Experiment Name: At_Drought_Soil_Dry_P Parameter: Age (day) Value: 24
  misc_feature: MA Experiment 20001555 PARAMETER Experiment Name: At_Drought_Soil_Dry_P Parameter: Organism Value: A. thaliana
  misc_feature: MA Experiment 20001555 PARAMETER Experiment Name: At_Drought_Soil_Dry_P Parameter: Plant Line Value: WS
  misc_feature: MA Experiment 20001555 PARAMETER Experiment Name: At_Drought_Soil_Dry_P Parameter: Post Timepoint (hr) Value: None
  misc_feature: MA Experiment 20001555 PARAMETER Experiment Name: At_Drought_Soil_Dry_P Parameter: Post-Treatment Value: None
  misc_feature: MA Experiment 20001555 PARAMETER Experiment Name: At_Drought_Soil_Dry_P Parameter: Timepoint (day) Value: 10
  misc_feature: MA Experiment 20001555 PARAMETER Experiment Name: At_Drought_Soil_Dry_P Parameter: Treatment Value: Drought vs. No Drought
  misc_feature: MA Experiment ID: 20001556 Result: Down-regulated in Transcription
  misc_feature: MA Experiment 20001556 PARAMETER Experiment Name: At_Drought_Soil_Dry_P Parameter: Age (day) Value: 26
  misc_feature: MA Experiment 20001556 PARAMETER Experiment Name: At_Drought_Soil_Dry_P Parameter: Organism Value: A. thaliana
  misc_feature: MA Experiment 20001556 PARAMETER Experiment Name: At_Drought_Soil_Dry_P Parameter: Plant Line Value: WS
  misc_feature: MA Experiment 20001556 PARAMETER Experiment Name: At_Drought_Soil_Dry_P Parameter: Post Timepoint (hr) Value: None
  misc_feature: MA Experiment 20001556 PARAMETER Experiment Name: At_Drought_Soil_Dry_P Parameter: Post-Treatment Value: None
  misc_feature: MA Experiment 20001556 PARAMETER Experiment Name: At_Drought_Soil_Dry_P Parameter: Timepoint (day) Value: 12
  misc_feature: MA Experiment 20001556 PARAMETER Experiment Name: At_Drought_Soil_Dry_P Parameter: Treatment Value: Drought vs. No Drought
  misc_feature: MA Experiment ID: 20001558 Result: Down-regulated in Transcription
  misc_feature: MA Experiment 20001558 PARAMETER Experiment Name: At_Drought_Soil_Dry_P Parameter: Age (day) Value: 27
  misc_feature: MA Experiment 20001558 PARAMETER Experiment Name: At_Drought_Soil_Dry_P Parameter: Organism Value: A. thaliana
  misc_feature: MA Experiment 20001558 PARAMETER Experiment Name: At_Drought_Soil_Dry_P Parameter: Plant Line Value: WS
  misc_feature: MA Experiment 20001558 PARAMETER Experiment Name: At_Drought_Soil_Dry_P Parameter: Post Timepoint (hr) Value: 6
  misc_feature: MA Experiment 20001558 PARAMETER Experiment Name: At_Drought_Soil_Dry_P Parameter: Post-Treatment Value: Re-Water vs. No Drought
  misc_feature: MA Experiment 20001558 PARAMETER Experiment Name: At_Drought_Soil_Dry_P Parameter: Timepoint (day) Value: 13
  misc_feature: MA Experiment 20001558 PARAMETER Experiment Name: At_Drought_Soil_Dry_P Parameter: Treatment Value: Drought vs. No Drought
  misc_feature: MA Experiment ID: 20001560 Result: Down-regulated in Transcription
  misc_feature: MA Experiment 20001560 PARAMETER Experiment Name: At_Drought_Soil_Dry_P Parameter: Age (day) Value: 28
  misc_feature: MA Experiment 20001560 PARAMETER Experiment Name: At_Drought_Soil_Dry_P Parameter: Organism Value: A. thaliana
  misc_feature: MA Experiment 20001560 PARAMETER Experiment Name: At_Drought_Soil_Dry_P Parameter: Plant Line Value: WS
  misc_feature: MA Experiment 20001560 PARAMETER Experiment Name: At_Drought_Soil_Dry_P Parameter: Post Timepoint (hr) Value: None
  misc_feature: MA Experiment 20001560 PARAMETER Experiment Name: At_Drought_Soil_Dry_P Parameter: Post-Treatment Value: None
  misc_feature: MA Experiment 20001560 PARAMETER Experiment Name: At_Drought_Soil_Dry_P Parameter: Timepoint (day) Value: 14
  misc_feature: MA Experiment 20001560 PARAMETER Experiment Name: At_Drought_Soil_Dry_P Parameter: Treatment Value: Drought vs. No Drought
atggatcacgatctcgacaaattccctttactctcttacgtccttcatcaacatgactccaatctccacgcgccgccgtctatggccgcgcaagaaactctccttccttcttttcctcttctctccaatccagaaatcatgtctatgttgactcaatccatccccacaacgatcacacagacgcttttcgtcttcaactctctcggctctcgacctgatcccttagcggtttcctctgctcgattcaagatcgctcaaattatggattcgctctcgccggaggaagcagcgaaggagtcggagatttatgccggggttgtgcggttggatgaagtgcacgatagttacgagaagaagttgaaggatacagaggaggagctttctagggtttattctacggaggtggaatcgatgttgagaagcggtgaagaagtgaacgagaaggttcttgcggtgctcaaggaggcggaatccggcggaaccgttgagaggattgatctctccagccaagaacttaagcttatccctgaagctttttggaaagtagttggcttagtatacttgaatctctctggcaatgacttgacgtttataccggatgcaatctcgaaactcaagaagctagaagagctcgatgtatcttcaaattctttggaatctcttcctgactctatagggatgttgcttaaccttagaatccttaatgtgaatgcgaacaatctaaccgcactccctgagagcatcgcgcattgcagcaacaaccaaatccaagctataccagactcattttataggctgaggaagctagagaaactgaacttggaccaaaacccgcttgagatcccatctcaagaagtggctactcaaggagctgaagttgttagagagtttatgaggaagagatggggtgatatcatggcagagcagcaacagaggattggcgttgaggctgagcgacatggagatgaaaacgggtgggtctattggggaacctccatggttactaatcttgtttctggagtgacccataccattggatttggaggagcaactagcgatggtggagataagaaaccgggagactcgtacttttatcaccaaatctga

SEQ ID NO: 72397 - protein, 368 aa, Arabidopsis thaliana
  peptide (1)..(368): Ceres Seq. ID no. 4931488
  misc_feature (184)..(206): Pfam Name: Leucine Rich Repeat Pfam Description: Leucine Rich Repeat
  misc_feature (1)..(279): Homolog of NCBI NO: 30688342 NR Description: leucine rich repeat protein family [Arabidopsis
  misc_feature (1)..(279): Homolog of NCBI NO: 18391461 NR Description: expressed protein; protein id: At1g12970.1, by cDNA: gi_17063164 [Arabidopsis thaliana] At1g12970/F13K23_18 [Arabidopsis thaliana]
  misc_feature (1)..(251): Homolog of NCBI NO: 25518616 NR Description: hypothetical protein F13K23.23 - Arabidopsis >gi|8698744|gb|AAF78502.1|AC012187_22 Contains similarity to CYR1 Candida albicans gb|AB034965 and contains multiple Leucine Rich
  misc_feature (145)..(368): Homolog of NCBI NO: 30688342 NR Description: leucine rich repeat protein family [Arabidopsis
  misc_feature (150)..(368): Homolog of NCBI NO: 18391461 NR Description: expressed protein; protein id: At1g12970.1, by cDNA: gi_17063164 [Arabidopsis thaliana] At1g12970/F13K23_18 [Arabidopsis thaliana]
  misc_feature (165)..(368): Homolog of NCBI NO: 25518616 NR Description: hypothetical protein F13K23.23 - Arabidopsis >gi|8698744|gb|AAF78502.1|AC012187_22 Contains similarity to CYR1 Candida albicans gb|AB034965 and contains multiple Leucine Rich
  misc_feature (67)..(283): Homolog of NCBI NO: 15239256 NR Description: putative protein; protein id: At5g05850.1 thaliana] >gi|9759110|dbj|BAB09679.1|
  misc_feature (85)..(269): Homolog of NCBI NO: 22330985 NR Description: hypothetical protein; protein id: At3g11330.1, by cDNA: gi_18175637 [Arabidopsis thaliana] unknown protein [Arabidopsis thaliana]
  misc_feature (112)..(350): Homolog of NCBI NO: 25518616 NR Description: hypothetical protein F13K23.23 - Arabidopsis >gi|8698744|gb|AAF78502.1|AC012187_22 Contains similarity to CYR1 Candida albicans gb|AB034965 and contains multiple Leucine Rich
  misc_feature (101)..(283): Homolog of NCBI NO: 38605760 NR Description: OSJNBa0044K18.1 [Oryza sativa (japonica
MDHDLDKFPLLSYVLHQHDSNLHAPPSMAAQETLLPSFPLLSNPEIMSMLTQSIPTTITQTLFVFNSLGSRPDPLAVSSARFKIAQIMDSLSPEEAAKESEIYAGVVRLDEVHDSYEKKLKDTEEELSRVYSTEVESMLRSGEEVNEKVLAVLKEAESGGTVERIDLSSQELKLIPEAFWKVVGLVYLNLSGNDLTFIPDAISKLKKLEELDVSSNSLESLPDSIGMLLNLRILNVNANNLTALPESIAHCSNNQIQAIPDSFYRLRKLEKLNLDQNPLEIPSQEVATQGAEVVREFMRKRWGDIMAEQQQRIGVEAERHGDENGWVYWGTSMVTNLVSGVTHTIGFGGATSDGGDKKPGDSYFYHQI

SEQ ID NO: 72398 - protein, 341 aa, Arabidopsis thaliana
  peptide (1)..(341): Ceres Seq. ID no. 4931489
  misc_feature (157)..(179): Pfam Name: Leucine Rich Repeat Pfam Description: Leucine Rich Repeat
  misc_feature (1)..(252): Homolog of NCBI NO: 30688342 NR Description: leucine rich repeat protein family [Arabidopsis
  misc_feature (1)..(252): Homolog of NCBI NO: 18391461 NR Description: expressed protein; protein id: At1g12970.1, by cDNA: gi_17063164 [Arabidopsis thaliana] At1g12970/F13K23_18 [Arabidopsis thaliana]
  misc_feature (1)..(224): Homolog of NCBI NO: 25518616 NR Description: hypothetical protein F13K23.23 - Arabidopsis >gi|8698744|gb|AAF78502.1|AC012187_22 Contains similarity to CYR1 Candida albicans gb|AB034965 and contains multiple Leucine Rich
  misc_feature (118)..(341): Homolog of NCBI NO: 30688342 NR Description: leucine rich repeat protein family [Arabidopsis
  misc_feature (123)..(341): Homolog of NCBI NO: 18391461 NR Description: expressed protein; protein id: At1g12970.1, by cDNA: gi_17063164 [Arabidopsis thaliana] At1g12970/F13K23_18 [Arabidopsis thaliana]
  misc_feature (138)..(341): Homolog of NCBI NO: 25518616 NR Description: hypothetical protein F13K23.23 - Arabidopsis >gi|8698744|gb|AAF78502.1|AC012187_22 Contains similarity to CYR1 Candida albicans gb|AB034965 and contains multiple Leucine Rich
  misc_feature (40)..(256): Homolog of NCBI NO: 15239256 NR Description: putative protein; protein id: At5g05850.1 thaliana] >gi|9759110|dbj|BAB09679.1|
  misc_feature (58)..(242): Homolog of NCBI NO: 22330985 NR Description: hypothetical protein; protein id: At3g11330.1, by cDNA: gi_18175637 [Arabidopsis thaliana] unknown protein [Arabidopsis thaliana]
  misc_feature (85)..(323): Homolog of NCBI NO: 25518616 NR Description: hypothetical protein F13K23.23 - Arabidopsis >gi|8698744|gb|AAF78502.1|AC012187_22 Contains similarity to CYR1 Candida albicans gb|AB034965 and contains multiple Leucine Rich
  misc_feature (74)..(256): Homolog of NCBI NO: 38605760 NR Description: OSJNBa0044K18.1 [Oryza sativa (japonica
MAAQETLLPSFPLLSNPEIMSMLTQSIPTTITQTLFVFNSLGSRPDPLAVSSARFKIAQIMDSLSPEEAAKESEIYAGVVRLDEVHDSYEKKLKDTEEELSRVYSTEVESMLRSGEEVNEKVLAVLKEAESGGTVERIDLSSQELKLIPEAFWKVVGLVYLNLSGNDLTFIPDAISKLKKLEELDVSSNSLESLPDSIGMLLNLRILNVNANNLTALPESIAHCSNNQIQAIPDSFYRLRKLEKLNLDQNPLEIPSQEVATQGAEVVREFMRKRWGDIMAEQQQRIGVEAERHGDENGWVYWGTSMVTNLVSGVTHTIGFGGATSDGGDKKPGDSYFYHQI

SEQ ID NO: 72399 - protein, 322 aa, Arabidopsis thaliana
  peptide (1)..(322): Ceres Seq. ID no. 4931490
  misc_feature (138)..(160): Pfam Name: Leucine Rich Repeat Pfam Description: Leucine Rich Repeat
  misc_feature (1)..(233): Homolog of NCBI NO: 30688342 NR Description: leucine rich repeat protein family [Arabidopsis
  misc_feature (1)..(233): Homolog of NCBI NO: 18391461 NR Description: expressed protein; protein id: At1g12970.1, by cDNA: gi_17063164 [Arabidopsis thaliana] At1g12970/F13K23_18 [Arabidopsis thaliana]
  misc_feature (1)..(205): Homolog of NCBI NO: 25518616 NR Description: hypothetical protein F13K23.23 - Arabidopsis >gi|8698744|gb|AAF78502.1|AC012187_22 Contains similarity to CYR1 Candida albicans gb|AB034965 and contains multiple Leucine Rich
  misc_feature (99)..(322): Homolog of NCBI NO: 30688342 NR Description: leucine rich repeat protein family [Arabidopsis
  misc_feature (104)..(322): Homolog of NCBI NO: 18391461 NR Description: expressed protein; protein id: At1g12970.1, by cDNA: gi_17063164 [Arabidopsis thaliana] At1g12970/F13K23_18 [Arabidopsis thaliana]
  misc_feature (119)..(322): Homolog of NCBI NO: 25518616 NR Description: hypothetical protein F13K23.23 - Arabidopsis >gi|8698744|gb|AAF78502.1|AC012187_22 Contains similarity to CYR1 Candida albicans gb|AB034965 and contains multiple Leucine Rich
  misc_feature (21)..(237): Homolog of NCBI NO: 15239256 NR Description: putative protein; protein id: At5g05850.1 thaliana] >gi|9759110|dbj|BAB09679.1|
  misc_feature (39)..(223): Homolog of NCBI NO: 22330985 NR Description: hypothetical protein; protein id: At3g11330.1, by cDNA: gi_18175637 [Arabidopsis thaliana] unknown protein [Arabidopsis thaliana]
  misc_feature (66)..(304): Homolog of NCBI NO: 25518616 NR Description: hypothetical protein F13K23.23 - Arabidopsis >gi|8698744|gb|AAF78502.1|AC012187_22 Contains similarity to CYR1 Candida albicans gb|AB034965 and contains multiple Leucine Rich
  misc_feature (55)..(237): Homolog of NCBI NO: 38605760 NR Description: OSJNBa0044K18.1 [Oryza sativa (japonica
MSMLTQSIPTTITQTLFVFNSLGSRPDPLAVSSARFKIAQIMDSLSPEEAAKESEIYAGVVRLDEVHDSYEKKLKDTEEELSRVYSTEVESMLRSGEEVNEKVLAVLKEAESGGTVERIDLSSQELKLIPEAFWKVVGLVYLNLSGNDLTFIPDAISKLKKLEELDVSSNSLESLPDSIGMLLNLRILNVNANNLTALPESIAHCSNNQIQAIPDSFYRLRKLEKLNLDQNPLEIPSQEVATQGAEVVREFMRKRWGDIMAEQQQRIGVEAERHGDENGWVYWGTSMVTNLVSGVTHTIGFGGATSDGGDKKPGDSYFYHQI

SEQ ID NO: 72400 - DNA, 2799 bp, Arabidopsis thaliana
  misc_feature (1)..(2799): Ceres Seq. ID no. 4931839
  misc_feature: MA Experiment ID: 20000315 Result: Down-regulated in Transcription
  misc_feature: MA Experiment 20000315 PARAMETER Experiment Name: At_14day_Shoots-Roots_Sub_P Parameter: Age (day) Value: 14
  misc_feature: MA Experiment 20000315 PARAMETER Experiment Name: At_14day_Shoots-Roots_Sub_P Parameter: Organism Value: A. thaliana
  misc_feature: MA Experiment 20000315 PARAMETER Experiment Name: At_14day_Shoots-Roots_Sub_P Parameter: Plant Line Value: WS
  misc_feature: MA Experiment 20000315 PARAMETER Experiment Name: At_14day_Shoots-Roots_Sub_P Parameter: Tissue Value: Shoots vs. Whole Plant
atgggacctccgagaactccgttaagtaagatagataagtccaatccttatactccatgtggttccaaagttacagaggagaagattcttgtcactgttcggatgagaccattaaattggagggaacatgccaaatatgatctcattgcttgggaatgtcccgatgatgagactatcgtctttaagaatccgaatcctgacaaggctccaacaaaatattcatttgataaagtttttgagccaacttgtgcaactcaagaggtgtatgaaggtggttctagggacgttgcactatctgcattagcaggaacaaatgcaactatttttgcttatggtcagactagtagtggcaagacgtttacaatgaggggggttactgaaagtgttgttaaagatatatacgaacatataagaaaaactcaagaaaggagctttgtcttgaaagtatctgctttggagatttataacgagaccgtggttgaccttttaaatcgtgatactgggccccttagactgttagatgatccagagaaaggaaccattgtggaaaatctggtggaggaagtggtagaaagcaggcaacatttacagcatttaattagcatttgtgaagatcaaaggcaagtaggtgaaactgctttaaacgacaaaagttcaagatcgcatcagattattcggctgaccatccatagcagtctcagggaaatagcaggctgtgtgcagtctttcatggcaactctgaatcttgttgatcttgctggaagcgaacgtgcttttcaaacaaacgcagatggtctaagattgaaggaaggaagccacattaaccgtagtttattgacacttactacagtgatcagaaaactgagttctggaagaaaaagggatcacgtgccgtatagagactcaaagctgacaagaattttgcaaaattcacttggcgggaatgctagaacagcaattatatgtacgattagtccggcactgagtcatgttgaacagacaaaaaagacactttcttttgccatgagtgcgaaggaagtcaccaattgcgctaaagtaaacatggttgtctcagaaaaaaagctgctgaaacatctgcagcaaaaagtagctaaactcgagtcagagttaagaagcccggagcccagttcatccacctgcttaaagtctctgttaattgagaaagagatgaaaatccaacagatggaatccgaaatgaaagagctaaagcgtcagagagacattgcacagtctgaacttgatctagaaagaaaagcaaaggagcggaagggatcaagtgagtgtgaacctttttctcaagtggcaaggtgtctctcataccatacaaaggaggaatccattccaagcaaatctgttccgtcaagccgcagaacagctcgtgataggagaaaggataatgtgaggcagtctttaacttcggcggatccaacagcgctagtccaagaaattcgtttgcttgaaaaacatcaaaagaagttgggtgaagaagcaaaccaagcactggatctaattcacaaagaagtgacatcccataaactgggtgatcaacaagctgcagaaaaagttgcgaaaatgctgtcagaaatcagggacatgcagaagagcaaccttttaactgaggaaattgtagttggtgataaagccaacctgaaggaagaaataaatcggttgaattctcaagaaattgcagctttggagaagaagctagagtgtgttcagaacactattgacatgcttgtctcgtcttttcagacagatgaacagactccagatttcaggacccaggtgaaaaagaagagacttcttcccttcggcttaagtaatagtcctaacctacagcatatgatccggggaccatgttcacctctttctgggactgaaaataaggatcctgagagcaatgttgtgtctgctaattcagccccagtgtcttttggagctactccaccaaagagggatgataaccgatgtcgtacacagtcaagggaaggaacgcctgtatcacgacaagcaaattcagtcgatattaagagaatgaatcgaatgtataagaatgctgccgaagagaatatacgtaatatcaaatcttatgttactggattgaaagaacgtgtggcgaagcttcaataccagaagcagctgcttgtttgccaggcaaacgagacaggcgctgcttcggagtacgatgcaaccgatgaatctcagatggattggccattgtgttttgaagagcagagaaagcaaatcataatgttatggcatctgtgccacatttcaatcattcacagaacacaattctacatgttattcaaaggagacccagctgatcaaatctacatggaggttgagctccgcaggctgacatggctcgaacagcacttggctgagcttgggaatgcgagtcctgcattgcttggtgatgaaccagcaagctacgtagcatcgagtataagagctttgaagcaggagagagagtatttggcgaaacgggtaaacacaaagctaggagcagaggaaagagagatgctatacctgaaatgggatgtcccgccggtgggaaaacagaggagacaacagttcatcaacaaactctggacagatcctcacaacatgcaacacgtgagagagagtgcggagatcgtggctaagcttgtcggattctgtgactcgggagagaccataaggaaagaaatgtttgagctcaactttgcatctccttcagataagaagacttggatgatgggttggaacttcatatccaacttgttgcatctctag

SEQ ID NO: 72401 - protein, 932 aa, Arabidopsis thaliana
  peptide (1)..(932): Ceres Seq. ID no. 4931840
  misc_feature (5)..(932): Homolog of NCBI NO: 19570249 NR Description: kinesin-like protein NACK2 [Nicotiana tabacum]
  misc_feature (4)..(721): Homolog of NCBI NO: 22329653 NR Description: kinesin heavy chain isolog, putative; protein id:
  misc_feature (634)..(932): Homolog of NCBI NO: 22329653 NR Description: kinesin heavy chain isolog, putative; protein id:
  misc_feature (3)..(930): Homolog of NCBI NO: 34914660 NR Description: putative kinesin [Oryza sativa (japonica
  misc_feature (4)..(743): Homolog of NCBI NO: 19570247 NR Description: kinesin-like protein NACK1 [Nicotiana tabacum]
  misc_feature (187)..(922): Homolog of NCBI NO: 15208449 NR Description: kinesin heavy chain [Zea mays]
  misc_feature (27)..(925): Homolog of NCBI NO: 38344976 NR Description: OSJNBa0011L07.1 [Oryza sativa (japonica
  misc_feature (21)..(465): Homolog of NCBI NO: 30698217 NR Description: kinesin heavy chain DNA binding protein-related
  misc_feature (740)..(918): Homolog of NCBI NO: 30698217 NR Description: kinesin heavy chain DNA binding protein-related
  misc_feature (21)..(424): Homolog of NCBI NO: 30693419 NR Description: expressed protein [Arabidopsis thaliana]
MGPPRTPLSKIDKSNPYTPCGSKVTEEKILVTVRMRPLNWREHAKYDLIAWECPDDETIVFKNPNPDKAPTKYSFDKVFEPTCATQEVYEGGSRDVALSALAGTNATIFAYGQTSSGKTFTMRGVTESVVKDIYEHIRKTQERSFVLKVSALEIYNETVVDLLNRDTGPLRLLDDPEKGTIVENLVEEVVESRQHLQHLISICEDQRQVGETALNDKSSRSHQIIRLTIHSSLREIAGCVQSFMATLNLVDLAGSERAFQTNADGLRLKEGSHINRSLLTLTTVIRKLSSGRKRDHVPYRDSKLTRILQNSLGGNARTAIICTISPALSHVEQTKKTLSFAMSAKEVTNCAKVNMVVSEKKLLKHLQQKVAKLESELRSPEPSSSTCLKSLLIEKEMKIQQMESEMKELKRQRDIAQSELDLERKAKERKGSSECEPFSQVARCLSYHTKEESIPSKSVPSSRRTARDRRKDNVRQSLTSADPTALVQEIRLLEKHQKKLGEEANQALDLIHKEVTSHKLGDQQAAEKVAKMLSEIRDMQKSNLLTEEIVVGDKANLKEEINRLNSQEIAALEKKLECVQNTIDMLVSSFQTDEQTPDFRTQVKKKRLLPFGLSNSPNLQHMIRGPCSPLSGTENKDPESNVVSANSAPVSFGATPPKRDDNRCRTQSREGTPVSRQANSVDIKRMNRMYKNAAEENIRNIKSYVTGLKERVAKLQYQKQLLVCQANETGAASEYDATDESQMDWPLCFEEQRKQIIMLWHLCHISIIHRTQFYMLFKGDPADQIYMEVELRRLTWLEQHLAELGNASPALLGDEPASYVASSIRALKQEREYLAKRVNTKLGAEEREMLYLKWDVPPVGKQRRQQFINKLWTDPHNMQHVRESAEIVAKLVGFCDSGETIRKEMFELNFASPSDKKTWMMGWNFISNLLHL

SEQ ID NO: 72402 - protein, 898 aa, Arabidopsis thaliana
  peptide (1)..(898): Ceres Seq. ID no. 4931841
  misc_feature (1)..(898): Homolog of NCBI NO: 19570249 NR Description: kinesin-like protein NACK2 [Nicotiana tabacum]
  misc_feature (1)..(687): Homolog of NCBI NO: 22329653 NR Description: kinesin heavy chain isolog, putative; protein id:
  misc_feature (600)..(898): Homolog of NCBI NO: 22329653 NR Description: kinesin heavy chain isolog, putative; protein id:
  misc_feature (1)..(896): Homolog of NCBI NO: 34914660 NR Description: putative kinesin [Oryza sativa (japonica
  misc_feature (1)..(709): Homolog of NCBI NO: 19570247 NR Description: kinesin-like protein NACK1 [Nicotiana tabacum]
  misc_feature (153)..(888): Homolog of NCBI NO: 15208449 NR Description: kinesin heavy chain [Zea mays]
  misc_feature (1)..(891): Homolog of NCBI NO: 38344976 NR Description: OSJNBa0011L07.1 [Oryza sativa (japonica
  misc_feature (1)..(431): Homolog of NCBI NO: 30698217 NR Description: kinesin heavy chain DNA binding protein-related
  misc_feature (706)..(884): Homolog of NCBI NO: 30698217 NR Description: kinesin heavy chain DNA binding protein-related
  misc_feature (1)..(390): Homolog of NCBI NO: 30693419 NR Description: expressed protein [Arabidopsis thaliana]
MRPLNWREHAKYDLIAWECPDDETIVFKNPNPDKAPTKYSFDKVFEPTCATQEVYEGGSRDVALSALAGTNATIFAYGQTSSGKTFTMRGVTESVVKDIYEHIRKTQERSFVLKVSALEIYNETVVDLLNRDTGPLRLLDDPEKGTIVENLVEEVVESRQHLQHLISICEDQRQVGETALNDKSSRSHQIIRLTIHSSLREIAGCVQSFMATLNLVDLAGSERAFQTNADGLRLKEGSHINRSLLTLTTVIRKLSSGRKRDHVPYRDSKLTRILQNSLGGNARTAIICTISPALSHVEQTKKTLSFAMSAKEVTNCAKVNMVVSEKKLLKHLQQKVAKLESELRSPEPSSSTCLKSLLIEKEMKIQQMESEMKELKRQRDIAQSELDLERKAKERKGSSECEPFSQVARCLSYHTKEESIPSKSVPSSRRTARDRRKDNVRQSLTSADPTALVQEIRLLEKHQKKLGEEANQALDLIHKEVTSHKLGDQQAAEKVAKMLSEIRDMQKSNLLTEEIVVGDKANLKEEINRLNSQEIAALEKKLECVQNTIDMLVSSFQTDEQTPDFRTQVKKKRLLPFGLSNSPNLQHMIRGPCSPLSGTENKDPESNVVSANSAPVSFGATPPKRDDNRCRTQSREGTPVSRQANSVDIKRMNRMYKNAAEENIRNIKSYVTGLKERVAKLQYQKQLLVCQANETGAASEYDATDESQMDWPLCFEEQRKQIIMLWHLCHISIIHRTQFYMLFKGDPADQIYMEVELRRLTWLEQHLAELGNASPALLGDEPASYVASSIRALKQEREYLAKRVNTKLGAEEREMLYLKWDVPPVGKQRRQQFINKLWTDPHNMQHVRESAEIVAKLVGFCDSGETIRKEMFELNFASPSDKKTWMMGWNFISNLLHL

SEQ ID NO: 72403 - protein, 811 aa, Arabidopsis thaliana
  peptide (1)..(811): Ceres Seq. ID no. 4931842
  misc_feature (1)..(811): Homolog of NCBI NO: 19570249 NR Description: kinesin-like protein NACK2 [Nicotiana tabacum]
  misc_feature (1)..(600): Homolog of NCBI NO: 22329653 NR Description: kinesin heavy chain isolog, putative; protein id:
  misc_feature (513)..(811): Homolog of NCBI NO: 22329653 NR Description: kinesin heavy chain isolog, putative; protein id:
  misc_feature (1)..(809): Homolog of NCBI NO: 34914660 NR Description: putative kinesin [Oryza sativa (japonica
  misc_feature (1)..(622): Homolog of NCBI NO: 19570247 NR Description: kinesin-like protein NACK1 [Nicotiana tabacum]
  misc_feature (66)..(801): Homolog of NCBI NO: 15208449 NR Description: kinesin heavy chain [Zea mays]
  misc_feature (1)..(804): Homolog of NCBI NO: 38344976 NR Description: OSJNBa0011L07.1 [Oryza sativa (japonica
  misc_feature (1)..(344): Homolog of NCBI NO: 30698217 NR Description: kinesin heavy chain DNA binding protein-related
  misc_feature (619)..(797): Homolog of NCBI NO: 30698217 NR Description: kinesin heavy chain DNA binding protein-related
  misc_feature (1)..(303): Homolog of NCBI NO: 30693419 NR Description: expressed protein [Arabidopsis thaliana]
MRGVTESVVKDIYEHIRKTQERSFVLKVSALEIYNETVVDLLNRDTGPLRLLDDPEKGTIVENLVEEVVESRQHLQHLISICEDQRQVGETALNDKSSRSHQIIRLTIHSSLREIAGCVQSFMATLNLVDLAGSERAFQTNADGLRLKEGSHINRSLLTLTTVIRKLSSGRKRDHVPYRDSKLTRILQNSLGGNARTAIICTISPALSHVEQTKKTLSFAMSAKEVTNCAKVNMVVSEKKLLKHLQQKVAKLESELRSPEPSSSTCLKSLLIEKEMKIQQMESEMKELKRQRDIAQSELDLERKAKERKGSSECEPFSQVARCLSYHTKEESIPSKSVPSSRRTARDRRKDNVRQSLTSADPTALVQEIRLLEKHQKKLGEEANQALDLIHKEVTSHKLGDQQAAEKVAKMLSEIRDMQKSNLLTEEIVVGDKANLKEEINRLNSQEIAALEKKLECVQNTIDMLVSSFQTDEQTPDFRTQVKKKRLLPFGLSNSPNLQHMIRGPCSPLSGTENKDPESNVVSANSAPVSFGATPPKRDDNRCRTQSREGTPVSRQANSVDIKRMNRMYKNAAEENIRNIKSYVTGLKERVAKLQYQKQLLVCQANETGAASEYDATDESQMDWPLCFEEQRKQIIMLWHLCHISIIHRTQFYMLFKGDPADQIYMEVELRRLTWLEQHLAELGNASPALLGDEPASYVASSIRALKQEREYLAKRVNTKLGAEEREMLYLKWDVPPVGKQRRQQFINKLWTDPHNMQHVRESAEIVAKLVGFCDSGETIRKEMFELNFASPSDKKTWMMGWNFISNLLHL

SEQ ID NO: 72404 - DNA, 1260 bp, Arabidopsis thaliana
  misc_feature (1)..(1260): Ceres Seq. ID no. 4932130
  misc_feature: MA Experiment ID: 20000315 Result: Down-regulated in Transcription
  misc_feature: MA Experiment 20000315 PARAMETER Experiment Name: At_14day_Shoots-Roots_Sub_P Parameter: Age (day) Value: 14
  misc_feature: MA Experiment 20000315 PARAMETER Experiment Name: At_14day_Shoots-Roots_Sub_P Parameter: Organism Value: A. thaliana
  misc_feature: MA Experiment 20000315 PARAMETER Experiment Name: At_14day_Shoots-Roots_Sub_P Parameter: Plant Line Value: WS
  misc_feature: MA Experiment 20000315 PARAMETER Experiment Name: At_14day_Shoots-Roots_Sub_P Parameter: Tissue Value: Shoots vs. Whole Plant
  misc_feature: MA Experiment ID: 20000347 Result: Up-regulated in Transcription
  misc_feature: MA Experiment 20000347 PARAMETER Experiment Name: At_2mM_SA_Sub_P Parameter: Age (day) Value: 14
  misc_feature: MA Experiment 20000347 PARAMETER Experiment Name: At_2mM_SA_Sub_P Parameter: Organism Value: A. thaliana
  misc_feature: MA Experiment 20000347 PARAMETER Experiment Name: At_2mM_SA_Sub_P Parameter: Plant Line Value: WS
  misc_feature: MA Experiment 20000347 PARAMETER Experiment Name: At_2mM_SA_Sub_P Parameter: Timepoint (hr) Value: 6
  misc_feature: MA Experiment 20000347 PARAMETER Experiment Name: At_2mM_SA_Sub_P Parameter: Tissue Value: Aerial
  misc_feature: MA Experiment 20000347 PARAMETER Experiment Name: At_2mM_SA_Sub_P Parameter: Treatment Value: 2mM SA vs. No Treatment
  misc_feature: MA Experiment ID: 20000355 Result: Down-regulated in Transcription
  misc_feature: MA Experiment 20000355 PARAMETER Experiment Name: At_Siliques_Sub_P Parameter: Age (day) Value: 21
  misc_feature: MA Experiment 20000355 PARAMETER Experiment Name: At_Siliques_Sub_P Parameter: Organism Value: A. thaliana
  misc_feature: MA Experiment 20000355 PARAMETER Experiment Name: At_Siliques_Sub_P Parameter: Plant Line Value: WS
  misc_feature: MA Experiment 20000355 PARAMETER Experiment Name: At_Siliques_Sub_P Parameter: Tissue Value: Less Than 5mm Siliques vs. Whole Plant
atgctgaatgtttttttttgggttgcaggggatgtggggagtgtctattttggtccgaatcacccgatgaaacctcacaggctttgtatgacccatcatcttatccttgcatatggcctgcatagcaagatggaagtttatcgtccacacaaagcatatcctatcgagatggctcagttccattctcctgactatgtagagttcctgcaacgaattaatccagaaaaccagaacttgttccccaatgaaatggctagatataatctgggagaggattgtcctgtctttgaagatttgtttgaattttgtcaactttacgccggcggaaccatagatgctgcacgcaggttaaacaacaaactctgtgacattgctataaattgggcgggcgggttgcaccatgccaaaaaatgtgatgcatctgggttttgctacatcaacgatctcgtgctaggaattcttgagttgttaaaacaccatccccgtgttctatacatagatatagatgttcatcatggtgatggggttgaagaagcgttttacttcactgacagagtaatgactgttagctttcataagtttggggataagttctttccagggacaggcgatgttaaggaaataggagaaagagaagggaaattttacgccattaatgtgccgctgaaggatggtatcgatgacagtagtttcaaccgtcttttcaggactgttgttgagatatatcaaccgggtgcaattgttcttcaatgcggggcagattcactagccagggatcgactaggatgctttaatctctctattgatggacatgctgaatgtgttaaattcgtgaagaagttcaatcttcccttactggttacaggaggtggaggatacacaaaggagaatgtagctcgttgttggaccgttgagactggcattcttttggacacagaacttcctaatgagattcctgaaaacgactacataaagtattttgcgccggatttttctttgaagataccgggtggtcacattgagaatcttaataccaaatcgtacatcagttccatcaaagtgcagattttggagaatttgcgatacattcaacacgctccaagcgtacaaatgcaggaggttccaccggatttctacataccggattttgatgaagacgaacaaaacccggatgtacgtgcggatcagcgttcacgggataagcagatccagagggatgatgaatatttcgatggagacaacgataacgatgcgtcataa

SEQ ID NO: 72405 - protein, 419 aa, Arabidopsis thaliana
  peptide (1)..(419): Ceres Seq. ID no. 4932131
  misc_feature (1)..(419): Homolog of NCBI NO: 11278171 NR Description: hypothetical protein T18B22.80 - Arabidopsis >gi|6967116|emb|CAB72470.1| putative protein [Arabidopsis
  misc_feature (4)..(419): Homolog of NCBI NO: 30692236 NR Description: expressed protein [Arabidopsis thaliana] putative protein [Arabidopsis thaliana]
  misc_feature (4)..(417): Homolog of NCBI NO: 17017402 NR Description: histone deacetylase [Zea mays]
  misc_feature (173)..(417): Homolog of NCBI NO: 38347605 NR Description: OSJNBa0042I15.18 [Oryza sativa (japonica
  misc_feature (4)..(136): Homolog of NCBI NO: 38347605 NR Description: OSJNBa0042I15.18 [Oryza sativa (japonica
  misc_feature (4)..(417): Homolog of NCBI NO: 2827430 NR Description: histone deacetylase 1 [Gallus gallus]
  misc_feature (4)..(417): Homolog of NCBI NO: 3023929 NR Description: Histone deacetylase 1 (HD1)
  misc_feature (4)..(417): Homolog of NCBI NO: 6680193 NR Description: histone deacetylase 1 [Mus musculus] Histone deacetylase 1 (HD1) >gi|1771286|emb|CAA66870.1| histone
  misc_feature (4)..(417): Homolog of NCBI NO: 2347180 NR Description: putative histone deacetylase [Mus musculus]
  misc_feature (4)..(417): Homolog of NCBI NO: 3023930 NR Description: Histone deacetylase 1 (HD1)
MLNVFFWVAGDVGSVYFGPNHPMKPHRLCMTHHLILAYGLHSKMEVYRPHKAYPIEMAQFHSPDYVEFLQRINPENQNLFPNEMARYNLGEDCPVFEDLFEFCQLYAGGTIDAARRLNNKLCDIAINWAGGLHHAKKCDASGFCYINDLVLGILELLKHHPRVLYIDIDVHHGDGVEEAFYFTDRVMTVSFHKFGDKFFPGTGDVKEIGEREGKFYAINVPLKDGIDDSSFNRLFRTVVEIYQPGAIVLQCGADSLARDRLGCFNLSIDGHAECVKFVKKFNLPLLVTGGGGYTKENVARCWTVETGILLDTELPNEIPENDYIKYFAPDFSLKIPGGHIENLNTKSYISSIKVQILENLRYIQHAPSVQMQEVPPDFYIPDFDEDEQNPDVRADQRSRDKQIQRDDEYFDGDNDNDAS

SEQ ID NO: 72406 - protein, 397 aa, Arabidopsis thaliana
  peptide (1)..(397): Ceres Seq. ID no. 4932132
  misc_feature (1)..(397): Homolog of NCBI NO: 11278171 NR Description: hypothetical protein T18B22.80 - Arabidopsis >gi|6967116|emb|CAB72470.1| putative protein [Arabidopsis
  misc_feature (1)..(397): Homolog of NCBI NO: 30692236 NR Description: expressed protein [Arabidopsis thaliana] putative protein [Arabidopsis thaliana]
  misc_feature (1)..(395): Homolog of NCBI NO: 17017402 NR Description: histone deacetylase [Zea mays]
  misc_feature (151)..(395): Homolog of NCBI NO: 38347605 NR Description: OSJNBa0042I15.18 [Oryza sativa (japonica
  misc_feature (1)..(114): Homolog of NCBI NO: 38347605 NR Description: OSJNBa0042I15.18 [Oryza sativa (japonica
  misc_feature (1)..(395): Homolog of NCBI NO: 2827430 NR Description: histone deacetylase 1 [Gallus gallus]
  misc_feature (1)..(395): Homolog of NCBI NO: 3023929 NR Description: Histone deacetylase 1 (HD1)
  misc_feature (1)..(395): Homolog of NCBI NO: 6680193 NR Description: histone deacetylase 1 [Mus musculus] Histone deacetylase 1 (HD1) >gi|1771286|emb|CAA66870.1| histone
  misc_feature (1)..(395): Homolog of NCBI NO: 2347180 NR Description: putative histone deacetylase [Mus musculus]
  misc_feature (1)..(395): Homolog of NCBI NO: 13128860 NR Description: histone deacetylase 1; reduced potassium
MKPHRLCMTHHLILAYGLHSKMEVYRPHKAYPIEMAQFHSPDYVEFLQRINPENQNLFPNEMARYNLGEDCPVFEDLFEFCQLYAGGTIDAARRLNNKLCDIAINWAGGLHHAKKCDASGFCYINDLVLGILELLKHHPRVLYIDIDVHHGDGVEEAFYFTDRVMTVSFHKFGDKFFPGTGDVKEIGEREGKFYAINVPLKDGIDDSSFNRLFRTVVEIYQPGAIVLQCGADSLARDRLGCFNLSIDGHAECVKFVKKFNLPLLVTGGGGYTKENVARCWTVETGILLDTELPNEIPENDYIKYFAPDFSLKIPGGHIENLNTKSYISSIKVQILENLRYIQHAPSVQMQEVPPDFYIPDFDEDEQNPDVRADQRSRDKQIQRDDEYFDGDNDNDAS

SEQ ID NO: 72407 - protein, 390 aa, Arabidopsis thaliana
  peptide (1)..(390): Ceres Seq. ID no. 4932133
  misc_feature (1)..(390): Homolog of NCBI NO: 11278171 NR Description: hypothetical protein T18B22.80 - Arabidopsis >gi|6967116|emb|CAB72470.1| putative protein [Arabidopsis
  misc_feature (1)..(390): Homolog of NCBI NO: 30692236 NR Description: expressed protein [Arabidopsis thaliana] putative protein [Arabidopsis thaliana]
  misc_feature (1)..(388): Homolog of NCBI NO: 17017402 NR Description: histone deacetylase [Zea mays]
  misc_feature (144)..(388): Homolog of NCBI NO: 38347605 NR Description: OSJNBa0042I15.18 [Oryza sativa (japonica
  misc_feature (1)..(107): Homolog of NCBI NO: 38347605 NR Description: OSJNBa0042I15.18 [Oryza sativa (japonica
  misc_feature (1)..(388): Homolog of NCBI NO: 2827430 NR Description: histone deacetylase 1 [Gallus gallus]
  misc_feature (1)..(388): Homolog of NCBI NO: 3023929 NR Description: Histone deacetylase 1 (HD1)
  misc_feature (1)..(388): Homolog of NCBI NO: 6680193 NR Description: histone deacetylase 1 [Mus musculus] Histone deacetylase 1 (HD1) >gi|1771286|emb|CAA66870.1| histone
  misc_feature (1)..(388): Homolog of NCBI NO: 2347180 NR Description: putative histone deacetylase [Mus musculus]
  misc_feature (1)..(388): Homolog of NCBI NO: 3023930 NR Description: Histone deacetylase 1 (HD1)
MTHHLILAYGLHSKMEVYRPHKAYPIEMAQFHSPDYVEFLQRINPENQNLFPNEMARYNLGEDCPVFEDLFEFCQLYAGGTIDAARRLNNKLCDIAINWAGGLHHAKKCDASGFCYINDLVLGILELLKHHPRVLYIDIDVHHGDGVEEAFYFTDRVMTVSFHKFGDKFFPGTGDVKEIGEREGKFYAINVPLKDGIDDSSFNRLFRTVVEIYQPGAIVLQCGADSLARDRLGCFNLSIDGHAECVKFVKKFNLPLLVTGGGGYTKENVARCWTVETGILLDTELPNEIPENDYIKYFAPDFSLKIPGGHIENLNTKSYISSIKVQILENLRYIQHAPSVQMQEVPPDFYIPDFDEDEQNPDVRADQRSRDKQIQRDDEYFDGDNDNDAS

SEQ ID NO: 72408 - DNA, 1122 bp, Arabidopsis thaliana
  misc_feature (1)..(1122): Ceres Seq. ID no. 4932564
  misc_feature: MA Experiment ID: 20000173 Result: Down-regulated in Transcription
  misc_feature: MA Experiment 20000173 PARAMETER Experiment Name: At_42deg_Heat_P Parameter: Age (day) Value: 14
  misc_feature: MA Experiment 20000173 PARAMETER Experiment Name: At_42deg_Heat_P Parameter: Organism Value: A. thaliana
  misc_feature: MA Experiment 20000173 PARAMETER Experiment Name: At_42deg_Heat_P Parameter: Plant Line Value: WS
  misc_feature: MA Experiment 20000173 PARAMETER Experiment Name: At_42deg_Heat_P Parameter: Temperature (deg C) Value: 42 vs. 22
  misc_feature: MA Experiment 20000173 PARAMETER Experiment Name: At_42deg_Heat_P Parameter: Timepoint (hr) Value: 6
  misc_feature: MA Experiment 20000173 PARAMETER Experiment Name: At_42deg_Heat_P Parameter: Tissue Value: Aerial
  misc_feature: MA Experiment ID: 20000184 Result: Down-regulated in Transcription
  misc_feature: MA Experiment 20000184 PARAMETER Experiment Name: At_Shoots__P Parameter: Age (day) Value: 7
  misc_feature: MA Experiment 20000184 PARAMETER Experiment Name: At_Shoots__P Parameter: Tissue Value: Shoots vs. Whole Plant
  misc_feature: MA Experiment ID: 20000234 Result: Up-regulated in Transcription
  misc_feature: MA Experiment 20000234 PARAMETER Experiment Name: At_Siliques_P Parameter: Age (day) Value: 21
  misc_feature: MA Experiment 20000234 PARAMETER Experiment Name: At_Siliques_P Parameter: Organism Value: A. thaliana
  misc_feature: MA Experiment 20000234 PARAMETER Experiment Name: At_Siliques_P Parameter: Plant Line Value: WS
  misc_feature: MA Experiment 20000234 PARAMETER Experiment Name: At_Siliques_P Parameter: Tissue Value: Less Than 5mm Siliques vs. Whole Plant
  misc_feature: MA Experiment ID: 20000264 Result: Up-regulated in Transcription
  misc_feature: MA Experiment 20000264 PARAMETER Experiment Name: At_Open_Flower_P Parameter: Age (day) Value: 21
  misc_feature: MA Experiment 20000264 PARAMETER Experiment Name: At_Open_Flower_P Parameter: Plant Line Value: WS
  misc_feature: MA Experiment 20000264 PARAMETER Experiment Name: At_Open_Flower_P Parameter: Tissue Value: Open Flower vs. Whole Plant
  misc_feature: MA Experiment ID: 20000265 Result: Up-regulated in Transcription
  misc_feature: MA Experiment 20000265 PARAMETER Experiment Name: At_Open_Flower_P Parameter: Age (day) Value: 21
  misc_feature: MA Experiment 20000265 PARAMETER Experiment Name: At_Open_Flower_P Parameter: Plant Line Value: WS
  misc_feature: MA Experiment 20000265 PARAMETER Experiment Name: At_Open_Flower_P Parameter: Tissue Value: Closed Flower vs. Whole Plant
  misc_feature: MA Experiment ID: 20000286 Result: Up-regulated in Transcription
  misc_feature: MA Experiment 20000286 PARAMETER Experiment Name: At_Open_Flower_P Parameter: Age (day) Value: 21
  misc_feature: MA Experiment 20000286 PARAMETER Experiment Name: At_Open_Flower_P Parameter: Plant Line Value: WS
  misc_feature: MA Experiment 20000286 PARAMETER Experiment Name: At_Open_Flower_P Parameter: Tissue Value: Half Open vs. Whole Plant
  misc_feature: MA Experiment ID: 20000451 Result: Up-regulated in Transcription
  misc_feature: MA Experiment 20000451 PARAMETER Experiment Name: At_CS6879_Shoots-Roots_P Parameter: Age (day) Value: 14
  misc_feature: MA Experiment 20000451 PARAMETER Experiment Name: At_CS6879_Shoots-Roots_P Parameter: Organism Value: A. thaliana
  misc_feature: MA Experiment 20000451 PARAMETER Experiment Name: At_CS6879_Shoots-Roots_P Parameter: Plant Line Value: CS6879 vs. WS
  misc_feature: MA Experiment 20000451 PARAMETER Experiment Name: At_CS6879_Shoots-Roots_P Parameter: Tissue Value: Roots
  misc_feature: MA Experiment ID: 20000794 Result: Up-regulated in Transcription
  misc_feature: MA Experiment 20000794 PARAMETER Experiment Name: At_Petals_P Parameter: Age (day) Value: 23-25 days
  misc_feature: MA Experiment 20000794 PARAMETER Experiment Name: At_Petals_P Parameter: Plant Line Value: WS
  misc_feature: MA Experiment 20000794 PARAMETER Experiment Name: At_Petals_P Parameter: Tissue Value: Petals vs. Whole plant
  misc_feature: MA Experiment ID: 20001451 Result: Down-regulated in Transcription
  misc_feature: MA Experiment 20001451 PARAMETER Experiment Name: At_Far-red-induction_P Parameter: Age (day) Value: 7
  misc_feature: MA Experiment 20001451 PARAMETER Experiment Name: At_Far-red-induction_P Parameter: Light Value: Far-red vs. White
  misc_feature: MA Experiment 20001451 PARAMETER Experiment Name: At_Far-red-induction_P Parameter: Organism Value: A. thaliana
  misc_feature: MA Experiment 20001451 PARAMETER Experiment Name: At_Far-red-induction_P Parameter: Plant Line Value: Columbia
  misc_feature: MA Experiment 20001451 PARAMETER Experiment Name: At_Far-red-induction_P Parameter: Timepoint (hr) Value: 24
  misc_feature: MA Experiment 20001451 PARAMETER Experiment Name: At_Far-red-induction_P Parameter: Tissue Value: Whole Plant
  misc_feature: MA Experiment ID: 20001555 Result: Up-regulated in Transcription
  misc_feature: MA Experiment 20001555 PARAMETER Experiment Name: At_Drought_Soil_Dry_P Parameter: Age (day) Value: 24
  misc_feature: MA Experiment 20001555 PARAMETER Experiment Name: At_Drought_Soil_Dry_P Parameter: Organism Value: A. thaliana
  misc_feature: MA Experiment 20001555 PARAMETER Experiment Name: At_Drought_Soil_Dry_P Parameter: Plant Line Value: WS
  misc_feature: MA Experiment 20001555 PARAMETER Experiment Name: At_Drought_Soil_Dry_P Parameter: Post Timepoint (hr) Value: None
  misc_feature: MA Experiment 20001555 PARAMETER Experiment Name: At_Drought_Soil_Dry_P Parameter: Post-Treatment Value: None
  misc_feature: MA Experiment 20001555 PARAMETER Experiment Name: At_Drought_Soil_Dry_P Parameter: Timepoint (day) Value: 10
  misc_feature: MA Experiment 20001555 PARAMETER Experiment Name: At_Drought_Soil_Dry_P Parameter: Treatment Value: Drought vs. No Drought
atggctggagaagaaatagagagggagaagaaatctgcagcatctgcaagaactcacaccagaaacaacactcaacaaagttcttcttctggttatctgaaaacgcttctcctggtaacgttcgtcggagttttagcatgggtttatcaaacaatccaaccaccacccgccaaaatcgtcggctctcccggtggacccaccgtgacatcaccgaggatcaaactgagagacggaagacatctggcttacacagaattcggaatccctagagacgaagccaagttcaagatcataaacatccacggcttcgattcttgtatgcgagactcgcatttcgccaatttcttatcgccggctcttgtggaggaattgaggatatacattgtgtcttttgatcgtcctggttatggagagagtgatcctaacctgaatgggtcaccaagaagcatagcattggatatagaagagcttgctgatgggttaggactaggacctcagttctatctctttggttactccatgggtggtgaaattacatgggcatgccttaactacattcctcacaggttagcaggagctgcccttgtagctccagcgattaactattggtggagaaacttaccgggagatttaacaagagaagctttctctcttatgcatcctgcagatcaatggtcacttcgagtagctcattatgctccttggcttacatattggtggaacactcagaaatggttcccaatctccaatgtgattgccggtaatcccattattttctcacgtcaggacatggagatcttgtcgaagctcggattcgtcaatccaaatcgggcatacataagacaacaaggtgaatatgtaagcttacaccgagatttgaatgtcgcattttcaagctgggagtttgatccgttagaccttcaagatccgttcccgaacaacaatggctcagttcacgtatggaatggcgatgaggataagtttgtgccagtaaagcttcaacggtatgtcgcgtcaaagctgccatggattcgttaccatgaaatatctggatcaggacattttgtaccatttgtggaaggtatgactgataagatcatcaagtcacttttgaagatgtaa

SEQ ID NO: 72409 - protein, 373 aa, Arabidopsis thaliana
  peptide (1)..(373): Ceres Seq. ID no. 4932565
  misc_feature (126)..(371): Pfam Name: alpha/beta hydrolase fold Pfam Description: alpha/beta hydrolase fold
  misc_feature (1)..(371): Homolog of NCBI NO: 15228377 NR Description: putative protein; protein id: At3g48410.1, by cDNA: gi_17529095 [Arabidopsis thaliana]
  misc_feature (18)..(371): Homolog of NCBI NO: 28416665 NR Description: At2g36290 [Arabidopsis thaliana]
  misc_feature (18)..(371): Homolog of NCBI NO: 18404095 NR Description: expressed protein; protein id: At2g36290.1, by cDNA: 5167. [Arabidopsis thaliana] >gi|25408458|pir||H84778
  misc_feature (38)..(371): Homolog of NCBI NO: 21592662 NR Description: unknown [Arabidopsis thaliana]
  misc_feature (38)..(371): Homolog of NCBI NO: 18410582 NR Description: expressed protein; protein id: At1g74300.1, by cDNA: 31039. [Arabidopsis thaliana] >gi|25406334|pir||E96771
  misc_feature (20)..(371): Homolog of NCBI NO: 21537089 NR Description: unknown [Arabidopsis thaliana]
  misc_feature (21)..(371): Homolog of NCBI NO: 15221193 NR Description: unknown protein; protein id: At1g74290.1
  misc_feature (20)..(371): Homolog of NCBI NO: 18410575 NR Description: expressed protein; protein id: At1g74280.1, by cDNA: 119889. [Arabidopsis thaliana] >gi|25406331|pir||C96771
  misc_feature (33)..(371): Homolog of NCBI NO: 38346334 NR Description: OSJNBa0073L04.5 [Oryza sativa (japonica
  misc_feature (27)..(370): Homolog of NCBI NO: 37536162 NR Description: putative alpha/beta hydrolase [Oryza sativa
MAGEEIEREKKSAASARTHTRNNTQQSSSSGYLKTLLLVTFVGVLAWVYQTIQPPPAKIVGSPGGPTVTSPRIKLRDGRHLAYTEFGIPRDEAKFKIINIHGFDSCMRDSHFANFLSPALVEELRIYIVSFDRPGYGESDPNLNGSPRSIALDIEELADGLGLGPQFYLFGYSMGGEITWACLNYIPHRLAGAALVAPAINYWWRNLPGDLTREAFSLMHPADQWSLRVAHYAPWLTYWWNTQKWFPISNVIAGNPIIFSRQDMEILSKLGFVNPNRAYIRQQGEYVSLHRDLNVAFSSWEFDPLDLQDPFPNNNGSVHVWNGDEDKFVPVKLQRYVASKLPWIRYHEISGSGHFVPFVEGMTDKIIKSLLKM

SEQ ID NO: 72410 - protein, 267 aa, Arabidopsis thaliana
  peptide (1)..(267): Ceres Seq. ID no. 4932566
  misc_feature (20)..(265): Pfam Name: alpha/beta hydrolase fold Pfam Description: alpha/beta hydrolase fold
  misc_feature (1)..(265): Homolog of NCBI NO: 15228377 NR Description: putative protein; protein id: At3g48410.1, by cDNA: gi_17529095 [Arabidopsis thaliana]
  misc_feature (1)..(265): Homolog of NCBI NO: 28416665 NR Description: At2g36290 [Arabidopsis thaliana]
  misc_feature (1)..(265): Homolog of NCBI NO: 18404095 NR Description: expressed protein; protein id: At2g36290.1, by cDNA: 5167. [Arabidopsis thaliana] >gi|25408458|pir||H84778
  misc_feature (1)..(265): Homolog of NCBI NO: 21592662 NR Description: unknown [Arabidopsis thaliana]
  misc_feature (1)..(265): Homolog of NCBI NO: 18410582 NR Description: expressed protein; protein id: At1g74300.1, by cDNA: 31039. [Arabidopsis thaliana] >gi|25406334|pir||E96771
  misc_feature (1)..(265): Homolog of NCBI NO: 21537089 NR Description: unknown [Arabidopsis thaliana]
  misc_feature (1)..(265): Homolog of NCBI NO: 15221193 NR Description: unknown protein; protein id: At1g74290.1
  misc_feature (1)..(265): Homolog of NCBI NO: 18410575 NR Description: expressed protein; protein id: At1g74280.1, by cDNA: 119889. [Arabidopsis thaliana] >gi|25406331|pir||C96771
  misc_feature (1)..(265): Homolog of NCBI NO: 38346334 NR Description: OSJNBa0073L04.5 [Oryza sativa (japonica
  misc_feature (1)..(264): Homolog of NCBI NO: 37536162 NR Description: putative alpha/beta hydrolase [Oryza sativa
MRDSHFANFLSPALVEELRIYIVSFDRPGYGESDPNLNGSPRSIALDIEELADGLGLGPQFYLFGYSMGGEITWACLNYIPHRLAGAALVAPAINYWWRNLPGDLTREAFSLMHPADQWSLRVAHYAPWLTYWWNTQKWFPISNVIAGNPIIFSRQDMEILSKLGFVNPNRAYIRQQGEYVSLHRDLNVAFSSWEFDPLDLQDPFPNNNGSVHVWNGDEDKFVPVKLQRYVASKLPWIRYHEISGSGHFVPFVEGMTDKIIKSLLKM

SEQ ID NO: 72411 - protein, 200 aa, Arabidopsis thaliana
  peptide (1)..(200): Ceres Seq. ID no. 4932567
  misc_feature (1)..(198): Pfam Name: alpha/beta hydrolase fold Pfam Description: alpha/beta hydrolase fold
  misc_feature (1)..(198): Homolog of NCBI NO: 15228377 NR Description: putative protein; protein id: At3g48410.1, by cDNA: gi_17529095 [Arabidopsis thaliana]
  misc_feature (1)..(198): Homolog of NCBI NO: 28416665 NR Description: At2g36290 [Arabidopsis thaliana]
  misc_feature (1)..(198): Homolog of NCBI NO: 18404095 NR Description: expressed protein; protein id: At2g36290.1, by cDNA: 5167. [Arabidopsis thaliana] >gi|25408458|pir||H84778
  misc_feature (1)..(198): Homolog of NCBI NO: 21592662 NR Description: unknown [Arabidopsis thaliana]
  misc_feature (1)..(198): Homolog of NCBI NO: 18410582 NR Description: expressed protein; protein id: At1g74300.1, by cDNA: 31039. [Arabidopsis thaliana] >gi|25406334|pir||E96771
  misc_feature (1)..(198): Homolog of NCBI NO: 21537089 NR Description: unknown [Arabidopsis thaliana]
  misc_feature (1)..(198): Homolog of NCBI NO: 15221193 NR Description: unknown protein; protein id: At1g74290.1
  misc_feature (1)..(198): Homolog of NCBI NO: 18410575 NR Description: expressed protein; protein id: At1g74280.1, by cDNA: 119889. [Arabidopsis thaliana] >gi|25406331|pir||C96771
  misc_feature (1)..(198): Homolog of NCBI NO: 38346334 NR Description: OSJNBa0073L04.5 [Oryza sativa (japonica
  misc_feature (1)..(197): Homolog of NCBI NO: 37536162 NR Description: putative alpha/beta hydrolase [Oryza sativa
MGGEITWACLNYIPHRLAGAALVAPAINYWWRNLPGDLTREAFSLMHPADQWSLRVAHYAPWLTYWWNTQKWFPISNVIAGNPIIFSRQDMEILSKLGFVNPNRAYIRQQGEYVSLHRDLNVAFSSWEFDPLDLQDPFPNNNGSVHVWNGDEDKFVPVKLQRYVASKLPWIRYHEISGSGHFVPFVEGMTDKIIKSLLKM

SEQ ID NO: 72412 - DNA, 1389 bp, Arabidopsis thaliana
  misc_feature (1)..(1389): Ceres Seq. ID no. 4932610
  misc_feature: MA Experiment ID: 20000171 Result: Down-regulated in Transcription
  misc_feature: MA Experiment 20000171 PARAMETER Experiment Name: At_42deg_Heat_P Parameter: Age (day) Value: 14
  misc_feature: MA Experiment 20000171 PARAMETER Experiment Name: At_42deg_Heat_P Parameter: Organism Value: A. thaliana
  misc_feature: MA Experiment 20000171 PARAMETER Experiment Name: At_42deg_Heat_P Parameter: Plant Line Value: WS
  misc_feature: MA Experiment 20000171 PARAMETER Experiment Name: At_42deg_Heat_P Parameter: Temperature (deg C) Value: 42 vs. 22
  misc_feature: MA Experiment 20000171 PARAMETER Experiment Name: At_42deg_Heat_P Parameter: Timepoint (hr) Value: 1
  misc_feature: MA Experiment 20000171 PARAMETER Experiment Name: At_42deg_Heat_P Parameter: Tissue Value: Aerial
  misc_feature: MA Experiment ID: 20000173 Result: Down-regulated in Transcription
  misc_feature: MA Experiment 20000173 PARAMETER Experiment Name: At_42deg_Heat_P Parameter: Age (day) Value: 14
  misc_feature: MA Experiment 20000173 PARAMETER Experiment Name: At_42deg_Heat_P Parameter: Organism Value: A. thaliana
  misc_feature: MA Experiment 20000173 PARAMETER Experiment Name: At_42deg_Heat_P Parameter: Plant Line Value: WS
  misc_feature: MA Experiment 20000173 PARAMETER Experiment Name: At_42deg_Heat_P Parameter: Temperature (deg C) Value: 42 vs. 22
  misc_feature: MA Experiment 20000173 PARAMETER Experiment Name: At_42deg_Heat_P Parameter: Timepoint (hr) Value: 6
  misc_feature: MA Experiment 20000173 PARAMETER Experiment Name: At_42deg_Heat_P Parameter: Tissue Value: Aerial
  misc_feature: MA Experiment ID: 20000180 Result: Up-regulated in Transcription
  misc_feature: MA Experiment 20000180 PARAMETER Experiment Name: At_Germinating_Seeds_P Parameter: Age (hr) Value: 24 vs. 0
  misc_feature: MA Experiment 20000180 PARAMETER Experiment Name: At_Germinating_Seeds_P Parameter: Tissue Value: Germinating Seeds
  misc_feature: MA Experiment ID: 20000184 Result: Up-regulated in Transcription
  misc_feature: MA Experiment 20000184 PARAMETER Experiment Name: At_Shoots__P Parameter: Age (day) Value: 7
  misc_feature: MA Experiment 20000184 PARAMETER Experiment Name: At_Shoots__P Parameter: Tissue Value: Shoots vs. Whole Plant
  misc_feature: MA Experiment ID: 20000227 Result: Down-regulated in Transcription
  misc_feature: MA Experiment 20000227 PARAMETER Experiment Name: At_Root-Tips-vs-Tops_P Parameter: Tissue Value: Root Tips vs. Root Tops
  misc_feature: MA Experiment ID: 20000234 Result: Up-regulated in Transcription
  misc_feature: MA Experiment 20000234 PARAMETER Experiment Name: At_Siliques_P Parameter: Age (day) Value: 21
  misc_feature: MA Experiment 20000234 PARAMETER Experiment Name: At_Siliques_P Parameter: Organism Value: A. thaliana
  misc_feature: MA Experiment 20000234 PARAMETER Experiment Name: At_Siliques_P Parameter: Plant Line Value: WS
  misc_feature: MA Experiment 20000234 PARAMETER Experiment Name: At_Siliques_P Parameter: Tissue Value: Less Than 5mm Siliques vs. Whole Plant
  misc_feature: MA Experiment ID: 20000286 Result: Up-regulated in Transcription
  misc_feature: MA Experiment 20000286 PARAMETER Experiment Name: At_Open_Flower_P Parameter: Age (day) Value: 21
  misc_feature: MA Experiment 20000286 PARAMETER Experiment Name: At_Open_Flower_P Parameter: Plant Line Value: WS
  misc_feature: MA Experiment 20000286 PARAMETER Experiment Name: At_Open_Flower_P Parameter: Tissue Value: Half Open vs. Whole Plant
  misc_feature: MA Experiment ID: 20000437 Result: Down-regulated in Transcription
  misc_feature: MA Experiment 20000437 PARAMETER Experiment Name: At_Drought_P Parameter: Age (day) Value: 8
  misc_feature: MA Experiment 20000437 PARAMETER Experiment Name: At_Drought_P Parameter: Organism Value: A. thaliana
  misc_feature: MA Experiment 20000437 PARAMETER Experiment Name: At_Drought_P Parameter: Plant Line Value: WS
  misc_feature: MA Experiment 20000437 PARAMETER Experiment Name: At_Drought_P Parameter: Timepoint (hr) Value: 24
  misc_feature: MA Experiment 20000437 PARAMETER Experiment Name: At_Drought_P Parameter: Tissue Value: Whole Plant
  misc_feature: MA Experiment 20000437 PARAMETER Experiment Name: At_Drought_P Parameter: Treatment Value: Drought vs. No Drought
  misc_feature: MA Experiment ID: 20000438 Result: Up-regulated in Transcription
  misc_feature: MA Experiment 20000438 PARAMETER Experiment Name: At_Shoots__P Parameter: Age (day) Value: 14
  misc_feature: MA Experiment 20000438 PARAMETER Experiment Name: At_Shoots__P Parameter: Tissue Value: Shoots vs. Whole Plant
  misc_feature: MA Experiment ID: 20000496 Result: Up-regulated in Transcription
  misc_feature: MA Experiment 20000496 PARAMETER Experiment Name: At_Guard_Cells_P Parameter: Harvest Date Value: 7/19/2002
  misc_feature: MA Experiment 20000496 PARAMETER Experiment Name: At_Guard_Cells_P Parameter: Organism Value: Canola
  misc_feature: MA Experiment 20000496 PARAMETER Experiment Name: At_Guard_Cells_P Parameter: Tissue Value: Guard Cells vs. Leaves
  misc_feature: MA Experiment ID: 20000794 Result: Down-regulated in Transcription
  misc_feature: MA Experiment 20000794 PARAMETER Experiment Name: At_Petals_P Parameter: Age (day) Value: 23-25 days
  misc_feature: MA Experiment 20000794 PARAMETER Experiment Name: At_Petals_P Parameter: Plant Line Value: WS
  misc_feature: MA Experiment 20000794 PARAMETER Experiment Name: At_Petals_P Parameter: Tissue Value: Petals vs. Whole plant
  misc_feature: MA Experiment ID: 20001248 Result: Down-regulated in Transcription
  misc_feature: MA Experiment 20001248 PARAMETER Experiment Name: At_Far-red-induction_P Parameter: Age (day) Value: 7
  misc_feature: MA Experiment 20001248 PARAMETER Experiment Name: At_Far-red-induction_P Parameter: Light Value: Far-red vs. White
  misc_feature: MA Experiment 20001248 PARAMETER Experiment Name: At_Far-red-induction_P Parameter: Organism Value: A. thaliana
  misc_feature: MA Experiment 20001248 PARAMETER Experiment Name: At_Far-red-induction_P Parameter: Plant Line Value: Columbia
  misc_feature: MA Experiment 20001248 PARAMETER Experiment Name: At_Far-red-induction_P Parameter: Timepoint (hr) Value: 4
  misc_feature: MA Experiment 20001248 PARAMETER Experiment Name: At_Far-red-induction_P Parameter: Tissue Value: Whole Plant
  misc_feature: MA Experiment ID: 20001450 Result: Down-regulated in Transcription
  misc_feature: MA Experiment 20001450 PARAMETER Experiment Name: At_Far-red-induction_P Parameter: Age (day) Value: 7
  misc_feature: MA Experiment 20001450 PARAMETER Experiment Name: At_Far-red-induction_P Parameter: Light Value: Far-red vs. White
  misc_feature: MA Experiment 20001450 PARAMETER Experiment Name: At_Far-red-induction_P Parameter: Organism Value: A. thaliana
  misc_feature: MA Experiment 20001450 PARAMETER Experiment Name: At_Far-red-induction_P Parameter: Plant Line Value: Columbia
  misc_feature: MA Experiment 20001450 PARAMETER Experiment Name: At_Far-red-induction_P Parameter: Timepoint (hr) Value: 8
  misc_feature: MA Experiment 20001450 PARAMETER Experiment Name: At_Far-red-induction_P Parameter: Tissue Value: Whole Plant
  misc_feature: MA Experiment ID: 20001451 Result: Down-regulated in Transcription
  misc_feature: MA Experiment 20001451 PARAMETER Experiment Name: At_Far-red-induction_P Parameter: Age (day) Value: 7
  misc_feature: MA Experiment 20001451 PARAMETER Experiment Name: At_Far-red-induction_P Parameter: Light Value: Far-red vs. White
  misc_feature: MA Experiment 20001451 PARAMETER Experiment Name: At_Far-red-induction_P Parameter: Organism Value: A. thaliana
  misc_feature: MA Experiment 20001451 PARAMETER Experiment Name: At_Far-red-induction_P Parameter: Plant Line Value: Columbia
  misc_feature: MA Experiment 20001451 PARAMETER Experiment Name: At_Far-red-induction_P Parameter: Timepoint (hr) Value: 24
  misc_feature: MA Experiment 20001451 PARAMETER Experiment Name: At_Far-red-induction_P Parameter: Tissue Value: Whole Plant
  misc_feature: MA Experiment ID: 20001558 Result: Up-regulated in Transcription
  misc_feature: MA Experiment 20001558 PARAMETER Experiment Name: At_Drought_Soil_Dry_P Parameter: Age (day) Value: 27
  misc_feature: MA Experiment 20001558 PARAMETER Experiment Name: At_Drought_Soil_Dry_P Parameter: Organism Value: A. thaliana
  misc_feature: MA Experiment 20001558 PARAMETER Experiment Name: At_Drought_Soil_Dry_P Parameter: Plant Line Value: WS
  misc_feature: MA Experiment 20001558 PARAMETER Experiment Name: At_Drought_Soil_Dry_P Parameter: Post Timepoint (hr) Value: 6
  misc_feature: MA Experiment 20001558 PARAMETER Experiment Name: At_Drought_Soil_Dry_P Parameter: Post-Treatment Value: Re-Water vs. No Drought
  misc_feature: MA Experiment 20001558 PARAMETER Experiment Name: At_Drought_Soil_Dry_P Parameter: Timepoint (day) Value: 13
  misc_feature: MA Experiment 20001558 PARAMETER Experiment Name: At_Drought_Soil_Dry_P Parameter: Treatment Value: Drought vs. No Drought
  misc_feature: MA Experiment ID: 20001560 Result: Up-regulated in Transcription
  misc_feature: MA Experiment 20001560 PARAMETER Experiment Name: At_Drought_Soil_Dry_P Parameter: Age (day) Value: 28
  misc_feature: MA Experiment 20001560 PARAMETER Experiment Name: At_Drought_Soil_Dry_P Parameter: Organism Value: A. thaliana
  misc_feature: MA Experiment 20001560 PARAMETER Experiment Name: At_Drought_Soil_Dry_P Parameter: Plant Line Value: WS
  misc_feature: MA Experiment 20001560 PARAMETER Experiment Name: At_Drought_Soil_Dry_P Parameter: Post Timepoint (hr) Value: None
  misc_feature: MA Experiment 20001560 PARAMETER Experiment Name: At_Drought_Soil_Dry_P Parameter: Post-Treatment Value: None
  misc_feature: MA Experiment 20001560 PARAMETER Experiment Name: At_Drought_Soil_Dry_P Parameter: Timepoint (day) Value: 14
  misc_feature: MA Experiment 20001560 PARAMETER Experiment Name: At_Drought_Soil_Dry_P Parameter: Treatment Value: Drought vs. No Drought
  misc_feature: MA Experiment ID: 20001911 Result: Down-regulated in Transcription
  misc_feature: MA Experiment 20001911 PARAMETER Experiment Name: At_Drought_Reproduction_P Parameter: Age (day) Value: 40
  misc_feature: MA Experiment 20001911 PARAMETER Experiment Name: At_Drought_Reproduction_P Parameter: Organism Value: A. thaliana
  misc_feature: MA Experiment 20001911 PARAMETER Experiment Name: At_Drought_Reproduction_P Parameter: Plant Line Value: WS
  misc_feature: MA Experiment 20001911 PARAMETER Experiment Name: At_Drought_Reproduction_P Parameter: Timepoint (day) Value: 10
  misc_feature: MA Experiment 20001911 PARAMETER Experiment Name: At_Drought_Reproduction_P Parameter: Tissue Value: Flowers
  misc_feature: MA Experiment 20001911 PARAMETER Experiment Name: At_Drought_Reproduction_P Parameter: Treatment Value: Drought vs. No Drought
atgaagaactcagtaaacccgacaataaacggtgtaacgggtcaagaatgtaacccggttccgaattctacacaaactatatgtttcactagtgatgctgagtttgtggatccggatccgggtcattcgtttgaagctgttgagcaacaagtattcgggtctgggccgggtcagatcccgtccatgatgggtttcgttgagcaagcgctttccatgccgggaaatttgtcggagactgtaatgaaaggctttaggcctgaagctgttccggtttatgctgagctggttaaggaattcgctgtgttcgaccggtggttttcttcaattcccggtccgactcaaccaaaccggttatttgtctattcggctacctcacatggttccactagccatgtcaagaaacaactcgctcaagggtatccacagaagacgatatttgattcgcttcatagcaacgacatcgacttcggaatatactttcagaatattccgaccacattattctaccgtaatctccgacagctaaagtacattttcaatttgcatcaatacgatttgaaattcaagaaagacgcggccaaaggaaagttaccgagcttaaccgtaatcgaaccgaggtatttcgatctcaaaggtttaccggctaacgatgatcacccgtcgcatgacgtggctaacggtcaaaagctggttaaagaagtgtacgaggcacttaggtcgagtccacagtggaacgagacgctcctagttataacctatgatgagcatggtgggttctatgatcacgtcaagactccttatgtcggtataccaaatcccgatgggaatactggaccggctcctggtttctttaaattcgaccggttaggtgttcgtgttcctaccattatggtttcgccttggattcaaaaaggaaccgtcgtaagtgaagcaaaaggaccaacagagagctcagagtacgagcattcatcaataccagcgacaatcaagaaactcttcaatctctcttccaatttcttaacacatagagatgcatgggctgctactttcgaagacgttgtatctcacttaaccactcctcgaaccgattgtcccatgactctacctgaagttgcacctatgagagccactgagcctaaagaagacgctgctctttctgagtttcaaggtgaagtggttcagcttgcagcggttctcaatggtgatcacttcctcagtagcttcccggaagaaattggaaagaagatgactgtgaaacaagctcatgagtatgtcaaaggagctacttctcggttcattagagctagtaaagaggcaatgaagcttggtgccgataaatctgctattgtcgatatgcgatcttcgctcactacacggccacacaactga

SEQ ID NO: 72413 - protein, 462 aa, Arabidopsis thaliana; identical to SEQ ID NO: 70257
  peptide (1)..(462): Ceres Seq. ID no. 4932611
  misc_feature (1)..(353): Pfam Name: Phosphoesterase family Pfam Description: Phosphoesterase family
  misc_feature (1)..(462): Homolog of NCBI NO: 11358440 NR Description: hypothetical protein T8P19.120 - Arabidopsis >gi|6523092|emb|CAB62350.1| putative protein [Arabidopsis
  misc_feature (1)..(462): Homolog of NCBI NO: 30693062 NR Description: phosphoesterase family [Arabidopsis thaliana] phosphatidylglycerol specific phospholipase C [Arabidopsis
  misc_feature (4)..(459): Homolog of NCBI NO: 21703147 NR Description: At1g07230/F10K1_4 [Arabidopsis thaliana] phosphatidylglycerol specific phospholipase C [Arabidopsis
  misc_feature (7)..(459): Homolog of NCBI NO: 34897344 NR Description: putative phospholipase [Oryza sativa] putative phospholipase [Oryza sativa] >gi|18855062|gb|AAL79754.1|
  misc_feature (4)..(459): Homolog of NCBI NO: 15222342 NR Description: unknown protein; protein id: At1g07230.1
  misc_feature (1)..(459): Homolog of NCBI NO: 15225806 NR Description: putative phospholipase C; protein id: At2g26870.1
  misc_feature (1)..(459): Homolog of NCBI NO: 20161866 NR Description: B1139B11.7 [Oryza sativa (japonica
  misc_feature (1)..(449): Homolog of NCBI NO: 34894016 NR Description: P0672D08.18 [Oryza sativa (japonica >gi|15128448|dbj|BAB62632.1| hypothetical protein~similar to
  misc_feature (1)..(449): Homolog of NCBI NO: 27573343 NR Description: putative phosphoesterase [Oryza sativa (japonica group)] >gi|29126358|gb|AAO66550.1| putative phosphoesterase
  misc_feature (5)..(457): Homolog of NCBI NO: 15228577 NR Description: unknown protein; protein id: At3g03520.1, by cDNA: gi_17529015 [Arabidopsis thaliana] unknown protein [Arabidopsis thaliana]

SEQ ID NO: 72414 - protein, 401 aa, Arabidopsis thaliana; identical to SEQ ID NO: 70258
  peptide (1)..(401): Ceres Seq. ID no. 4932612
  misc_feature (1)..(292): Pfam Name: Phosphoesterase family Pfam Description: Phosphoesterase family
  misc_feature (1)..(401): Homolog of NCBI NO: 11358440 NR Description: hypothetical protein T8P19.120 - Arabidopsis >gi|6523092|emb|CAB62350.1| putative protein [Arabidopsis
  misc_feature (1)..(401): Homolog of NCBI NO: 30693062 NR Description: phosphoesterase family [Arabidopsis thaliana] phosphatidylglycerol specific phospholipase C [Arabidopsis
  misc_feature (1)..(398): Homolog of NCBI NO: 21703147 NR Description: At1g07230/F10K1_4 [Arabidopsis thaliana] phosphatidylglycerol specific phospholipase C [Arabidopsis
  misc_feature (1)..(398): Homolog of NCBI NO: 34897344 NR Description: putative phospholipase [Oryza sativa] putative phospholipase [Oryza sativa] >gi|18855062|gb|AAL79754.1|
  misc_feature (1)..(398): Homolog of NCBI NO: 15222342 NR Description: unknown protein; protein id: At1g07230.1
  misc_feature (1)..(398): Homolog of NCBI NO: 15225806 NR Description: putative phospholipase C; protein id: At2g26870.1
  misc_feature (1)..(398): Homolog of NCBI NO: 20161866 NR Description: B1139B11.7 [Oryza sativa (japonica
  misc_feature (1)..(388): Homolog of NCBI NO: 34894016 NR Description: P0672D08.18 [Oryza sativa (japonica >gi|15128448|dbj|BAB62632.1| hypothetical protein~similar to
  misc_feature (1)..(388): Homolog of NCBI NO: 27573343 NR Description: putative phosphoesterase [Oryza sativa (japonica group)] >gi|29126358|gb|AAO66550.1| putative phosphoesterase
  misc_feature (1)..(396): Homolog of NCBI NO: 15228577 NR Description: unknown protein; protein id: At3g03520.1, by cDNA: gi_17529015 [Arabidopsis thaliana] unknown protein [Arabidopsis thaliana]

SEQ ID NO: 72415 - protein, 400 aa, Arabidopsis thaliana
  peptide (1)..(400): Ceres Seq. ID no. 4932613
  misc_feature (1)..(291): Pfam Name: Phosphoesterase family Pfam Description: Phosphoesterase family
  misc_feature (1)..(400): Homolog of NCBI NO: 11358440 NR Description: hypothetical protein T8P19.120 - Arabidopsis >gi|6523092|emb|CAB62350.1| putative protein [Arabidopsis
  misc_feature (1)..(400): Homolog of NCBI NO: 30693062 NR Description: phosphoesterase family [Arabidopsis thaliana] phosphatidylglycerol specific phospholipase C [Arabidopsis
  misc_feature (1)..(397): Homolog of NCBI NO: 21703147 NR Description: At1g07230/F10K1_4 [Arabidopsis thaliana] phosphatidylglycerol specific phospholipase C [Arabidopsis
  misc_feature (1)..(397): Homolog of NCBI NO: 34897344 NR Description: putative phospholipase [Oryza sativa] putative phospholipase [Oryza sativa] >gi|18855062|gb|AAL79754.1|
  misc_feature (1)..(397): Homolog of NCBI NO: 15222342 NR Description: unknown protein; protein id: At1g07230.1
  misc_feature (1)..(397): Homolog of NCBI NO: 15225806 NR Description: putative phospholipase C; protein id: At2g26870.1
  misc_feature (1)..(397): Homolog of NCBI NO: 20161866 NR Description: B1139B11.7 [Oryza sativa (japonica
  misc_feature (1)..(387): Homolog of NCBI NO: 34894016 NR Description: P0672D08.18 [Oryza sativa (japonica >gi|15128448|dbj|BAB62632.1| hypothetical protein~similar to
  misc_feature (1)..(387): Homolog of NCBI NO: 27573343 NR Description: putative phosphoesterase [Oryza sativa (japonica group)] >gi|29126358|gb|AAO66550.1| putative phosphoesterase
  misc_feature (1)..(395): Homolog of NCBI NO: 15228577 NR Description: unknown protein; protein id: At3g03520.1, by cDNA: gi_17529015 [Arabidopsis thaliana] unknown protein [Arabidopsis thaliana]
MGFVEQALSMPGNLSETVMKGFRPEAVPVYAELVKEFAVFDRWFSSIPGPTQPNRLFVYSATSHGSTSHVKKQLAQGYPQKTIFDSLHSNDIDFGIYFQNIPTTLFYRNLRQLKYIFNLHQYDLKFKKDAAKGKLPSLTVIEPRYFDLKGLPANDDHPSHDVANGQKLVKEVYEALRSSPQWNETLLVITYDEHGGFYDHVKTPYVGIPNPDGNTGPAPGFFKFDRLGVRVPTIMVSPWIQKGTVVSEAKGPTESSEYEHSSIPATIKKLFNLSSNFLTHRDAWAATFEDVVSHLTTPRTDCPMTLPEVAPMRATEPKEDAALSEFQGEVVQLAAVLNGDHFLSSFPEEIGKKMTVKQAHEYVKGATSRFIRASKEAMKLGADKSAIVDMRSSLTTRPHN

SEQ ID NO: 72416 - DNA, 3555 bp, Arabidopsis thaliana
  misc_feature (1)..(3555): Ceres Seq. ID no. 4932870
  misc_feature: MA Experiment ID: 20000173 Result: Down-regulated in Transcription
  misc_feature: MA Experiment 20000173 PARAMETER Experiment Name: At_42deg_Heat_P Parameter: Age (day) Value: 14
  misc_feature: MA Experiment 20000173 PARAMETER Experiment Name: At_42deg_Heat_P Parameter: Organism Value: A. thaliana
  misc_feature: MA Experiment 20000173 PARAMETER Experiment Name: At_42deg_Heat_P Parameter: Plant Line Value: WS
  misc_feature: MA Experiment 20000173 PARAMETER Experiment Name: At_42deg_Heat_P Parameter: Temperature (deg C) Value: 42 vs. 22
  misc_feature: MA Experiment 20000173 PARAMETER Experiment Name: At_42deg_Heat_P Parameter: Timepoint (hr) Value: 6
  misc_feature: MA Experiment 20000173 PARAMETER Experiment Name: At_42deg_Heat_P Parameter: Tissue Value: Aerial
  misc_feature: MA Experiment ID: 20000184 Result: Down-regulated in Transcription
  misc_feature: MA Experiment 20000184 PARAMETER Experiment Name: At_Shoots__P Parameter: Age (day) Value: 7
  misc_feature: MA Experiment 20000184 PARAMETER Experiment Name: At_Shoots__P Parameter: Tissue Value: Shoots vs. Whole Plant
  misc_feature: MA Experiment ID: 20000227 Result: Up-regulated in Transcription
  misc_feature: MA Experiment 20000227 PARAMETER Experiment Name: At_Root-Tips-vs-Tops_P Parameter: Tissue Value: Root Tips vs. Root Tops
  misc_feature: MA Experiment ID: 20001247 Result: Down-regulated in Transcription
  misc_feature: MA Experiment 20001247 PARAMETER Experiment Name: At_Far-red-induction_P Parameter: Age (day) Value: 7
  misc_feature: MA Experiment 20001247 PARAMETER Experiment Name: At_Far-red-induction_P Parameter: Light Value: Far-red vs. White
  misc_feature: MA Experiment 20001247 PARAMETER Experiment Name: At_Far-red-induction_P Parameter: Organism Value: A. thaliana
  misc_feature: MA Experiment 20001247 PARAMETER Experiment Name: At_Far-red-induction_P Parameter: Plant Line Value: Columbia
  misc_feature: MA Experiment 20001247 PARAMETER Experiment Name: At_Far-red-induction_P Parameter: Timepoint (hr) Value: 1
  misc_feature: MA Experiment 20001247 PARAMETER Experiment Name: At_Far-red-induction_P Parameter: Tissue Value: Whole Plant
  misc_feature: MA Experiment ID: 20001451 Result: Down-regulated in Transcription
  misc_feature: MA Experiment 20001451 PARAMETER Experiment Name: At_Far-red-induction_P Parameter: Age (day) Value: 7
  misc_feature: MA Experiment 20001451 PARAMETER Experiment Name: At_Far-red-induction_P Parameter: Light Value: Far-red vs. White
  misc_feature: MA Experiment 20001451 PARAMETER Experiment Name: At_Far-red-induction_P Parameter: Organism Value: A. thaliana
  misc_feature: MA Experiment 20001451 PARAMETER Experiment Name: At_Far-red-induction_P Parameter: Plant Line Value: Columbia
  misc_feature: MA Experiment 20001451 PARAMETER Experiment Name: At_Far-red-induction_P Parameter: Timepoint (hr) Value: 24
  misc_feature: MA Experiment 20001451 PARAMETER Experiment Name: At_Far-red-induction_P Parameter: Tissue Value: Whole Plant
atgcgtagattctctaccattgttgatcttctcatcagcaaaaaaccatcttctcaagcaaattctagaattgatctcatttgtaaaaggttccatatttcaagagttctcaataacgatttcgtagaatcaacagagagaaagaatggggttggtttagtttgtccagagaagcatgaagatgaattcgccggtgaagtcgagaagatttacagaattttgcggaatcaccattctagagttccaaaattggagcttgctcttaacgaatcaggtattgatctgcgacccgggttgatcatacgagtgttgagtcgttgtggcgatgctgggaatctaggttatagattctttctgtgggcaacgaagcaacctggttattttcatagctatgaagtgtgtaaatcaatggtgatgattcttagtaaaatgcgacaatttggagctgtttggggtttaattgaagagatgaggaagacgaatccggagttgattgagccggagttgttcgttgtattgatgcggaggtttgcttctgctaacatggtgaagaaagcagttgaggtgctcgacgaaatgcctaagtatgggttagagcctgacgagtatgtttttggttgtttgttagatgctttgtgtaagaacggtagtgttaaggaggcttcaaaggtttttgaggatatgagagagaagtttcctccgaatttgcggtattttacttcgttgttgtatggttggtgtagggaagggaagttgatggaagctaaagaagttttggttcagatgaaggaagctgggcttgagcctgacattgtggttttcactaacttacttagtggatatgctcatgctgggaaaatggcggatgcgtatgatcttatgaatgatatgagaaagagagggtttgagccgaatgtgaattgttacacggttttgatccaggcgttgtgtaggacggagaagagaatggatgaggcgatgcgggtttttgttgagatggagaggtatggatgtgaggctgatattgtgacttataccgcgttgataagtgggttttgtaaatggggaatgattgataaaggttatagtgttttagatgatatgagaaagaaaggagtcatgccgtcgcaagtaacatatatgcagataatggtggctcatgagaagaaagaacaatttgaagagtgtttggagttgattgagaagatgaagcgaagaggttgtcatcctgatcttctcatttacaatgtagtgataagattggcttgtaagttaggggaagtgaaagaagctgttcggttatggaacgaaatggaagctaatgggctaagccctggagttgatacgtttgttattatgatcaacggatttacaagccaaggtttcctaatcgaagcctgtaatcacttcaaagaaatggtaagccgaggaatattctctgcgcctcaatatggaacgctgaagtcattgcttaataaccttgttagagatgataagctcgaaatggcgaaagatgtatggagttgcatatccaacaaaacctcttcctgtgagctgaatgtatcagcttggacaatatggatccatgctttgtacgcaaaaggtcacgtgaaggaagcgtgttcgtattgtcttgatatgatggagatggatttgatgccgcaacctaatacttatgcgaaacttatgaaaggattgaataaactgtataataggacgatcgctgcagagattacagagaaggtggtgaagatggcaagtgagagagagatgagttttaagatgtataagaagaaaggtgaggaggatttgattgagaaagctaaacctaaagggaataaagaaggaaagaagaaagggacagatcatcaaaggtataagggaagagtgtctcttgctcggaaccgtcttaggtcggaaacgccatcatcttttcttgctcgagaccgtcttaggtcaaaaacgccatcatcgtctccattttcttcgaagcggcatacgcctaagacaagcgaaatagaagaagagtcgactccaaaagattcagttttgttaaaccctaaagatccttcaagcgcacctaagctcttccttgtacagcctcgtttagcaccgccaaagtatctacaagcgaagctgaacgaagcgctttgtctcgcgaattcgcttgaagagcaacgatatgggtactttgaatctgatttctttgacaaggaattgccttctcatgttgttgttcaaaaccctgtccgtagatcgtctaaacctcgcgaagaagttgatgctgttttcgtaaacgccattttgaccgctatccaacaacggaatttagagcgaatatgggcaaaacctgtcttagaccgtgtgggtcttataatcgaaatatttaatgctcatgcgcatacaaaggaagcaaaactacaggctgagttagctgctttgatgtacaataagagcagactggttcgagtgcgtggtactgatggacgccatacttttgggcagtttggagaagctgaagttgtcagtgcccgagggagagcaggaagcaagggaaccggtggcggttttgtaggtggtgcaggagaaactgagcttcagcttcaacgccgaagaatatcagaccggaggattcgcttgttatcccaaattaaagaagcccagcgaacacggctattgcagcgtgctggacgtaagaaaagagtggggttagagggtgagagttcaggaaccattgctgttgttggttacacaaatgctggaaaatcgactctgataagtgcactaacaaagactgctctctactgcaatgagcgattgtttgccacattagatcctacactcaagagtgcccatcttccttctggaaactttgtgcttcttagtgacactgtcggattcatatcagatctgcctatacagctggtgaaagcttttcaatcgactctggaagaagttgttgaagctgatctacttctgcatgtagttgattcaacagctccaaatatcgaggagcatcgttcaacagtgcttcatgtcctaaatcaaattggagtacctgaagagaagcttcaaaatatgattgaagtctggaataagattgattatgaagaagacgaagtggaggaagagaaatatctagatgatggcgaaggagtaggagaagaagacgaagacgaagctgatttaaaagctgaagaaactgttgatgcatctgaagcaacagtagatgaagaccaaatccaaaacggagacggtgacgacgctgatgggtggctattgtctgaagatgaaaatgctgacgaccctgagttctggaaagttccggaagttgctaaagtagatgctgcaaataagaaaggaccagatgttagagtttctgcattaaccggagttggtttgaaggagttgctgtatcttattgatgacaaaatgaaagagaagaagctcaagtctccgactatagtcgaaaggagtgagcttcataagcgtaaatggaggccacctcgtaacgatgatgaagaggagagattaatcccgttagatcaacgttga

SEQ ID NO: 72417 - protein, 1184 aa, Arabidopsis thaliana
  peptide (1)..(1184): Ceres Seq. ID no. 4932871
  misc_feature (522)..(556): Pfam Name: PPR repeat Pfam Description: PPR repeat
  misc_feature (1)..(619): Homolog of NCBI NO: 15239161 NR Description: putative protein; protein id: At5g65820.1
  misc_feature (248)..(619): Homolog of NCBI NO: 7486526 NR Description: hypothetical protein F6H11.70 - Arabidopsis >gi|2827705|emb|CAA16678.1| predicted protein [Arabidopsis
  misc_feature (1)..(229): Homolog of NCBI NO: 7486526 NR Description: hypothetical protein F6H11.70 - Arabidopsis >gi|2827705|emb|CAA16678.1| predicted protein [Arabidopsis
  misc_feature (62)..(513): Homolog of NCBI NO: 15223926 NR Description: hypothetical protein; protein id: At1g77360.1
  misc_feature (66)..(500): Homolog of NCBI NO: 15223927 NR Description: hypothetical protein; protein id: At1g71060.1
  misc_feature (64)..(501): Homolog of NCBI NO: 14488357 NR Description: unknown protein [Oryza sativa (japonica
  misc_feature (67)..(505): Homolog of NCBI NO: 34895880 NR Description: P0009G03.20 [Oryza sativa (japonica
  misc_feature (42)..(478): Homolog of NCBI NO: 15228788 NR Description: putative protein; protein id: At3g62540.1
  misc_feature (42)..(478): Homolog of NCBI NO: 15241508 NR Description: putative protein; protein id: At5g14820.1
  misc_feature (42)..(478): Homolog of NCBI NO: 15228767 NR Description: putative protein; protein id: At3g62470.1
MRRFSTIVDLLISKKPSSQANSRIDLICKRFHISRVLNNDFVESTERKNGVGLVCPEKHEDEFAGEVEKIYRILRNHHSRVPKLELALNESGIDLRPGLIIRVLSRCGDAGNLGYRFFLWATKQPGYFHSYEVCKSMVMILSKMRQFGAVWGLIEEMRKTNPELIEPELFVVLMRRFASANMVKKAVEVLDEMPKYGLEPDEYVFGCLLDALCKNGSVKEASKVFEDMREKFPPNLRYFTSLLYGWCREGKLMEAKEVLVQMKEAGLEPDIVVFTNLLSGYAHAGKMADAYDLMNDMRKRGFEPNVNCYTVLIQALCRTEKRMDEAMRVFVEMERYGCEADIVTYTALISGFCKWGMIDKGYSVLDDMRKKGVMPSQVTYMQIMVAHEKKEQFEECLELIEKMKRRGCHPDLLIYNVVIRLACKLGEVKEAVRLWNEMEANGLSPGVDTFVIMINGFTSQGFLIEACNHFKEMVSRGIFSAPQYGTLKSLLNNLVRDDKLEMAKDVWSCISNKTSSCELNVSAWTIWIHALYAKGHVKEACSYCLDMMEMDLMPQPNTYAKLMKGLNKLYNRTIAAEITEKVVKMASEREMSFKMYKKKGEEDLIEKAKPKGNKEGKKKGTDHQRYKGRVSLARNRLRSETPSSFLARDRLRSKTPSSSPFSSKRHTPKTSEIEEESTPKDSVLLNPKDPSSAPKLFLVQPRLAPPKYLQAKLNEALCLANSLEEQRYGYFESDFFDKELPSHVVVQNPVRRSSKPREEVDAVFVNAILTAIQQRNLERIWAKPVLDRVGLIIEIFNAHAHTKEAKLQAELAALMYNKSRLVRVRGTDGRHTFGQFGEAEVVSARGRAGSKGTGGGFVGGAGETELQLQRRRISDRRIRLLSQIKEAQRTRLLQRAGRKKRVGLEGESSGTIAVVGYTNAGKSTLISALTKTALYCNERLFATLDPTLKSAHLPSGNFVLLSDTVGFISDLPIQLVKAFQSTLEEVVEADLLLHVVDSTAPNIEEHRSTVLHVLNQIGVPEEKLQNMIEVWNKIDYEEDEVEEEKYLDDGEGVGEEDEDEADLKAEETVDASEATVDEDQIQNGDGDDADGWLLSEDENADDPEFWKVPEVAKVDAANKKGPDVRVSALTGVGLKELLYLIDDKMKEKKLKSPTIVERSELHKRKWRPPRNDDEEERLIPLDQR

SEQ ID NO: 72418 - protein, 1048 aa, Arabidopsis thaliana
  peptide (1)..(1048): Ceres Seq. ID no. 4932872
  misc_feature (386)..(420): Pfam Name: PPR repeat Pfam Description: PPR repeat
  misc_feature (1)..(483): Homolog of NCBI NO: 15239161 NR Description: putative protein; protein id: At5g65820.1
  misc_feature (112)..(483): Homolog of NCBI NO: 7486526 NR Description: hypothetical protein F6H11.70 - Arabidopsis >gi|2827705|emb|CAA16678.1| predicted protein [Arabidopsis
  misc_feature (1)..(93): Homolog of NCBI NO: 7486526 NR Description: hypothetical protein F6H11.70 - Arabidopsis >gi|2827705|emb|CAA16678.1| predicted protein [Arabidopsis
  misc_feature (1)..(377): Homolog of NCBI NO: 15223926 NR Description: hypothetical protein; protein id: At1g77360.1
  misc_feature (1)..(364): Homolog of NCBI NO: 15223927 NR Description: hypothetical protein; protein id: At1g71060.1
  misc_feature (1)..(365): Homolog of NCBI NO: 14488357 NR Description: unknown protein [Oryza sativa (japonica
  misc_feature (1)..(369): Homolog of NCBI NO: 34895880 NR Description: P0009G03.20 [Oryza sativa (japonica
  misc_feature (1)..(342): Homolog of NCBI NO: 15228788 NR Description: putative protein; protein id: At3g62540.1
  misc_feature (1)..(342): Homolog of NCBI NO: 15241508 NR Description: putative protein; protein id: At5g14820.1
  misc_feature (1)..(342): Homolog of NCBI NO: 15228767 NR Description: putative protein; protein id: At3g62470.1
MVMILSKMRQFGAVWGLIEEMRKTNPELIEPELFVVLMRRFASANMVKKAVEVLDEMPKYGLEPDEYVFGCLLDALCKNGSVKEASKVFEDMREKFPPNLRYFTSLLYGWCREGKLMEAKEVLVQMKEAGLEPDIVVFTNLLSGYAHAGKMADAYDLMNDMRKRGFEPNVNCYTVLIQALCRTEKRMDEAMRVFVEMERYGCEADIVTYTALISGFCKWGMIDKGYSVLDDMRKKGVMPSQVTYMQIMVAHEKKEQFEECLELIEKMKRRGCHPDLLIYNVVIRLACKLGEVKEAVRLWNEMEANGLSPGVDTFVIMINGFTSQGFLIEACNHFKEMVSRGIFSAPQYGTLKSLLNNLVRDDKLEMAKDVWSCISNKTSSCELNVSAWTIWIHALYAKGHVKEACSYCLDMMEMDLMPQPNTYAKLMKGLNKLYNRTIAAEITEKVVKMASEREMSFKMYKKKGEEDLIEKAKPKGNKEGKKKGTDHQRYKGRVSLARNRLRSETPSSFLARDRLRSKTPSSSPFSSKRHTPKTSEIEEESTPKDSVLLNPKDPSSAPKLFLVQPRLAPPKYLQAKLNEALCLANSLEEQRYGYFESDFFDKELPSHVVVQNPVRRSSKPREEVDAVFVNAILTAIQQRNLERIWAKPVLDRVGLIIEIFNAHAHTKEAKLQAELAALMYNKSRLVRVRGTDGRHTFGQFGEAEVVSARGRAGSKGTGGGFVGGAGETELQLQRRRISDRRIRLLSQIKEAQRTRLLQRAGRKKRVGLEGESSGTIAVVGYTNAGKSTLISALTKTALYCNERLFATLDPTLKSAHLPSGNFVLLSDTVGFISDLPIQLVKAFQSTLEEVVEADLLLHVVDSTAPNIEEHRSTVLHVLNQIGVPEEKLQNMIEVWNKIDYEEDEVEEEKYLDDGEGVGEEDEDEADLKAEETVDASEATVDEDQIQNGDGDDADGWLLSEDENADDPEFWKVPEVAKVDAANKKGPDVRVSALTGVGLKELLYLIDDKMKEKKLKSPTIVERSELHKRKWRPPRNDDEEERLIPLDQR

SEQ ID NO: 72419 - protein, 1046 aa, Arabidopsis thaliana
  peptide (1)..(1046): Ceres Seq. ID no. 4932873
  misc_feature (384)..(418): Pfam Name: PPR repeat Pfam Description: PPR repeat
  misc_feature (1)..(481): Homolog of NCBI NO: 15239161 NR Description: putative protein; protein id: At5g65820.1
  misc_feature (110)..(481): Homolog of NCBI NO: 7486526 NR Description: hypothetical protein F6H11.70 - Arabidopsis >gi|2827705|emb|CAA16678.1| predicted protein [Arabidopsis
  misc_feature (1)..(91): Homolog of NCBI NO: 7486526 NR Description: hypothetical protein F6H11.70 - Arabidopsis >gi|2827705|emb|CAA16678.1| predicted protein [Arabidopsis
  misc_feature (1)..(375): Homolog of NCBI NO: 15223926 NR Description: hypothetical protein; protein id: At1g77360.1
  misc_feature (1)..(362): Homolog of NCBI NO: 15223927 NR Description: hypothetical protein; protein id: At1g71060.1
  misc_feature (1)..(363): Homolog of NCBI NO: 14488357 NR Description: unknown protein [Oryza sativa (japonica
  misc_feature (1)..(367): Homolog of NCBI NO: 34895880 NR Description: P0009G03.20 [Oryza sativa (japonica
  misc_feature (1)..(340): Homolog of NCBI NO: 15228788 NR Description: putative protein; protein id: At3g62540.1
  misc_feature (1)..(340): Homolog of NCBI NO: 15241508 NR Description: putative protein; protein id: At5g14820.1
  misc_feature (1)..(340): Homolog of NCBI NO: 15228767 NR Description: putative protein; protein id: At3g62470.1
MILSKMRQFGAVWGLIEEMRKTNPELIEPELFVVLMRRFASANMVKKAVEVLDEMPKYGLEPDEYVFGCLLDALCKNGSVKEASKVFEDMREKFPPNLRYFTSLLYGWCREGKLMEAKEVLVQMKEAGLEPDIVVFTNLLSGYAHAGKMADAYDLMNDMRKRGFEPNVNCYTVLIQALCRTEKRMDEAMRVFVEMERYGCEADIVTYTALISGFCKWGMIDKGYSVLDDMRKKGVMPSQVTYMQIMVAHEKKEQFEECLELIEKMKRRGCHPDLLIYNVVIRLACKLGEVKEAVRLWNEMEANGLSPGVDTFVIMINGFTSQGFLIEACNHFKEMVSRGIFSAPQYGTLKSLLNNLVRDDKLEMAKDVWSCISNKTSSCELNVSAWTIWIHALYAKGHVKEACSYCLDMMEMDLMPQPNTYAKLMKGLNKLYNRTIAAEITEKVVKMASEREMSFKMYKKKGEEDLIEKAKPKGNKEGKKKGTDHQRYKGRVSLARNRLRSETPSSFLARDRLRSKTPSSSPFSSKRHTPKTSEIEEESTPKDSVLLNPKDPSSAPKLFLVQPRLAPPKYLQAKLNEALCLANSLEEQRYGYFESDFFDKELPSHVVVQNPVRRSSKPREEVDAVFVNAILTAIQQRNLERIWAKPVLDRVGLIIEIFNAHAHTKEAKLQAELAALMYNKSRLVRVRGTDGRHTFGQFGEAEVVSARGRAGSKGTGGGFVGGAGETELQLQRRRISDRRIRLLSQIKEAQRTRLLQRAGRKKRVGLEGESSGTIAVVGYTNAGKSTLISALTKTALYCNERLFATLDPTLKSAHLPSGNFVLLSDTVGFISDLPIQLVKAFQSTLEEVVEADLLLHVVDSTAPNIEEHRSTVLHVLNQIGVPEEKLQNMIEVWNKIDYEEDEVEEEKYLDDGEGVGEEDEDEADLKAEETVDASEATVDEDQIQNGDGDDADGWLLSEDENADDPEFWKVPEVAKVDAANKKGPDVRVSALTGVGLKELLYLIDDKMKEKKLKSPTIVERSELHKRKWRPPRNDDEEERLIPLDQR

SEQ ID NO: 72420 - DNA, 1956 bp, Arabidopsis thaliana
  misc_feature (1)..(1956): Ceres Seq. ID no. 4932983
  misc_feature: MA Experiment ID: 20000182 Result: Up-regulated in Transcription
  misc_feature: MA Experiment 20000182 PARAMETER Experiment Name: At_2mM_SA_P Parameter: Age (day) Value: 14
  misc_feature: MA Experiment 20000182 PARAMETER Experiment Name: At_2mM_SA_P Parameter: Organism Value: A. thaliana
  misc_feature: MA Experiment 20000182 PARAMETER Experiment Name: At_2mM_SA_P Parameter: Plant Line Value: WS
  misc_feature: MA Experiment 20000182 PARAMETER Experiment Name: At_2mM_SA_P Parameter: Timepoint (hr) Value: 6
  misc_feature: MA Experiment 20000182 PARAMETER Experiment Name: At_2mM_SA_P Parameter: Tissue Value: Aerial
  misc_feature: MA Experiment 20000182 PARAMETER Experiment Name: At_2mM_SA_P Parameter: Treatment Value: 2mM SA vs. No Treatment
  misc_feature: MA Experiment ID: 20001905 Result: Up-regulated in Transcription
  misc_feature: MA Experiment 20001905 PARAMETER Experiment Name: At_Drought_Reproduction_P Parameter: Age (day) Value: 40
  misc_feature: MA Experiment 20001905 PARAMETER Experiment Name: At_Drought_Reproduction_P Parameter: Organism Value: A. thaliana
  misc_feature: MA Experiment 20001905 PARAMETER Experiment Name: At_Drought_Reproduction_P Parameter: Plant Line Value: WS
  misc_feature: MA Experiment 20001905 PARAMETER Experiment Name: At_Drought_Reproduction_P Parameter: Timepoint (day) Value: 10
  misc_feature: MA Experiment 20001905 PARAMETER Experiment Name: At_Drought_Reproduction_P Parameter: Tissue Value: Rosettes
  misc_feature: MA Experiment 20001905 PARAMETER Experiment Name: At_Drought_Reproduction_P Parameter: Treatment Value: Drought vs. No Drought
atggcggttttgtgggtcgaacaatctccttgtagtaacaacggctataagaataagatttggtgcgcggagattgctcttgaaaaacaagaaagttgtgaaatttggggagaagttgagtggtttggtcatgtgcttacagttccttcaacattcattgtccgaagctcaaatttcattgtcgtgattctcttcctcaacctcgtcactttcttctcccttgtctcctccaatgaacttgtctttgctgtgggtgaaactggttcactacaagtgactccaagaacagaggtgatatattcacctggtctgaaacgaggtataacatcgatatgtgagagattacatatccatggattacaaagaagacttgagcacattgatagatatgcacattcactaaagttgactcttttgagtaataatgcttccaacagtatcgacgtttgcttccacaggaattcgtcgcgtgcaattggaatgtgtcctgataatcagtggaagagagtgtccaaagggttaccttgggttgggataatgtcaccttttgactataagattcttgatataagaacatttggtggctcatctaatgtcagcaccgtggagttggttgctaaacaagagtttttcatataccggattgtgtttttaatcatggggatagtgttactgagtttggcttctagacttagcaaatcagttgcgttttactatatcggtgcaatgtctattgggattgtcattcttgtaactcttatcattaatcaggggataaagcgtctaccaactagagggaagagtcgttttcagttatttttctactcgtctatgattggtgtgggaggttactttcttcaatacatacgcggtttagttcaagatttgctaatgcagatagaaatcagtgaagatttgtacatccctctggcgattcttttggttgtgtttgtatttatgttgggagcgtggtcaggattttggactgtcaagaaatttgttgtgacaaaagatggttctgttgacattagtacatcaatctttgtctcttggtccatccgagcttttgctgtggctctgatccttcagagctctttagatccattacttgctggaggagcgttgataactggaattctcatctcattgattctaaagagtattagcagaaagctgttagctcaaagaatatatgagcaagatgatgaaactgagagttgtagccccggcttgatccatgctacctcgtttgcttctcctcttcctagaggttccaacaagaagttgaggacagtaccattatctgagtcagatatctttccttcttcattccacaaaacaccagaagggagaaggaagctaacgaaggaagagttgcaaaaattcactaaagagagcacggaaaatgcattgaaggaattggtttcttcacctgaagaaggttcctctggttctgaaaagcaagcagctaggggaacttctgaaccagtcggagagtgtacgaagaaaaagaagcaaagagttcgttataaagaaagaaataaaccctcagataagagcataacagagaagaagaagaagatgtcttatcaagacccacaacatcccgttagtgctcctcctcctcaagggtatcctcctaaggaaggatatccaccagcagggtatcctccaccagcaggttatcctccaccacaatatcctcaagcgggatatcctccagcaggttatcctccaccgcagcaaggatacggtcaaggatatccagcacaaggctatcctccaccgcaatatcctcaaggtcatccaccacaatatccttatcaaggtcctccaccaccgcattatggtcaggctccaccgaaaaataagaaagataagaaggattcaggaggcttcatggaaggatgtttggctatgctctgctgttgcgttctcttggaagcttgcttttga

SEQ ID NO: 72421 - protein, 651 aa, Arabidopsis thaliana
  peptide (1)..(651): Ceres Seq. ID no. 4932984
  misc_feature (410)..(629): Pfam Name: Arsenite-resistance protein 2 Pfam Description: Arsenite-resistance protein 2
  misc_feature (53)..(524): Homolog of NCBI NO: 15240786 NR Description: putative protein; protein id: At5g67610.1 thaliana] >gi|9757882|dbj|BAB08469.1| to unknown protein [Arabidopsis thaliana]
  misc_feature (97)..(375): Homolog of NCBI NO: 29244642 NR Description: unknown protein [Oryza sativa (japonica
  misc_feature (102)..(385): Homolog of NCBI NO: 25403356 NR Description: protein F1K23.6 [imported] - Arabidopsis thaliana
  misc_feature (534)..(651): Homolog of NCBI NO: 15227350 NR Description: unknown protein; protein id: At2g41420.1
  misc_feature (219)..(385): Homolog of NCBI NO: 15218782 NR Description: hypothetical protein; protein id: At1g28760.1
  misc_feature (552)..(651): Homolog of NCBI NO: 40538901 NR Description: expressed protein [Oryza sativa (japonica
  misc_feature (540)..(651): Homolog of NCBI NO: 21554421 NR Description: unknown [Arabidopsis thaliana]
  misc_feature (531)..(620): Homolog of NCBI NO: 6469591 NR Description: unknown [Eufolliculina uhligi]
  misc_feature (553)..(651): Homolog of NCBI NO: 21618167 NR Description: adhesive/proline-rich protein homolog
  misc_feature (528)..(605): Homolog of NCBI NO: 40538901 NR Description: expressed protein [Oryza sativa (japonica
MAVLWVEQSPCSNNGYKNKIWCAEIALEKQESCEIWGEVEWFGHVLTVPSTFIVRSSNFIVVILFLNLVTFFSLVSSNELVFAVGETGSLQVTPRTEVIYSPGLKRGITSICERLHIHGLQRRLEHIDRYAHSLKLTLLSNNASNSIDVCFHRNSSRAIGMCPDNQWKRVSKGLPWVGIMSPFDYKILDIRTFGGSSNVSTVELVAKQEFFIYRIVFLIMGIVLLSLASRLSKSVAFYYIGAMSIGIVILVTLIINQGIKRLPTRGKSRFQLFFYSSMIGVGGYFLQYIRGLVQDLLMQIEISEDLYIPLAILLVVFVFMLGAWSGFWTVKKFVVTKDGSVDISTSIFVSWSIRAFAVALILQSSLDPLLAGGALITGILISLILKSISRKLLAQRIYEQDDETESCSPGLIHATSFASPLPRGSNKKLRTVPLSESDIFPSSFHKTPEGRRKLTKEELQKFTKESTENALKELVSSPEEGSSGSEKQAARGTSEPVGECTKKKKQRVRYKERNKPSDKSITEKKKKMSYQDPQHPVSAPPPQGYPPKEGYPPAGYPPPAGYPPPQYPQAGYPPAGYPPPQQGYGQGYPAQGYPPPQYPQGHPPQYPYQGPPPPHYGQAPPKNKKDKKDSGGFMEGCLAMLCCCVLLEACF

SEQ ID NO: 72422 - protein, 491 aa, Arabidopsis thaliana
  peptide (1)..(491): Ceres Seq. ID no. 4932985
  misc_feature (250)..(469): Pfam Name: Arsenite-resistance protein 2 Pfam Description: Arsenite-resistance protein 2
  misc_feature (1)..(364): Homolog of NCBI NO: 15240786 NR Description: putative protein; protein id: At5g67610.1 thaliana] >gi|9757882|dbj|BAB08469.1| to unknown protein [Arabidopsis thaliana]
  misc_feature (1)..(215): Homolog of NCBI NO: 29244642 NR Description: unknown protein [Oryza sativa (japonica
  misc_feature (1)..(225): Homolog of NCBI NO: 25403356 NR Description: protein F1K23.6 [imported] - Arabidopsis thaliana
  misc_feature (374)..(491): Homolog of NCBI NO: 15227350 NR Description: unknown protein; protein id: At2g41420.1
  misc_feature (59)..(225): Homolog of NCBI NO: 15218782 NR Description: hypothetical protein; protein id: At1g28760.1
  misc_feature (392)..(491): Homolog of NCBI NO: 40538901 NR Description: expressed protein [Oryza sativa (japonica
  misc_feature (380)..(491): Homolog of NCBI NO: 21554421 NR Description: unknown [Arabidopsis thaliana]
  misc_feature (371)..(460): Homolog of NCBI NO: 6469591 NR Description: unknown [Eufolliculina uhligi]
  misc_feature (393)..(491): Homolog of NCBI NO: 21618167 NR Description: adhesive/proline-rich protein homolog
  misc_feature (368)..(445): Homolog of NCBI NO: 40538901 NR Description: expressed protein [Oryza sativa (japonica
MCPDNQWKRVSKGLPWVGIMSPFDYKILDIRTFGGSSNVSTVELVAKQEFFIYRIVFLIMGIVLLSLASRLSKSVAFYYIGAMSIGIVILVTLIINQGIKRLPTRGKSRFQLFFYSSMIGVGGYFLQYIRGLVQDLLMQIEISEDLYIPLAILLVVFVFMLGAWSGFWTVKKFVVTKDGSVDISTSIFVSWSIRAFAVALILQSSLDPLLAGGALITGILISLILKSISRKLLAQRIYEQDDETESCSPGLIHATSFASPLPRGSNKKLRTVPLSESDIFPSSFHKTPEGRRKLTKEELQKFTKESTENALKELVSSPEEGSSGSEKQAARGTSEPVGECTKKKKQRVRYKERNKPSDKSITEKKKKMSYQDPQHPVSAPPPQGYPPKEGYPPAGYPPPAGYPPPQYPQAGYPPAGYPPPQQGYGQGYPAQGYPPPQYPQGHPPQYPYQGPPPPHYGQAPPKNKKDKKDSGGFMEGCLAMLCCCVLLEACF

SEQ ID NO: 72423 - protein, 472 aa, Arabidopsis thaliana
  peptide (1)..(472): Ceres Seq. ID no. 4932986
  misc_feature (231)..(450): Pfam Name: Arsenite-resistance protein 2 Pfam Description: Arsenite-resistance protein 2
  misc_feature (1)..(345): Homolog of NCBI NO: 15240786 NR Description: putative protein; protein id: At5g67610.1 thaliana] >gi|9757882|dbj|BAB08469.1| to unknown protein [Arabidopsis thaliana]
  misc_feature (1)..(196): Homolog of NCBI NO: 29244642 NR Description: unknown protein [Oryza sativa (japonica
  misc_feature (1)..(206): Homolog of NCBI NO: 25403356 NR Description: protein F1K23.6 [imported] - Arabidopsis thaliana
  misc_feature (355)..(472): Homolog of NCBI NO: 15227350 NR Description: unknown protein; protein id: At2g41420.1
  misc_feature (40)..(206): Homolog of NCBI NO: 15218782 NR Description: hypothetical protein; protein id: At1g28760.1
  misc_feature (373)..(472): Homolog of NCBI NO: 40538901 NR Description: expressed protein [Oryza sativa (japonica
  misc_feature (361)..(472): Homolog of NCBI NO: 21554421 NR Description: unknown [Arabidopsis thaliana]
  misc_feature (352)..(441): Homolog of NCBI NO: 6469591 NR Description: unknown [Eufolliculina uhligi]
  misc_feature (374)..(472): Homolog of NCBI NO: 21618167 NR Description: adhesive/proline-rich protein homolog
  misc_feature (349)..(426): Homolog of NCBI NO: 40538901 NR Description: expressed protein [Oryza sativa (japonica
MSPFDYKILDIRTFGGSSNVSTVELVAKQEFFIYRIVFLIMGIVLLSLASRLSKSVAFYYIGAMSIGIVILVTLIINQGIKRLPTRGKSRFQLFFYSSMIGVGGYFLQYIRGLVQDLLMQIEISEDLYIPLAILLVVFVFMLGAWSGFWTVKKFVVTKDGSVDISTSIFVSWSIRAFAVALILQSSLDPLLAGGALITGILISLILKSISRKLLAQRIYEQDDETESCSPGLIHATSFASPLPRGSNKKLRTVPLSESDIFPSSFHKTPEGRRKLTKEELQKFTKESTENALKELVSSPEEGSSGSEKQAARGTSEPVGECTKKKKQRVRYKERNKPSDKSITEKKKKMSYQDPQHPVSAPPPQGYPPKEGYPPAGYPPPAGYPPPQYPQAGYPPAGYPPPQQGYGQGYPAQGYPPPQYPQGHPPQYPYQGPPPPHYGQAPPKNKKDKKDSGGFMEGCLAMLCCCVLLEACF

SEQ ID NO: 72424 - DNA, 1227 bp, Arabidopsis thaliana
  misc_feature (1)..(1227): Ceres Seq. ID no. 4933133
  misc_feature: MA Experiment ID: 20000180 Result: Up-regulated in Transcription
  misc_feature: MA Experiment 20000180 PARAMETER Experiment Name: At_Germinating_Seeds_P Parameter: Age (hr) Value: 24 vs. 0
  misc_feature: MA Experiment 20000180 PARAMETER Experiment Name: At_Germinating_Seeds_P Parameter: Tissue Value: Germinating Seeds
atggctctccgagaagacgacgacgatgttaacatcggagaaaaagtagtcgacgtagaatcggagcttcagaagtaccggatcaattcgatcgaatcaacggttgtgattcgtcagttaccgacacaaggcattgccttcaagctctggatacctgcaacaactctcgtcacgcttttagataactaccgtcgtgacccaaacattagtcctctcaatcgcaccttctcgagttttcaatccgacggttcagattcttcttctccgattaacatcgtcgagctcggatctggaacgggaatcgtcggtatcgcagcggctgcgacactaggtgctaatgtcacggtgacggatctcccaaacgtaatcgagaatctcaaattcaacgccgacgcaaacgctcaagtcgtggctaagttcggtgggaaagtccacgtggcgtctcttcgttggggcgaaatcgatgacgtggaaagtttgggtcaaaacgttgacttgattctagcgtctgacgtggtttatcacgttcatctttatgaacctctcctcaaaacgctgcgttttctgctcttagaaggatcatccgagagagtgtttcttatggctcacctcaagagatggaagaaagaatcgatttttttcaagaaagctcggagattcttcgatgttgatgttatacattgtgatgatcctcaagaaggtgctagaatcggagttgtacttcgaacccgtgaccttgtaagcagagcacttctgattaaaatacagagaacgaagactgaggaaagagagaagaaaatgactctgggactgataaacgcgaatccagtggtgcaagctaagaaggaagggcttgttcgtagagaagatcaatatagagatgatgatataagagatccagaacacccttatactttggagcagctaagggttgtctctgaagaatctgttactgtcgatgacaagctcgatcgcatcctgataacgtttacaccgacgattcagcattgtagtatggcaaatataattggtctgtgtctgagagctaagcttaaagaatgtttgcaacttcattacaaggttgatatcagagtgtctccgggttctcacgctgatgaagtttcagttaacaaacaactgaatgataaagaaagagtggtggctgcattggagaatcctaatctccgtcagctcgtggatgagtgtatctactccgatgagatatga

SEQ ID NO: 72425 - protein, 408 aa, Arabidopsis thaliana
  peptide (1)..(408): Ceres Seq. ID no. 4933134
  misc_feature (296)..(365): Pfam Name: Domain of unknown function DUF59 Pfam Description: Domain of unknown function DUF59
  misc_feature (1)..(241): Homolog of NCBI NO: 15230327 NR Description: putative protein; protein id: At3g50850.1
  misc_feature (1)..(241): Homolog of NCBI NO: 26451147 NR Description: unknown protein [Arabidopsis thaliana]
  misc_feature (22)..(241): Homolog of NCBI NO: 15240506 NR Description: putative protein; protein id: At5g49560.1 thaliana] >gi|10177622|dbj|BAB10769.1|
  misc_feature (267)..(407): Homolog of NCBI NO: 34896898 NR Description: hypothetical protein [Oryza sativa (japonica group)] >gi|24899438|gb|AAN65008.1| hypothetical protein [Oryza
  misc_feature (267)..(407): Homolog of NCBI NO: 28973748 NR Description: unknown protein [Arabidopsis thaliana]
  misc_feature (290)..(407): Homolog of NCBI NO: 15221347 NR Description: unknown protein; protein id: At1g68310.1 thaliana] >gi|20455357|sp|Q9C9G6|U195_ARATH Hypothetical protein
  misc_feature (20)..(241): Homolog of NCBI NO: 33146776 NR Description: unknown protein [Oryza sativa (japonica
  misc_feature (296)..(403): Homolog of NCBI NO: 38347077 NR Description: OSJNBa0006A01.18 [Oryza sativa (japonica
  misc_feature (296)..(403): Homolog of NCBI NO: 38567963 NR Description: OSJNBa0093F12.4 [Oryza sativa (japonica
  misc_feature (264)..(401): Homolog of NCBI NO: 15232658 NR Description: hypothetical protein; protein id: At3g09380.1 thaliana] >gi|6478928|gb|AAF14033.1|AC011436_17 hypothetical
MALREDDDDVNIGEKVVDVESELQKYRINSIESTVVIRQLPTQGIAFKLWIPATTLVTLLDNYRRDPNISPLNRTFSSFQSDGSDSSSPINIVELGSGTGIVGIAAAATLGANVTVTDLPNVIENLKFNADANAQVVAKFGGKVHVASLRWGEIDDVESLGQNVDLILASDVVYHVHLYEPLLKTLRFLLLEGSSERVFLMAHLKRWKKESIFFKKARRFFDVDVIHCDDPQEGARIGVVLRTRDLVSRALLIKIQRTKTEEREKKMTLGLINANPVVQAKKEGLVRREDQYRDDDIRDPEHPYTLEQLRVVSEESVTVDDKLDRILITFTPTIQHCSMANIIGLCLRAKLKECLQLHYKVDIRVSPGSHADEVSVNKQLNDKERVVAALENPNLRQLVDECIYSDEI

SEQ ID NO: 72426 - protein, 208 aa, Arabidopsis thaliana
  peptide (1)..(208): Ceres Seq. ID no. 4933135
  misc_feature (96)..(165): Pfam Name: Domain of unknown function DUF59 Pfam Description: Domain of unknown function DUF59
  misc_feature (1)..(41): Homolog of NCBI NO: 15230327 NR Description: putative protein; protein id: At3g50850.1
  misc_feature (1)..(41): Homolog of NCBI NO: 26451147 NR Description: unknown protein [Arabidopsis thaliana]
  misc_feature (1)..(41): Homolog of NCBI NO: 15240506 NR Description: putative protein; protein id: At5g49560.1 thaliana] >gi|10177622|dbj|BAB10769.1|
  misc_feature (67)..(207): Homolog of NCBI NO: 34896898 NR Description: hypothetical protein [Oryza sativa (japonica group)] >gi|24899438|gb|AAN65008.1| hypothetical protein [Oryza
  misc_feature (67)..(207): Homolog of NCBI NO: 28973748 NR Description: unknown protein [Arabidopsis thaliana]
  misc_feature (90)..(207): Homolog of NCBI NO: 15221347 NR Description: unknown protein; protein id: At1g68310.1 thaliana] >gi|20455357|sp|Q9C9G6|U195_ARATH Hypothetical protein
  misc_feature (1)..(41): Homolog of NCBI NO: 33146776 NR Description: unknown protein [Oryza sativa (japonica
  misc_feature (96)..(203): Homolog of NCBI NO: 38347077 NR Description: OSJNBa0006A01.18 [Oryza sativa (japonica
  misc_feature (96)..(203): Homolog of NCBI NO: 38567963 NR Description: OSJNBa0093F12.4 [Oryza sativa (japonica
  misc_feature (64)..(201): Homolog of NCBI NO: 15232658 NR Description: hypothetical protein; protein id: At3g09380.1 thaliana] >gi|6478928|gb|AAF14033.1|AC011436_17 hypothetical
MAHLKRWKKESIFFKKARRFFDVDVIHCDDPQEGARIGVVLRTRDLVSRALLIKIQRTKTEEREKKMTLGLINANPVVQAKKEGLVRREDQYRDDDIRDPEHPYTLEQLRVVSEESVTVDDKLDRILITFTPTIQHCSMANIIGLCLRAKLKECLQLHYKVDIRVSPGSHADEVSVNKQLNDKERVVAALENPNLRQLVDECIYSDEI

SEQ ID NO: 72427 - DNA, 1449 bp, Arabidopsis thaliana
  misc_feature (1)..(1449): Ceres Seq. ID no. 4933244
  misc_feature: MA Experiment ID: 108462 Result: Down-regulated in Transcription
  misc_feature: MA Experiment 108462 PARAMETER Experiment Name: At_Germinating_Seeds_cDNA_P Parameter: Age (day) Value: 2 vs. 0
  misc_feature: MA Experiment 108462 PARAMETER Experiment Name: At_Germinating_Seeds_cDNA_P Parameter: Tissue Value: Germinating Seeds
  misc_feature: MA Experiment ID: 108463 Result: Down-regulated in Transcription
  misc_feature: MA Experiment 108463 PARAMETER Experiment Name: At_Germinating_Seeds_cDNA_P Parameter: Age (day) Value: 3 vs. 0
  misc_feature: MA Experiment 108463 PARAMETER Experiment Name: At_Germinating_Seeds_cDNA_P Parameter: Tissue Value: Germinating Seeds
  misc_feature: MA Experiment ID: 108488 Result: Up-regulated in Transcription
  misc_feature: MA Experiment ID: 108561 Result: Down-regulated in Transcription
  misc_feature: MA Experiment 108561 PARAMETER Experiment Name: At_100uM_ABA_cDNA_P Parameter: Timepoint (hr) Value: 6
  misc_feature: MA Experiment 108561 PARAMETER Experiment Name: At_100uM_ABA_cDNA_P Parameter: Tissue Value: Aerial
  misc_feature: MA Experiment 108561 PARAMETER Experiment Name: At_100uM_ABA_cDNA_P Parameter: Treatment Value: 100uM ABA vs. No Treatment
  misc_feature: MA Experiment ID: 108579 Result: Up-regulated in Transcription
  misc_feature: MA Experiment 108579 PARAMETER Experiment Name: At_4deg_Cold_cDNA_P Parameter: Temperature (deg C) Value: 4 vs. 22
  misc_feature: MA Experiment 108579 PARAMETER Experiment Name: At_4deg_Cold_cDNA_P Parameter: Timepoint (hr) Value: 6
  misc_feature: MA Experiment 108579 PARAMETER Experiment Name: At_4deg_Cold_cDNA_P Parameter: Tissue Value: Aerial
  misc_feature: MA Experiment ID: 108585 Result: Down-regulated in Transcription
  misc_feature: MA Experiment 108585 PARAMETER Experiment Name: At_5mM_NaNP_cDNA_P Parameter: Timepoint (hr) Value: 6
  misc_feature: MA Experiment 108585 PARAMETER Experiment Name: At_5mM_NaNP_cDNA_P Parameter: Tissue Value: Aerial
  misc_feature: MA Experiment 108585 PARAMETER Experiment Name: At_5mM_NaNP_cDNA_P Parameter: Treatment Value: null
  misc_feature: MA Experiment ID: 108595 Result: Down-regulated in Transcription
  misc_feature: MA Experiment 108595 PARAMETER Experiment Name: At_Ler-pi_Ovule_cDNA_P Parameter: Plant Line Value: null
  misc_feature: MA Experiment ID: 108605 Result: Down-regulated in Transcription
  misc_feature: MA Experiment 108605 PARAMETER Experiment Name: At_100uM_ABA_cDNA_P Parameter: Timepoint (hr) Value: 6
  misc_feature: MA Experiment 108605 PARAMETER Experiment Name: At_100uM_ABA_cDNA_P Parameter: Tissue Value: Aerial
  misc_feature: MA Experiment 108605 PARAMETER Experiment Name: At_100uM_ABA_cDNA_P Parameter: Treatment Value: 100uM ABA vs. No Treatment
  misc_feature: MA Experiment ID: 108607 Result: Down-regulated in Transcription
  misc_feature: MA Experiment 108607 PARAMETER Experiment Name: At_100uM_ABA_cDNA_P Parameter: Timepoint (hr) Value: 4
  misc_feature: MA Experiment 108607 PARAMETER Experiment Name: At_100uM_ABA_cDNA_P Parameter: Tissue Value: Aerial
  misc_feature: MA Experiment 108607 PARAMETER Experiment Name: At_100uM_ABA_cDNA_P Parameter: Treatment Value: 100uM ABA vs. No Treatment
  misc_feature: MA Experiment ID: 108668 Result: Down-regulated in Transcription
  misc_feature: MA Experiment 108668 PARAMETER Experiment Name: At_2mM_SA_cDNA_P Parameter: Plant Line Value: WS
  misc_feature: MA Experiment 108668 PARAMETER Experiment Name: At_2mM_SA_cDNA_P Parameter: Timepoint (hr) Value: 6
  misc_feature: MA Experiment 108668 PARAMETER Experiment Name: At_2mM_SA_cDNA_P Parameter: Treatment Value: 2mM SA vs. No Treatment
  misc_feature: MA Experiment ID: 20000070 Result: Down-regulated in Transcription
  misc_feature: MA Experiment 20000070 PARAMETER Experiment Name: At_100uM_ABA_Mutants_cDNA_P Parameter: Plant Line Value: CS24
  misc_feature: MA Experiment 20000070 PARAMETER Experiment Name: At_100uM_ABA_Mutants_cDNA_P Parameter: Timepoint (hr) Value: 6
  misc_feature: MA Experiment 20000070 PARAMETER Experiment Name: At_100uM_ABA_Mutants_cDNA_P Parameter: Tissue Value: Aerial
  misc_feature: MA Experiment 20000070 PARAMETER Experiment Name: At_100uM_ABA_Mutants_cDNA_P Parameter: Treatment Value: 100uM ABA vs. No Treatment
  misc_feature: MA Experiment ID: 20000071 Result: Down-regulated in Transcription
  misc_feature: MA Experiment 20000071 PARAMETER Experiment Name: At_100uM_ABA_Mutants_cDNA_P Parameter: Plant Line Value: CS8104
  misc_feature: MA Experiment 20000071 PARAMETER Experiment Name: At_100uM_ABA_Mutants_cDNA_P Parameter: Timepoint (hr) Value: 6
  misc_feature: MA Experiment 20000071 PARAMETER Experiment Name: At_100uM_ABA_Mutants_cDNA_P Parameter: Tissue Value: Aerial
  misc_feature: MA Experiment 20000071 PARAMETER Experiment Name: At_100uM_ABA_Mutants_cDNA_P Parameter: Treatment Value: 100uM ABA vs. No Treatment
  misc_feature: MA Experiment ID: 20000072 Result: Down-regulated in Transcription
  misc_feature: MA Experiment 20000072 PARAMETER Experiment Name: At_100uM_ABA_Mutants_cDNA_P Parameter: Plant Line Value: CS8105
  misc_feature: MA Experiment 20000072 PARAMETER Experiment Name: At_100uM_ABA_Mutants_cDNA_P Parameter: Timepoint (hr) Value: 6
  misc_feature: MA Experiment 20000072 PARAMETER Experiment Name: At_100uM_ABA_Mutants_cDNA_P Parameter: Tissue Value: Aerial
  misc_feature: MA Experiment 20000072 PARAMETER Experiment Name: At_100uM_ABA_Mutants_cDNA_P Parameter: Treatment Value: 100uM ABA vs. No Treatment
  misc_feature: MA Experiment ID: 20000087 Result: Down-regulated in Transcription
  misc_feature: MA Experiment 20000087 PARAMETER Experiment Name: At_100uM_ABA_Mutants_cDNA_P Parameter: Plant Line Value: WS
  misc_feature: MA Experiment 20000087 PARAMETER Experiment Name: At_100uM_ABA_Mutants_cDNA_P Parameter: Timepoint (hr) Value: 6
  misc_feature: MA Experiment 20000087 PARAMETER Experiment Name: At_100uM_ABA_Mutants_cDNA_P Parameter: Tissue Value: Aerial
  misc_feature: MA Experiment 20000087 PARAMETER Experiment Name: At_100uM_ABA_Mutants_cDNA_P Parameter: Treatment Value: 100uM ABA vs. No Treatment
  misc_feature: MA Experiment ID: 20000117 Result: Down-regulated in Transcription
  misc_feature: MA Experiment 20000117 PARAMETER Experiment Name: At_100uM_ABA_Mutants_cDNA_P Parameter: Plant Line Value: Columbia
  misc_feature: MA Experiment 20000117 PARAMETER Experiment Name: At_100uM_ABA_Mutants_cDNA_P Parameter: Timepoint (hr) Value: 6
  misc_feature: MA Experiment 20000117 PARAMETER Experiment Name: At_100uM_ABA_Mutants_cDNA_P Parameter: Tissue Value: Aerial
  misc_feature: MA Experiment 20000117 PARAMETER Experiment Name: At_100uM_ABA_Mutants_cDNA_P Parameter: Treatment Value: 100uM ABA vs. No Treatment
  misc_feature: MA Experiment ID: 20000169 Result: Down-regulated in Transcription
  misc_feature: MA Experiment 20000169 PARAMETER Experiment Name: At_100uM_ABA_P Parameter: Age (day) Value: 14
  misc_feature: MA Experiment 20000169 PARAMETER Experiment Name: At_100uM_ABA_P Parameter: Organism Value: A. thaliana
  misc_feature: MA Experiment 20000169 PARAMETER Experiment Name: At_100uM_ABA_P Parameter: Plant Line Value: WS
  misc_feature: MA Experiment 20000169 PARAMETER Experiment Name: At_100uM_ABA_P Parameter: Timepoint (hr) Value: 6
  misc_feature: MA Experiment 20000169 PARAMETER Experiment Name: At_100uM_ABA_P Parameter: Tissue Value: Aerial
  misc_feature: MA Experiment 20000169 PARAMETER Experiment Name: At_100uM_ABA_P Parameter: Treatment Value: 100uM ABA vs. No Treatment
  misc_feature: MA Experiment ID: 20000180 Result: Up-regulated in Transcription
  misc_feature: MA Experiment 20000180 PARAMETER Experiment Name: At_Germinating_Seeds_P Parameter: Age (hr) Value: 24 vs. 0
  misc_feature: MA Experiment 20000180 PARAMETER Experiment Name: At_Germinating_Seeds_P Parameter: Tissue Value: Germinating Seeds
  misc_feature: MA Experiment ID: 20000185 Result: Down-regulated in Transcription
  misc_feature: MA Experiment 20000185 PARAMETER Experiment Name: At_Roots__P Parameter: Age (day) Value: 7 vs. 21
  misc_feature: MA Experiment 20000185 PARAMETER Experiment Name: At_Roots__P Parameter: Organism Value: A. thaliana
  misc_feature: MA Experiment 20000185 PARAMETER Experiment Name: At_Roots__P Parameter: Tissue Value: Roots vs. Whole Plant
  misc_feature: MA Experiment ID: 20000224 Result: Up-regulated in Transcription
  misc_feature: MA Experiment ID: 20000234 Result: Up-regulated in Transcription
  misc_feature: MA Experiment 20000234 PARAMETER Experiment Name: At_Siliques_P Parameter: Age (day) Value: 21
  misc_feature: MA Experiment 20000234 PARAMETER Experiment Name: At_Siliques_P Parameter: Organism Value: A. thaliana
  misc_feature: MA Experiment 20000234 PARAMETER Experiment Name: At_Siliques_P Parameter: Plant Line Value: WS
  misc_feature: MA Experiment 20000234 PARAMETER Experiment Name: At_Siliques_P Parameter: Tissue Value: Less Than 5mm Siliques vs. Whole Plant
  misc_feature: MA Experiment ID: 20000436 Result: Down-regulated in Transcription
  misc_feature: MA Experiment 20000436 PARAMETER Experiment Name: At_Drought_P Parameter: Age (day) Value: 7
  misc_feature: MA Experiment 20000436 PARAMETER Experiment Name: At_Drought_P Parameter: Organism Value: A. thaliana
  misc_feature: MA Experiment 20000436 PARAMETER Experiment Name: At_Drought_P Parameter: Plant Line Value: WS
  misc_feature: MA Experiment 20000436 PARAMETER Experiment Name: At_Drought_P Parameter: Timepoint (hr) Value: 12
  misc_feature: MA Experiment 20000436 PARAMETER Experiment Name: At_Drought_P Parameter: Tissue Value: Whole Plant
  misc_feature: MA Experiment 20000436 PARAMETER Experiment Name: At_Drought_P Parameter: Treatment Value: Drought vs. No Drought
  misc_feature: MA Experiment ID: 20000437 Result: Down-regulated in Transcription
  misc_feature: MA Experiment 20000437 PARAMETER Experiment Name: At_Drought_P Parameter: Age (day) Value: 8
  misc_feature: MA Experiment 20000437 PARAMETER Experiment Name: At_Drought_P Parameter: Organism Value: A. thaliana
  misc_feature: MA Experiment 20000437 PARAMETER Experiment Name: At_Drought_P Parameter: Plant Line Value: WS
  misc_feature: MA Experiment 20000437 PARAMETER Experiment Name: At_Drought_P Parameter: Timepoint (hr) Value: 24
  misc_feature: MA Experiment 20000437 PARAMETER Experiment Name: At_Drought_P Parameter: Tissue Value: Whole Plant
  misc_feature: MA Experiment 20000437 PARAMETER Experiment Name: At_Drought_P Parameter: Treatment Value: Drought vs. No Drought
  misc_feature: MA Experiment ID: 20000439 Result: Down-regulated in Transcription
  misc_feature: MA Experiment 20000439 PARAMETER Experiment Name: At_Roots__P Parameter: Age (day) Value: 14 vs. 21
  misc_feature: MA Experiment 20000439 PARAMETER Experiment Name: At_Roots__P Parameter: Organism Value: A. thaliana
  misc_feature: MA Experiment 20000439 PARAMETER Experiment Name: At_Roots__P Parameter: Tissue Value: Roots vs. Whole Plant
  misc_feature: MA Experiment ID: 20001248 Result: Down-regulated in Transcription
  misc_feature: MA Experiment 20001248 PARAMETER Experiment Name: At_Far-red-induction_P Parameter: Age (day) Value: 7
  misc_feature: MA Experiment 20001248 PARAMETER Experiment Name: At_Far-red-induction_P Parameter: Light Value: Far-red vs. White
  misc_feature: MA Experiment 20001248 PARAMETER Experiment Name: At_Far-red-induction_P Parameter: Organism Value: A. thaliana
  misc_feature: MA Experiment 20001248 PARAMETER Experiment Name: At_Far-red-induction_P Parameter: Plant Line Value: Columbia
  misc_feature: MA Experiment 20001248 PARAMETER Experiment Name: At_Far-red-induction_P Parameter: Timepoint (hr) Value: 4
  misc_feature: MA Experiment 20001248 PARAMETER Experiment Name: At_Far-red-induction_P Parameter: Tissue Value: Whole Plant
  misc_feature: MA Experiment ID: 20001450 Result: Down-regulated in Transcription
  misc_feature: MA Experiment 20001450 PARAMETER Experiment Name: At_Far-red-induction_P Parameter: Age (day) Value: 7
  misc_feature: MA Experiment 20001450 PARAMETER Experiment Name: At_Far-red-induction_P Parameter: Light Value: Far-red vs. White
  misc_feature: MA Experiment 20001450 PARAMETER Experiment Name: At_Far-red-induction_P Parameter: Organism Value: A. thaliana
  misc_feature: MA Experiment 20001450 PARAMETER Experiment Name: At_Far-red-induction_P Parameter: Plant Line Value: Columbia
  misc_feature: MA Experiment 20001450 PARAMETER Experiment Name: At_Far-red-induction_P Parameter: Timepoint (hr) Value: 8
  misc_feature: MA Experiment 20001450 PARAMETER Experiment Name: At_Far-red-induction_P Parameter: Tissue Value: Whole Plant
  misc_feature: MA Experiment ID: 20001458 Result: Up-regulated in Transcription
  misc_feature: MA Experiment 20001458 PARAMETER Experiment Name: At_50mM_NH4NO3_L-to-H_P Parameter: Age (day) Value: Undefined
  misc_feature: MA Experiment 20001458 PARAMETER Experiment Name: At_50mM_NH4NO3_L-to-H_P Parameter: Organism Value: Undefined
  misc_feature: MA Experiment 20001458 PARAMETER Experiment Name: At_50mM_NH4NO3_L-to-H_P Parameter: Plant Line Value: Undefined
  misc_feature: MA Experiment 20001458 PARAMETER Experiment Name: At_50mM_NH4NO3_L-to-H_P Parameter: Timepoint (hr) Value: 2
  misc_feature: MA Experiment 20001458 PARAMETER Experiment Name: At_50mM_NH4NO3_L-to-H_P Parameter: Tissue Value: Siliques
  misc_feature: MA Experiment 20001458 PARAMETER Experiment Name: At_50mM_NH4NO3_L-to-H_P Parameter: Treatment Value: 50mM NH4NO3 vs. 100mM Manitol
  misc_feature: MA Experiment ID: 20001560 Result: Up-regulated in Transcription
  misc_feature: MA Experiment 20001560 PARAMETER Experiment Name: At_Drought_Soil_Dry_P Parameter: Age (day) Value: 28
  misc_feature: MA Experiment 20001560 PARAMETER Experiment Name: At_Drought_Soil_Dry_P Parameter: Organism Value: A. thaliana
  misc_feature: MA Experiment 20001560 PARAMETER Experiment Name: At_Drought_Soil_Dry_P Parameter: Plant Line Value: WS
  misc_feature: MA Experiment 20001560 PARAMETER Experiment Name: At_Drought_Soil_Dry_P Parameter: Post Timepoint (hr) Value: None
  misc_feature: MA Experiment 20001560 PARAMETER Experiment Name: At_Drought_Soil_Dry_P Parameter: Post-Treatment Value: None
  misc_feature: MA Experiment 20001560 PARAMETER Experiment Name: At_Drought_Soil_Dry_P Parameter: Timepoint (day) Value: 14
  misc_feature: MA Experiment 20001560 PARAMETER Experiment Name: At_Drought_Soil_Dry_P Parameter: Treatment Value: Drought vs. No Drought
  misc_feature: MA Experiment ID: 20001757 Result: Up-regulated in Transcription
  misc_feature: MA Experiment 20001757 PARAMETER Experiment Name: At_50mM_NH4NO3_L-to-H_P Parameter: Timepoint (hr) Value: 6
  misc_feature: MA Experiment 20001757 PARAMETER Experiment Name: At_50mM_NH4NO3_L-to-H_P Parameter: Tissue Value: Leaf
  misc_feature: MA Experiment 20001757 PARAMETER Experiment Name: At_50mM_NH4NO3_L-to-H_P Parameter: Treatment Value: 50mM NH4NO3 vs 100mM Mannitol
atatttttgtgattagaaattaggatcttacagaaatctttcaaaaaaaaattcataacagttccattttttttggtaagattcataaaaaaattcaagttaaatgcattttataaaaatgtaggaaaaactttcatcaaaaatcgttgagaagaacatacagtatatcttatccactctcttcctcatccacgcggcaaaggcacaaacctctttagaaaaatgtcgtcagcttattgttcctccgccgtggctgtatccgccgcagccaccgcttcctccgccgctacctttaatccattactctcctcccactccaattcccaactcttctatcgctttacaccaaaatccttcaaactcgttgccaattgccctaatccactaatcctccactcaaatatccgccgccaccgcttcttctgcgccgccgaaaccgaagctagttccgccgatgatgaaatccaggcatcagtagaagaagaagaagaggtagaagaagaaggagatgaaggtgaagaagaagtagaggaagaaaaacagacgacgcaagcgagtggtgaagaagggaggctttacgttgggaatttaccttacacaatcacttcttctgagctctctcagatttttggagaagctggaactgtcgtcgatgttcagattgtttatgataaagttactgatagaagcagaggatttggatttgtaacaatgggaagcattgaagaagctaaagaagcgatgcagatgtttaacagctctcaaattggtggtagaacggtgaaagtgaacttcccggaggtgccgagaggcggtgagaacgaagtaatgagaaccaaaatccgtgataataaccggagttatgttgatagtcctcataaggtatatgcaggaaaccttggttggaatctaacctcacaaggtttaaaggatgcatttggtgatcaacctggtgtgcttggtgctaaagttatctatgaaagaaatactgggaggtctagggggtttggtttcatctcgttcgagtcagcggaaaatgttcagtctgctttggctacaatgaatggcgtggaagttgaaggacgagcgctgaggctaaatttggcttcagagagagagaaacccactgtgtctcctccttccgtagaagaaggagaaaccgaggaggccagtctagagagtaacgaggtgctttcgaatgttagtgcatgaagcagcaaaagcacaatagattccggataagtttcagactgatctgctcgaggtgccaaaaatgaaaattttgttgtctttataaatgtgttgttttgttctagtgaggctgaagaagaagacaatatatgagatagaaaacaagagattgtttgtaatttttattgagaatgtttttaatccataaatggtgtaatgtaacaacatatcttgattccagtaaactgcaaatttctg

SEQ ID NO: 72428 - protein, 329 aa, Arabidopsis thaliana; identical to SEQ ID NO: 29498
  peptide (1)..(329): Ceres Seq. ID no. 4933245
  misc_feature (221)..(292): Pfam Name: RNA recognition motif. (a.k.a. RRM, RBD, or RNP domain) Pfam Description: RNA recognition motif. (a.k.a. RRM, RBD, or RNP
  misc_feature (1)..(329): Homolog of NCBI NO: 15231200 NR Description: chloroplast RNA-binding protein cp33; protein id: supported by cDNA: 14246., supported by cDNA: gi_14517543, by cDNA: gi_17064757, supported by cDNA: gi_18700225 protein cp33
  misc_feature (1)..(329): Homolog of NCBI NO: 17064758 NR Description: ubiquitin / ribosomal protein CEP52 [Arabidopsis
  misc_feature (9)..(329): Homolog of NCBI NO: 681912 NR Description: cp33 [Arabidopsis thaliana]
  misc_feature (1)..(329): Homolog of NCBI NO: 7446342 NR Description: RNA-binding protein precursor, 33K - wood tobacco
  misc_feature (3)..(329): Homolog of NCBI NO: 133249 NR Description: 33 kDa ribonucleoprotein, chloroplast precursor
  misc_feature (30)..(283): Homolog of NCBI NO: 100376 NR Description: ribonucleoprotein precursor - common tobacco
  misc_feature (17)..(329): Homolog of NCBI NO: 7446339 NR Description: probable RNA-binding protein cp33 precursor - >gi|3550485|emb|CAA11894.1| cp33Hv [Hordeum vulgare subsp.
  misc_feature (69)..(329): Homolog of NCBI NO: 34394882 NR Description: putative RNA-binding protein [Oryza sativa
  misc_feature (4)..(298): Homolog of NCBI NO: 7446356 NR Description: Ps16 protein - wheat >gi|2443390|dbj|BAA22411.1|
  misc_feature (4)..(298): Homolog of NCBI NO: 7446358 NR Description: cp31AHv protein - barley

SEQ ID NO: 72429 - protein, 166 aa, Arabidopsis thaliana; identical to SEQ ID NO: 29499
  peptide (1)..(166): Ceres Seq. ID no. 4933246
  misc_feature (58)..(129): Pfam Name: RNA recognition motif. (a.k.a. RRM, RBD, or RNP domain) Pfam Description: RNA recognition motif. (a.k.a. RRM, RBD, or RNP
  misc_feature (1)..(166): Homolog of NCBI NO: 15231200 NR Description: chloroplast RNA-binding protein cp33; protein id: supported by cDNA: 14246., supported by cDNA: gi_14517543, by cDNA: gi_17064757, supported by cDNA: gi_18700225 protein cp33
  misc_feature (1)..(166): Homolog of NCBI NO: 17064758 NR Description: ubiquitin / ribosomal protein CEP52 [Arabidopsis
  misc_feature (1)..(166): Homolog of NCBI NO: 681912 NR Description: cp33 [Arabidopsis thaliana]
  misc_feature (1)..(166): Homolog of NCBI NO: 7446342 NR Description: RNA-binding protein precursor, 33K - wood tobacco
  misc_feature (1)..(166): Homolog of NCBI NO: 133249 NR Description: 33 kDa ribonucleoprotein, chloroplast precursor
  misc_feature (1)..(120): Homolog of NCBI NO: 100376 NR Description: ribonucleoprotein precursor - common tobacco
  misc_feature (1)..(166): Homolog of NCBI NO: 7446339 NR Description: probable RNA-binding protein cp33 precursor - >gi|3550485|emb|CAA11894.1| cp33Hv [Hordeum vulgare subsp.
  misc_feature (1)..(166): Homolog of NCBI NO: 34394882 NR Description: putative RNA-binding protein [Oryza sativa
  misc_feature (1)..(135): Homolog of NCBI NO: 7446356 NR Description: Ps16 protein - wheat >gi|2443390|dbj|BAA22411.1|
  misc_feature (1)..(135): Homolog of NCBI NO: 7446358 NR Description: cp31AHv protein - barley

SEQ ID NO: 72430 - DNA, 678 bp, Arabidopsis thaliana
  misc_feature (1)..(678): Ceres Seq. ID no. 4933296
  misc_feature: MA Experiment ID: 20000182 Result: Up-regulated in Transcription
  misc_feature: MA Experiment 20000182 PARAMETER Experiment Name: At_2mM_SA_P Parameter: Age (day) Value: 14
  misc_feature: MA Experiment 20000182 PARAMETER Experiment Name: At_2mM_SA_P Parameter: Organism Value: A. thaliana
  misc_feature: MA Experiment 20000182 PARAMETER Experiment Name: At_2mM_SA_P Parameter: Plant Line Value: WS
  misc_feature: MA Experiment 20000182 PARAMETER Experiment Name: At_2mM_SA_P Parameter: Timepoint (hr) Value: 6
  misc_feature: MA Experiment 20000182 PARAMETER Experiment Name: At_2mM_SA_P Parameter: Tissue Value: Aerial
  misc_feature: MA Experiment 20000182 PARAMETER Experiment Name: At_2mM_SA_P Parameter: Treatment Value: 2mM SA vs. No Treatment
  misc_feature: MA Experiment ID: 20000184 Result: Down-regulated in Transcription
  misc_feature: MA Experiment 20000184 PARAMETER Experiment Name: At_Shoots__P Parameter: Age (day) Value: 7
  misc_feature: MA Experiment 20000184 PARAMETER Experiment Name: At_Shoots__P Parameter: Tissue Value: Shoots vs. Whole Plant
  misc_feature: MA Experiment ID: 20000437 Result: Up-regulated in Transcription
  misc_feature: MA Experiment 20000437 PARAMETER Experiment Name: At_Drought_P Parameter: Age (day) Value: 8
  misc_feature: MA Experiment 20000437 PARAMETER Experiment Name: At_Drought_P Parameter: Organism Value: A. thaliana
  misc_feature: MA Experiment 20000437 PARAMETER Experiment Name: At_Drought_P Parameter: Plant Line Value: WS
  misc_feature: MA Experiment 20000437 PARAMETER Experiment Name: At_Drought_P Parameter: Timepoint (hr) Value: 24
  misc_feature: MA Experiment 20000437 PARAMETER Experiment Name: At_Drought_P Parameter: Tissue Value: Whole Plant
  misc_feature: MA Experiment 20000437 PARAMETER Experiment Name: At_Drought_P Parameter: Treatment Value: Drought vs. No Drought
atgatgtgctgtataaatgcacctttcaagtttatgaggggatcaaaagaccaacaacaagggcaatctcgtcctcaggaagcttcttcacagtcgccatggtactcgccttctttagttagctcgccaagctcatcccggcctcaaagttcaggtcagatttcagcacaagtatcaccgggtgaagcagctggcattatcgtcttcttgaaagacaaaagcgtggatgaactcaggaagcttctctctgacaaagatgcgtatcagcaatttctgctctctcttgaccaggtcaaagtccagaataatatcaaagatgagctccgtagagaaacattgcagctagctagagacaacttggagaaggagccacagataatggagctcagaaaccaatgcagaattatccgtacaactgagctcgcaactgcgcaagaaaagcttaatgagcttgagaggcaaaaagaagagatcctcaaattctactcccctggttctcttcttcataaacttcaagaggctatgaatcaggtggatgaagaatccgaagccctgcaagaaaagttcctagagaaggagattgatacagcagcatttgtgcagaaatacaagaagcttcgtactacctatcatcgacgagcattgatccatcttgccgctaaaacgtcaaacatttga

SEQ ID NO: 72431 - protein, 225 aa, Arabidopsis thaliana
  peptide (1)..(225): Ceres Seq. ID no. 4933297
  misc_feature (9)..(225): Homolog of NCBI NO: 15231750 NR Description: putative protein; protein id: At3g53120.1
  misc_feature (9)..(141): Homolog of NCBI NO: 30686871 NR Description: expressed protein [Arabidopsis thaliana]
  misc_feature (9)..(132): Homolog of NCBI NO: 30686868 NR Description: expressed protein [Arabidopsis thaliana] At2g36680/F13K3.8 [Arabidopsis thaliana]
  misc_feature (9)..(141): Homolog of NCBI NO: 25408498 NR Description: hypothetical protein At2g36680 [imported] - thaliana >gi|4415913|gb|AAD20144.1| unknown protein [Arabidopsis
  misc_feature (70)..(213): Homolog of NCBI NO: 21739818 NR Description: hypothetical protein [Homo sapiens]
  misc_feature (70)..(213): Homolog of NCBI NO: 31088908 NR Description: RIKEN cDNA 5730409F24 [Mus musculus]
  misc_feature (70)..(214): Homolog of NCBI NO: 39645505 NR Description: Unknown (protein for MGC:77637) [Danio rerio]
  misc_feature (70)..(214): Homolog of NCBI NO: 37590372 NR Description: Unknown (protein for MGC:73244) [Danio rerio]
  misc_feature (70)..(213): Homolog of NCBI NO: 34861617 NR Description: similar to RIKEN cDNA 5730409F24 [Rattus
  misc_feature (70)..(214): Homolog of NCBI NO: 18490855 NR Description: Similar to RIKEN cDNA 4930592A21 gene [Homo
MMCCINAPFKFMRGSKDQQQGQSRPQEASSQSPWYSPSLVSSPSSSRPQSSGQISAQVSPGEAAGIIVFLKDKSVDELRKLLSDKDAYQQFLLSLDQVKVQNNIKDELRRETLQLARDNLEKEPQIMELRNQCRIIRTTELATAQEKLNELERQKEEILKFYSPGSLLHKLQEAMNQVDEESEALQEKFLEKEIDTAAFVQKYKKLRTTYHRRALIHLAAKTSNI

SEQ ID NO: 72432 - protein, 224 aa, Arabidopsis thaliana
  peptide (1)..(224): Ceres Seq. ID no. 4933298
  misc_feature (8)..(224): Homolog of NCBI NO: 15231750 NR Description: putative protein; protein id: At3g53120.1
  misc_feature (8)..(140): Homolog of NCBI NO: 30686871 NR Description: expressed protein [Arabidopsis thaliana]
  misc_feature (8)..(131): Homolog of NCBI NO: 30686868 NR Description: expressed protein [Arabidopsis thaliana] At2g36680/F13K3.8 [Arabidopsis thaliana]
  misc_feature (8)..(140): Homolog of NCBI NO: 25408498 NR Description: hypothetical protein At2g36680 [imported] - thaliana >gi|4415913|gb|AAD20144.1| unknown protein [Arabidopsis
  misc_feature (69)..(212): Homolog of NCBI NO: 21739818 NR Description: hypothetical protein [Homo sapiens]
  misc_feature (69)..(212): Homolog of NCBI NO: 31088908 NR Description: RIKEN cDNA 5730409F24 [Mus musculus]
  misc_feature (69)..(213): Homolog of NCBI NO: 39645505 NR Description: Unknown (protein for MGC:77637) [Danio rerio]
  misc_feature (69)..(213): Homolog of NCBI NO: 37590372 NR Description: Unknown (protein for MGC:73244) [Danio rerio]
  misc_feature (69)..(212): Homolog of NCBI NO: 34861617 NR Description: similar to RIKEN cDNA 5730409F24 [Rattus
  misc_feature (69)..(213): Homolog of NCBI NO: 18490855 NR Description: Similar to RIKEN cDNA 4930592A21 gene [Homo
MCCINAPFKFMRGSKDQQQGQSRPQEASSQSPWYSPSLVSSPSSSRPQSSGQISAQVSPGEAAGIIVFLKDKSVDELRKLLSDKDAYQQFLLSLDQVKVQNNIKDELRRETLQLARDNLEKEPQIMELRNQCRIIRTTELATAQEKLNELERQKEEILKFYSPGSLLHKLQEAMNQVDEESEALQEKFLEKEIDTAAFVQKYKKLRTTYHRRALIHLAAKTSNI

SEQ ID NO: 72433 - protein, 214 aa, Arabidopsis thaliana
  peptide (1)..(214): Ceres Seq. ID no. 4933299
  misc_feature (1)..(214): Homolog of NCBI NO: 15231750 NR Description: putative protein; protein id: At3g53120.1
  misc_feature (1)..(130): Homolog of NCBI NO: 30686871 NR Description: expressed protein [Arabidopsis thaliana]
  misc_feature (1)..(121): Homolog of NCBI NO: 30686868 NR Description: expressed protein [Arabidopsis thaliana] At2g36680/F13K3.8 [Arabidopsis thaliana]
  misc_feature (1)..(130): Homolog of NCBI NO: 25408498 NR Description: hypothetical protein At2g36680 [imported] - thaliana >gi|4415913|gb|AAD20144.1| unknown protein [Arabidopsis
  misc_feature (59)..(202): Homolog of NCBI NO: 21739818 NR Description: hypothetical protein [Homo sapiens]
  misc_feature (59)..(202): Homolog of NCBI NO: 31088908 NR Description: RIKEN cDNA 5730409F24 [Mus musculus]
  misc_feature (59)..(203): Homolog of NCBI NO: 39645505 NR Description: Unknown (protein for MGC:77637) [Danio rerio]
  misc_feature (59)..(203): Homolog of NCBI NO: 37590372 NR Description: Unknown (protein for MGC:73244) [Danio rerio]
  misc_feature (59)..(202): Homolog of NCBI NO: 34861617 NR Description: similar to RIKEN cDNA 5730409F24 [Rattus
  misc_feature (59)..(203): Homolog of NCBI NO: 18490855 NR Description: Similar to RIKEN cDNA 4930592A21 gene [Homo
MRGSKDQQQGQSRPQEASSQSPWYSPSLVSSPSSSRPQSSGQISAQVSPGEAAGIIVFLKDKSVDELRKLLSDKDAYQQFLLSLDQVKVQNNIKDELRRETLQLARDNLEKEPQIMELRNQCRIIRTTELATAQEKLNELERQKEEILKFYSPGSLLHKLQEAMNQVDEESEALQEKFLEKEIDTAAFVQKYKKLRTTYHRRALIHLAAKTSNI

SEQ ID NO: 72434 - DNA, 654 bp, Arabidopsis thaliana
  misc_feature (1)..(654): Ceres Seq. ID no. 4933353
  misc_feature: MA Experiment ID: 20000182 Result: Up-regulated in Transcription
  misc_feature: MA Experiment 20000182 PARAMETER Experiment Name: At_2mM_SA_P Parameter: Age (day) Value: 14
  misc_feature: MA Experiment 20000182 PARAMETER Experiment Name: At_2mM_SA_P Parameter: Organism Value: A. thaliana
  misc_feature: MA Experiment 20000182 PARAMETER Experiment Name: At_2mM_SA_P Parameter: Plant Line Value: WS
  misc_feature: MA Experiment 20000182 PARAMETER Experiment Name: At_2mM_SA_P Parameter: Timepoint (hr) Value: 6
  misc_feature: MA Experiment 20000182 PARAMETER Experiment Name: At_2mM_SA_P Parameter: Tissue Value: Aerial
  misc_feature: MA Experiment 20000182 PARAMETER Experiment Name: At_2mM_SA_P Parameter: Treatment Value: 2mM SA vs. No Treatment
  misc_feature: MA Experiment ID: 20000184 Result: Down-regulated in Transcription
  misc_feature: MA Experiment 20000184 PARAMETER Experiment Name: At_Shoots__P Parameter: Age (day) Value: 7
  misc_feature: MA Experiment 20000184 PARAMETER Experiment Name: At_Shoots__P Parameter: Tissue Value: Shoots vs. Whole Plant
  misc_feature: MA Experiment ID: 20000437 Result: Up-regulated in Transcription
  misc_feature: MA Experiment 20000437 PARAMETER Experiment Name: At_Drought_P Parameter: Age (day) Value: 8
  misc_feature: MA Experiment 20000437 PARAMETER Experiment Name: At_Drought_P Parameter: Organism Value: A. thaliana
  misc_feature: MA Experiment 20000437 PARAMETER Experiment Name: At_Drought_P Parameter: Plant Line Value: WS
  misc_feature: MA Experiment 20000437 PARAMETER Experiment Name: At_Drought_P Parameter: Timepoint (hr) Value: 24
  misc_feature: MA Experiment 20000437 PARAMETER Experiment Name: At_Drought_P Parameter: Tissue Value: Whole Plant
  misc_feature: MA Experiment 20000437 PARAMETER Experiment Name: At_Drought_P Parameter: Treatment Value: Drought vs. No Drought
  misc_feature: Pfam Name: Mod_r Pfam Description: Modifier of rudimentary (Mod(r)) protein
atgttcaatttctggggatcaaaagaccaacaacaagggcaatctcgtcctcaggaagcttcttcacagtcgccatggtactcgccttctttagttagctcgccaagctcatcccggcctcaaagttcaggtcagatttcagcacaagtatcaccgggtgaagcagctggcattatcgtcttcttgaaagacaaaagcgtggatgaactcaggaagcttctctctgacaaagatgcgtatcagcaatttctgctctctcttgaccaggtcaaagtccagaataatatcaaagatgagctccgtagagaaacattgcagctagctagagacaacttggagaaggagccacagataatggagctcagaaaccaatgcagaattatccgtacaactgagctcgcaactgcgcaagaaaagcttaatgagcttgagaggcaaaaagaagagatcctcaaattctactcccctggttctcttcttcataaacttcaagaggctatgaatcaggtggatgaagaatccgaagccctgcaagaaaagttcctagagaaggagattgatacagcagcatttgtgcagaaatacaagaagcttcgtactacctatcatcgacgagcattgatccatcttgccgctaaaacgtcaaacatttga

SEQ ID NO: 72435 - protein, 217 aa, Arabidopsis thaliana
  peptide (1)..(217): Ceres Seq. ID no. 4933354
  misc_feature: Pfam Name: Mod_r Pfam Description: Modifier of rudimentary (Mod(r)) protein
  misc_feature (1)..(217): Homolog of NCBI NO: 15231750 NR Description: putative protein; protein id: At3g53120.1
  misc_feature (1)..(133): Homolog of NCBI NO: 30686871 NR Description: expressed protein [Arabidopsis thaliana]
  misc_feature (1)..(124): Homolog of NCBI NO: 30686868 NR Description: expressed protein [Arabidopsis thaliana] At2g36680/F13K3.8 [Arabidopsis thaliana]
  misc_feature (1)..(133): Homolog of NCBI NO: 25408498 NR Description: hypothetical protein At2g36680 [imported] - thaliana >gi|4415913|gb|AAD20144.1| unknown protein [Arabidopsis
  misc_feature (62)..(205): Homolog of NCBI NO: 21739818 NR Description: hypothetical protein [Homo sapiens]
  misc_feature (62)..(205): Homolog of NCBI NO: 31088908 NR Description: RIKEN cDNA 5730409F24 [Mus musculus]
  misc_feature (62)..(206): Homolog of NCBI NO: 39645505 NR Description: Unknown (protein for MGC:77637) [Danio rerio]
  misc_feature (62)..(206): Homolog of NCBI NO: 37590372 NR Description: Unknown (protein for MGC:73244) [Danio rerio]
  misc_feature (62)..(205): Homolog of NCBI NO: 34861617 NR Description: similar to RIKEN cDNA 5730409F24 [Rattus
  misc_feature (62)..(206): Homolog of NCBI NO: 18490855 NR Description: Similar to RIKEN cDNA 4930592A21 gene [Homo
MFNFWGSKDQQQGQSRPQEASSQSPWYSPSLVSSPSSSRPQSSGQISAQVSPGEAAGIIVFLKDKSVDELRKLLSDKDAYQQFLLSLDQVKVQNNIKDELRRETLQLARDNLEKEPQIMELRNQCRIIRTTELATAQEKLNELERQKEEILKFYSPGSLLHKLQEAMNQVDEESEALQEKFLEKEIDTAAFVQKYKKLRTTYHRRALIHLAAKTSNI

SEQ ID NO: 72436 - DNA, 948 bp, Arabidopsis thaliana
  misc_feature (1)..(948): Ceres Seq. ID no. 4933359
  misc_feature: MA Experiment ID: 20000184 Result: Up-regulated in Transcription
  misc_feature: MA Experiment 20000184 PARAMETER Experiment Name: At_Shoots__P Parameter: Age (day) Value: 7
  misc_feature: MA Experiment 20000184 PARAMETER Experiment Name: At_Shoots__P Parameter: Tissue Value: Shoots vs. Whole Plant
  misc_feature: MA Experiment ID: 20000185 Result: Up-regulated in Transcription
  misc_feature: MA Experiment 20000185 PARAMETER Experiment Name: At_Roots__P Parameter: Age (day) Value: 7 vs. 21
  misc_feature: MA Experiment 20000185 PARAMETER Experiment Name: At_Roots__P Parameter: Organism Value: A. thaliana
  misc_feature: MA Experiment 20000185 PARAMETER Experiment Name: At_Roots__P Parameter: Tissue Value: Roots vs. Whole Plant
  misc_feature: MA Experiment ID: 20000227 Result: Down-regulated in Transcription
  misc_feature: MA Experiment 20000227 PARAMETER Experiment Name: At_Root-Tips-vs-Tops_P Parameter: Tissue Value: Root Tips vs. Root Tops
  misc_feature: MA Experiment ID: 20000439 Result: Up-regulated in Transcription
  misc_feature: MA Experiment 20000439 PARAMETER Experiment Name: At_Roots__P Parameter: Age (day) Value: 14 vs. 21
  misc_feature: MA Experiment 20000439 PARAMETER Experiment Name: At_Roots__P Parameter: Organism Value: A. thaliana
  misc_feature: MA Experiment 20000439 PARAMETER Experiment Name: At_Roots__P Parameter: Tissue Value: Roots vs. Whole Plant
  misc_feature: MA Experiment ID: 20000495 Result: Up-regulated in Transcription
  misc_feature: MA Experiment 20000495 PARAMETER Experiment Name: At_Guard_Cells_P Parameter: Harvest Date Value: 8/2/2002
  misc_feature: MA Experiment 20000495 PARAMETER Experiment Name: At_Guard_Cells_P Parameter: Organism Value: A. thaliana
  misc_feature: MA Experiment 20000495 PARAMETER Experiment Name: At_Guard_Cells_P Parameter: Tissue Value: Guard Cells vs. Leaves
  misc_feature: MA Experiment ID: 20000794 Result: Down-regulated in Transcription
  misc_feature: MA Experiment 20000794 PARAMETER Experiment Name: At_Petals_P Parameter: Age (day) Value: 23-25 days
  misc_feature: MA Experiment 20000794 PARAMETER Experiment Name: At_Petals_P Parameter: Plant Line Value: WS
  misc_feature: MA Experiment 20000794 PARAMETER Experiment Name: At_Petals_P Parameter: Tissue Value: Petals vs. Whole plant
  misc_feature: MA Experiment ID: 20001248 Result: Down-regulated in Transcription
  misc_feature: MA Experiment 20001248 PARAMETER Experiment Name: At_Far-red-induction_P Parameter: Age (day) Value: 7
  misc_feature: MA Experiment 20001248 PARAMETER Experiment Name: At_Far-red-induction_P Parameter: Light Value: Far-red vs. White
  misc_feature: MA Experiment 20001248 PARAMETER Experiment Name: At_Far-red-induction_P Parameter: Organism Value: A. thaliana
  misc_feature: MA Experiment 20001248 PARAMETER Experiment Name: At_Far-red-induction_P Parameter: Plant Line Value: Columbia
  misc_feature: MA Experiment 20001248 PARAMETER Experiment Name: At_Far-red-induction_P Parameter: Timepoint (hr) Value: 4
  misc_feature: MA Experiment 20001248 PARAMETER Experiment Name: At_Far-red-induction_P Parameter: Tissue Value: Whole Plant
  misc_feature: MA Experiment ID: 20001557 Result: Down-regulated in Transcription
  misc_feature: MA Experiment 20001557 PARAMETER Experiment Name: At_Drought_Soil_Dry_P Parameter: Age (day) Value: 27
  misc_feature: MA Experiment 20001557 PARAMETER Experiment Name: At_Drought_Soil_Dry_P Parameter: Organism Value: A. thaliana
  misc_feature: MA Experiment 20001557 PARAMETER Experiment Name: At_Drought_Soil_Dry_P Parameter: Plant Line Value: WS
  misc_feature: MA Experiment 20001557 PARAMETER Experiment Name: At_Drought_Soil_Dry_P Parameter: Post Timepoint (hr) Value: 3
  misc_feature: MA Experiment 20001557 PARAMETER Experiment Name: At_Drought_Soil_Dry_P Parameter: Post-Treatment Value: Re-Water vs. No Drought
  misc_feature: MA Experiment 20001557 PARAMETER Experiment Name: At_Drought_Soil_Dry_P Parameter: Timepoint (day) Value: 13
  misc_feature: MA Experiment 20001557 PARAMETER Experiment Name: At_Drought_Soil_Dry_P Parameter: Treatment Value: Drought vs. No Drought
  misc_feature: MA Experiment ID: 20001905 Result: Down-regulated in Transcription
  misc_feature: MA Experiment 20001905 PARAMETER Experiment Name: At_Drought_Reproduction_P Parameter: Age (day) Value: 40
  misc_feature: MA Experiment 20001905 PARAMETER Experiment Name: At_Drought_Reproduction_P Parameter: Organism Value: A. thaliana
  misc_feature: MA Experiment 20001905 PARAMETER Experiment Name: At_Drought_Reproduction_P Parameter: Plant Line Value: WS
  misc_feature: MA Experiment 20001905 PARAMETER Experiment Name: At_Drought_Reproduction_P Parameter: Timepoint (day) Value: 10
  misc_feature: MA Experiment 20001905 PARAMETER Experiment Name: At_Drought_Reproduction_P Parameter: Tissue Value: Rosettes
  misc_feature: MA Experiment 20001905 PARAMETER Experiment Name: At_Drought_Reproduction_P Parameter: Treatment Value: Drought vs. No Drought
  misc_feature: MA Experiment ID: 20001906 Result: Down-regulated in Transcription
  misc_feature: MA Experiment 20001906 PARAMETER Experiment Name: At_Drought_Reproduction_P Parameter: Age (day) Value: 35
  misc_feature: MA Experiment 20001906 PARAMETER Experiment Name: At_Drought_Reproduction_P Parameter: Organism Value: A. thaliana
  misc_feature: MA Experiment 20001906 PARAMETER Experiment Name: At_Drought_Reproduction_P Parameter: Plant Line Value: WS
  misc_feature: MA Experiment 20001906 PARAMETER Experiment Name: At_Drought_Reproduction_P Parameter: Timepoint (day) Value: 5
  misc_feature: MA Experiment 20001906 PARAMETER Experiment Name: At_Drought_Reproduction_P Parameter: Tissue Value: Siliques
  misc_feature: MA Experiment 20001906 PARAMETER Experiment Name: At_Drought_Reproduction_P Parameter: Treatment Value: Drought vs. No Drought
atgagagtttcggggtttagagttcttctcttggtttcttgtttcttctgcaaatccaaaggagctgttgttcctgcactcatcatgtttggcgactccattgttgacgttggcaacaacaataacttactcagcattgtcaaatccaactttcttccttacggtagagacttcatcgaccaaagacccaccggaagattctgcaacggaaaactcgctgtagatttctcagccgagtaccttggtttctcttcatacccacctgcattcctaagccgggaagcaagcaacgagaatatcctgatcggtgccaactttgcatcagcttcttcaggatactatgatgccacatctgttccatttggctcgatctccttaacacgacagctgagctattacagggcgtatcaaaatagagtaacgagaatgatcgggagggggaacgcgcgcatactgttctctagaggtatccacattttgagtgcgggatctagcgactttcttcagaattattacatcaatcctctactcaacatcctaaatacacctgatcagttcgctgacattctcctgagatccttctcagaattcatccagaatctgtatgaactaggagcaaggagaatcggagtgatatcgctaccgccgatgggttgcctgcctgcagctatcactcttttcggtgcaggaaacaaaagttgtgttgagagactgaacaatgatgctatcatgttcaatactaaacttgagaacacaacccggttactgatgaatagacactcaggcctcagactcgtcgcctttaatgtctaccaacctttcctggacatcatcaccaacccaactgacaatggatatgtgttttgggatggatttcatcccacagaggctgtaaacgagctgttggctggtcaactactgggtcaagggatttctctaatcaattga

SEQ ID NO: 72437 - protein, 315 aa, Arabidopsis thaliana
  peptide (1)..(315): Ceres Seq. ID no. 4933360
  misc_feature (27)..(306): Pfam Name: GDSL-like Lipase/Acylhydrolase Pfam Description: GDSL-like Lipase/Acylhydrolase
  misc_feature (1)..(315): Homolog of NCBI NO: 11280580 NR Description: hypothetical protein T4D2.30 - Arabidopsis >gi|6630730|emb|CAB64213.1| putative protein [Arabidopsis
  misc_feature (1)..(286): Homolog of NCBI NO: 30693763 NR Description: GDSL-motif lipase/hydrolase protein [Arabidopsis
  misc_feature (285)..(315): Homolog of NCBI NO: 30693763 NR Description: GDSL-motif lipase/hydrolase protein [Arabidopsis
  misc_feature (9)..(286): Homolog of NCBI NO: 9758010 NR Description: proline-rich protein APG-like [Arabidopsis
  misc_feature (275)..(315): Homolog of NCBI NO: 9758010 NR Description: proline-rich protein APG-like [Arabidopsis
  misc_feature (11)..(286): Homolog of NCBI NO: 15237531 NR Description: putative protein; protein id: At5g03820.1
  misc_feature (279)..(315): Homolog of NCBI NO: 15237531 NR Description: putative protein; protein id: At5g03820.1
  misc_feature (31)..(286): Homolog of NCBI NO: 15237528 NR Description: putative protein; protein id: At5g03810.1
  misc_feature (275)..(315): Homolog of NCBI NO: 15237528 NR Description: putative protein; protein id: At5g03810.1
  misc_feature (23)..(286): Homolog of NCBI NO: 15237137 NR Description: GDSL-motif lipase/hydrolase-like protein; protein
MRVSGFRVLLLVSCFFCKSKGAVVPALIMFGDSIVDVGNNNNLLSIVKSNFLPYGRDFIDQRPTGRFCNGKLAVDFSAEYLGFSSYPPAFLSREASNENILIGANFASASSGYYDATSVPFGSISLTRQLSYYRAYQNRVTRMIGRGNARILFSRGIHILSAGSSDFLQNYYINPLLNILNTPDQFADILLRSFSEFIQNLYELGARRIGVISLPPMGCLPAAITLFGAGNKSCVERLNNDAIMFNTKLENTTRLLMNRHSGLRLVAFNVYQPFLDIITNPTDNGYVFWDGFHPTEAVNELLAGQLLGQGISLIN

SEQ ID NO: 72438 - protein, 287 aa, Arabidopsis thaliana
  peptide (1)..(287): Ceres Seq. ID no. 4933361
  misc_feature (1)..(278): Pfam Name: GDSL-like Lipase/Acylhydrolase Pfam Description: GDSL-like Lipase/Acylhydrolase
  misc_feature (1)..(287): Homolog of NCBI NO: 11280580 NR Description: hypothetical protein T4D2.30 - Arabidopsis >gi|6630730|emb|CAB64213.1| putative protein [Arabidopsis
  misc_feature (1)..(258): Homolog of NCBI NO: 30693763 NR Description: GDSL-motif lipase/hydrolase protein [Arabidopsis
  misc_feature (257)..(287): Homolog of NCBI NO: 30693763 NR Description: GDSL-motif lipase/hydrolase protein [Arabidopsis
  misc_feature (1)..(258): Homolog of NCBI NO: 9758010 NR Description: proline-rich protein APG-like [Arabidopsis
  misc_feature (247)..(287): Homolog of NCBI NO: 9758010 NR Description: proline-rich protein APG-like [Arabidopsis
  misc_feature (1)..(258): Homolog of NCBI NO: 15237531 NR Description: putative protein; protein id: At5g03820.1
  misc_feature (251)..(287): Homolog of NCBI NO: 15237531 NR Description: putative protein; protein id: At5g03820.1
  misc_feature (3)..(258): Homolog of NCBI NO: 15237528 NR Description: putative protein; protein id: At5g03810.1
  misc_feature (247)..(287): Homolog of NCBI NO: 15237528 NR Description: putative protein; protein id: At5g03810.1
  misc_feature (1)..(258): Homolog of NCBI NO: 15237137 NR Description: GDSL-motif lipase/hydrolase-like protein; protein
MFGDSIVDVGNNNNLLSIVKSNFLPYGRDFIDQRPTGRFCNGKLAVDFSAEYLGFSSYPPAFLSREASNENILIGANFASASSGYYDATSVPFGSISLTRQLSYYRAYQNRVTRMIGRGNARILFSRGIHILSAGSSDFLQNYYINPLLNILNTPDQFADILLRSFSEFIQNLYELGARRIGVISLPPMGCLPAAITLFGAGNKSCVERLNNDAIMFNTKLENTTRLLMNRHSGLRLVAFNVYQPFLDIITNPTDNGYVFWDGFHPTEAVNELLAGQLLGQGISLIN

SEQ ID NO: 72439 - protein, 173 aa, Arabidopsis thaliana
  peptide (1)..(173): Ceres Seq. ID no. 4933362
  misc_feature (1)..(164): Pfam Name: GDSL-like Lipase/Acylhydrolase Pfam Description: GDSL-like Lipase/Acylhydrolase
  misc_feature (1)..(173): Homolog of NCBI NO: 11280580 NR Description: hypothetical protein T4D2.30 - Arabidopsis >gi|6630730|emb|CAB64213.1| putative protein [Arabidopsis
  misc_feature (1)..(144): Homolog of NCBI NO: 30693763 NR Description: GDSL-motif lipase/hydrolase protein [Arabidopsis
  misc_feature (143)..(173): Homolog of NCBI NO: 30693763 NR Description: GDSL-motif lipase/hydrolase protein [Arabidopsis
  misc_feature (1)..(144): Homolog of NCBI NO: 9758010 NR Description: proline-rich protein APG-like [Arabidopsis
  misc_feature (133)..(173): Homolog of NCBI NO: 9758010 NR Description: proline-rich protein APG-like [Arabidopsis
  misc_feature (1)..(144): Homolog of NCBI NO: 15237531 NR Description: putative protein; protein id: At5g03820.1
  misc_feature (137)..(173): Homolog of NCBI NO: 15237531 NR Description: putative protein; protein id: At5g03820.1
  misc_feature (1)..(144): Homolog of NCBI NO: 15237528 NR Description: putative protein; protein id: At5g03810.1
  misc_feature (133)..(173): Homolog of NCBI NO: 15237528 NR Description: putative protein; protein id: At5g03810.1
  misc_feature (1)..(144): Homolog of NCBI NO: 15237137 NR Description: GDSL-motif lipase/hydrolase-like protein; protein
MIGRGNARILFSRGIHILSAGSSDFLQNYYINPLLNILNTPDQFADILLRSFSEFIQNLYELGARRIGVISLPPMGCLPAAITLFGAGNKSCVERLNNDAIMFNTKLENTTRLLMNRHSGLRLVAFNVYQPFLDIITNPTDNGYVFWDGFHPTEAVNELLAGQLLGQGISLIN

SEQ ID NO: 72440 - DNA, 1179 bp, Arabidopsis thaliana
  misc_feature (1)..(1179): Ceres Seq. ID no. 4933703
  misc_feature: MA Experiment ID: 20000173 Result: Down-regulated in Transcription
  misc_feature: MA Experiment 20000173 PARAMETER Experiment Name: At_42deg_Heat_P Parameter: Age (day) Value: 14
  misc_feature: MA Experiment 20000173 PARAMETER Experiment Name: At_42deg_Heat_P Parameter: Organism Value: A. thaliana
  misc_feature: MA Experiment 20000173 PARAMETER Experiment Name: At_42deg_Heat_P Parameter: Plant Line Value: WS
  misc_feature: MA Experiment 20000173 PARAMETER Experiment Name: At_42deg_Heat_P Parameter: Temperature (deg C) Value: 42 vs. 22
  misc_feature: MA Experiment 20000173 PARAMETER Experiment Name: At_42deg_Heat_P Parameter: Timepoint (hr) Value: 6
  misc_feature: MA Experiment 20000173 PARAMETER Experiment Name: At_42deg_Heat_P Parameter: Tissue Value: Aerial
  misc_feature: MA Experiment ID: 20000184 Result: Down-regulated in Transcription
  misc_feature: MA Experiment 20000184 PARAMETER Experiment Name: At_Shoots__P Parameter: Age (day) Value: 7
  misc_feature: MA Experiment 20000184 PARAMETER Experiment Name: At_Shoots__P Parameter: Tissue Value: Shoots vs. Whole Plant
  misc_feature: MA Experiment ID: 20000213 Result: Up-regulated in Transcription
  misc_feature: MA Experiment 20000213 PARAMETER Experiment Name: At_4deg_Cold_P Parameter: Timepoint (hr) Value: 2
  misc_feature: MA Experiment ID: 20000227 Result: Down-regulated in Transcription
  misc_feature: MA Experiment 20000227 PARAMETER Experiment Name: At_Root-Tips-vs-Tops_P Parameter: Tissue Value: Root Tips vs. Root Tops
  misc_feature: MA Experiment ID: 20000438 Result: Down-regulated in Transcription
  misc_feature: MA Experiment 20000438 PARAMETER Experiment Name: At_Shoots__P Parameter: Age (day) Value: 14
  misc_feature: MA Experiment 20000438 PARAMETER Experiment Name: At_Shoots__P Parameter: Tissue Value: Shoots vs. Whole Plant
  misc_feature: MA Experiment ID: 20000441 Result: Down-regulated in Transcription
  misc_feature: MA Experiment 20000441 PARAMETER Experiment Name: At_1uM_BR-BRZ__P Parameter: Tissue Value: Shoot Apices
  misc_feature: MA Experiment 20000441 PARAMETER Experiment Name: At_1uM_BR-BRZ__P Parameter: Treatment Value: 1uM BR vs. No Treatment
  misc_feature: MA Experiment ID: 20001247 Result: Down-regulated in Transcription
  misc_feature: MA Experiment 20001247 PARAMETER Experiment Name: At_Far-red-induction_P Parameter: Age (day) Value: 7
  misc_feature: MA Experiment 20001247 PARAMETER Experiment Name: At_Far-red-induction_P Parameter: Light Value: Far-red vs. White
  misc_feature: MA Experiment 20001247 PARAMETER Experiment Name: At_Far-red-induction_P Parameter: Organism Value: A. thaliana
  misc_feature: MA Experiment 20001247 PARAMETER Experiment Name: At_Far-red-induction_P Parameter: Plant Line Value: Columbia
  misc_feature: MA Experiment 20001247 PARAMETER Experiment Name: At_Far-red-induction_P Parameter: Timepoint (hr) Value: 1
  misc_feature: MA Experiment 20001247 PARAMETER Experiment Name: At_Far-red-induction_P Parameter: Tissue Value: Whole Plant
  misc_feature: MA Experiment ID: 20001248 Result: Up-regulated in Transcription
  misc_feature: MA Experiment 20001248 PARAMETER Experiment Name: At_Far-red-induction_P Parameter: Age (day) Value: 7
  misc_feature: MA Experiment 20001248 PARAMETER Experiment Name: At_Far-red-induction_P Parameter: Light Value: Far-red vs. White
  misc_feature: MA Experiment 20001248 PARAMETER Experiment Name: At_Far-red-induction_P Parameter: Organism Value: A. thaliana
  misc_feature: MA Experiment 20001248 PARAMETER Experiment Name: At_Far-red-induction_P Parameter: Plant Line Value: Columbia
  misc_feature: MA Experiment 20001248 PARAMETER Experiment Name: At_Far-red-induction_P Parameter: Timepoint (hr) Value: 4
  misc_feature: MA Experiment 20001248 PARAMETER Experiment Name: At_Far-red-induction_P Parameter: Tissue Value: Whole Plant
atggcttttaagaaaaggaatgaaatttgcaagaatcttcttcctagcagtagtggtctcgatgatcttcatctctcgagctgtaaatcttcatcatcagctacagctcataagacagaaggagaaatccttagctcaacgaccgtcaaaagctttagctttaatgaacttaaactcgctactagaaacttcagatcggactctgttgttggagaaggtggctttggttgtgtctttagaggttggcttgatgagactactcttactcctaccaaatctagctctggtcttgttattgctgttaaacgacttaaccctgatggttttcaaggtcaccgagaatggctgacagagattaactatttggggcagttaagtcacccgaatttggttaaattgattggttattgcttggaagatgaacaacggcttcttgtgtatgagtttatgcacaagggtagtcttgagaatcatctgtttgcaaatggaaataaggattttaagccgctatcttggattctacggattaaggttgcacttgatgcagctaaaggtcttgcatttcttcatagtgatcccgtcaaagtcatttacagagacatcaaggcgtcaaacatcttactggactcggacttcaacgcaaagctttcagactttggtttagcgagagacggtccaatgggagaacaaagttatgttagtacaagggtcatgggtacttttgggtacgcagctcctgagtatgtctcaacaggccacttaaatgctagaagcgacgtatacagtttcggggttgttctgctagaactactatgtggaaggcaagcactagaccataaccgcccggccaaggagcaaaaccttgtggattgggctcgaccatacctcacaagcaggcgaaaggttctactaattgtggacactcggcttaactcacagtacaaacccgaaggagcagtgagactggcaagcattgctgtgcaatgcctatcattcgaacccaaatcacgtccgaccatggaccaagtggttcgagccttggtacagctgcaagacagcgtggttaaaccggccaatgttgacccgcttaaggttaaggataccaagaaacttgtgggattgaaaacagaagacaagtaccagagaaacggtttaaacaaaaaaaccgttggattgtag

SEQ ID NO: 72441 - protein, 392 aa, Arabidopsis thaliana
  peptide (1)..(392): Ceres Seq. ID no. 4933704
  misc_feature (1)..(392): Homolog of NCBI NO: 11259786 NR Description: serine/threonine-specific protein kinase-like -
  misc_feature (16)..(392): Homolog of NCBI NO: 28058890 NR Description: serine/threonine-specific protein kinase -like
  misc_feature (16)..(392): Homolog of NCBI NO: 30694253 NR Description: serine/threonine-specific protein kinase -related
  misc_feature (17)..(376): Homolog of NCBI NO: 15225520 NR Description: putative protein kinase; protein id: At2g39660.1, by cDNA: gi_13272430, supported by cDNA: gi_17064833, supported cDNA: gi_18086423, supported by cDNA: gi_20259859, supported by
  misc_feature (25)..(353): Homolog of NCBI NO: 34906046 NR Description: putative serine/threonine-specific protein kinase
  misc_feature (10)..(373): Homolog of NCBI NO: 14719339 NR Description: putative protein kinase [Oryza sativa]
  misc_feature (16)..(353): Homolog of NCBI NO: 34897424 NR Description: putative protein kinase [Oryza sativa (japonica group)] >gi|27545044|gb|AAO18450.1| putative protein kinase
  misc_feature (7)..(350): Homolog of NCBI NO: 166809 NR Description: protein kinase
  misc_feature (7)..(350): Homolog of NCBI NO: 15241749 NR Description: serine/threonine-specific protein kinase NAK; id: At5g02290.1, supported by cDNA: 27477., supported by cDNA:
  misc_feature (16)..(351): Homolog of NCBI NO: 15227001 NR Description: putative protein kinase; protein id: At2g28930.1
MAFKKRNEICKNLLPSSSGLDDLHLSSCKSSSSATAHKTEGEILSSTTVKSFSFNELKLATRNFRSDSVVGEGGFGCVFRGWLDETTLTPTKSSSGLVIAVKRLNPDGFQGHREWLTEINYLGQLSHPNLVKLIGYCLEDEQRLLVYEFMHKGSLENHLFANGNKDFKPLSWILRIKVALDAAKGLAFLHSDPVKVIYRDIKASNILLDSDFNAKLSDFGLARDGPMGEQSYVSTRVMGTFGYAAPEYVSTGHLNARSDVYSFGVVLLELLCGRQALDHNRPAKEQNLVDWARPYLTSRRKVLLIVDTRLNSQYKPEGAVRLASIAVQCLSFEPKSRPTMDQVVRALVQLQDSVVKPANVDPLKVKDTKKLVGLKTEDKYQRNGLNKKTVGL

SEQ ID NO: 72442 - protein, 243 aa, Arabidopsis thaliana
  peptide (1)..(243): Ceres Seq. ID no. 4933705
  misc_feature (1)..(243): Homolog of NCBI NO: 11259786 NR Description: serine/threonine-specific protein kinase-like -
  misc_feature (1)..(243): Homolog of NCBI NO: 28058890 NR Description: serine/threonine-specific protein kinase -like
  misc_feature (1)..(243): Homolog of NCBI NO: 30694253 NR Description: serine/threonine-specific protein kinase -related
  misc_feature (1)..(227): Homolog of NCBI NO: 15225520 NR Description: putative protein kinase; protein id: At2g39660.1, by cDNA: gi_13272430, supported by cDNA: gi_17064833, supported cDNA: gi_18086423, supported by cDNA: gi_20259859, supported by
  misc_feature (1)..(204): Homolog of NCBI NO: 34906046 NR Description: putative serine/threonine-specific protein kinase
  misc_feature (1)..(224): Homolog of NCBI NO: 14719339 NR Description: putative protein kinase [Oryza sativa]
  misc_feature (1)..(204): Homolog of NCBI NO: 34897424 NR Description: putative protein kinase [Oryza sativa (japonica group)] >gi|27545044|gb|AAO18450.1| putative protein kinase
  misc_feature (1)..(201): Homolog of NCBI NO: 166809 NR Description: protein kinase
  misc_feature (1)..(201): Homolog of NCBI NO: 15241749 NR Description: serine/threonine-specific protein kinase NAK; id: At5g02290.1, supported by cDNA: 27477., supported by cDNA:
  misc_feature (1)..(202): Homolog of NCBI NO: 15227001 NR Description: putative protein kinase; protein id: At2g28930.1
MHKGSLENHLFANGNKDFKPLSWILRIKVALDAAKGLAFLHSDPVKVIYRDIKASNILLDSDFNAKLSDFGLARDGPMGEQSYVSTRVMGTFGYAAPEYVSTGHLNARSDVYSFGVVLLELLCGRQALDHNRPAKEQNLVDWARPYLTSRRKVLLIVDTRLNSQYKPEGAVRLASIAVQCLSFEPKSRPTMDQVVRALVQLQDSVVKPANVDPLKVKDTKKLVGLKTEDKYQRNGLNKKTVGL

SEQ ID NO: 72443 - DNA, 2412 bp, Arabidopsis thaliana
  misc_feature (1)..(2412): Ceres Seq. ID no. 4933882
  misc_feature: MA Experiment ID: 20000314 Result: Down-regulated in Transcription
  misc_feature: MA Experiment 20000314 PARAMETER Experiment Name: At_14day_Shoots-Roots_Sub_P Parameter: Age (day) Value: 14
  misc_feature: MA Experiment 20000314 PARAMETER Experiment Name: At_14day_Shoots-Roots_Sub_P Parameter: Organism Value: A. thaliana
  misc_feature: MA Experiment 20000314 PARAMETER Experiment Name: At_14day_Shoots-Roots_Sub_P Parameter: Plant Line Value: WS
  misc_feature: MA Experiment 20000314 PARAMETER Experiment Name: At_14day_Shoots-Roots_Sub_P Parameter: Tissue Value: Roots vs. Whole Plant
  misc_feature: MA Experiment ID: 20000315 Result: Down-regulated in Transcription
  misc_feature: MA Experiment 20000315 PARAMETER Experiment Name: At_14day_Shoots-Roots_Sub_P Parameter: Age (day) Value: 14
  misc_feature: MA Experiment 20000315 PARAMETER Experiment Name: At_14day_Shoots-Roots_Sub_P Parameter: Organism Value: A. thaliana
  misc_feature: MA Experiment 20000315 PARAMETER Experiment Name: At_14day_Shoots-Roots_Sub_P Parameter: Plant Line Value: WS
  misc_feature: MA Experiment 20000315 PARAMETER Experiment Name: At_14day_Shoots-Roots_Sub_P Parameter: Tissue Value: Shoots vs. Whole Plant
  misc_feature: MA Experiment ID: 20000327 Result: Down-regulated in Transcription
  misc_feature: MA Experiment 20000327 PARAMETER Experiment Name: At_42deg_Heat_Sub_P Parameter: Age (day) Value: 14
  misc_feature: MA Experiment 20000327 PARAMETER Experiment Name: At_42deg_Heat_Sub_P Parameter: Organism Value: A. thaliana
  misc_feature: MA Experiment 20000327 PARAMETER Experiment Name: At_42deg_Heat_Sub_P Parameter: Plant Line Value: WS
  misc_feature: MA Experiment 20000327 PARAMETER Experiment Name: At_42deg_Heat_Sub_P Parameter: Temperature (deg C) Value: 42 vs. 22
  misc_feature: MA Experiment 20000327 PARAMETER Experiment Name: At_42deg_Heat_Sub_P Parameter: Timepoint (hr) Value: 1
  misc_feature: MA Experiment 20000327 PARAMETER Experiment Name: At_42deg_Heat_Sub_P Parameter: Tissue Value: Aerial
  misc_feature: MA Experiment ID: 20000328 Result: Down-regulated in Transcription
  misc_feature: MA Experiment 20000328 PARAMETER Experiment Name: At_42deg_Heat_Sub_P Parameter: Age (day) Value: 14
  misc_feature: MA Experiment 20000328 PARAMETER Experiment Name: At_42deg_Heat_Sub_P Parameter: Organism Value: A. thaliana
  misc_feature: MA Experiment 20000328 PARAMETER Experiment Name: At_42deg_Heat_Sub_P Parameter: Plant Line Value: WS
  misc_feature: MA Experiment 20000328 PARAMETER Experiment Name: At_42deg_Heat_Sub_P Parameter: Temperature (deg C) Value: 42 vs. 22
  misc_feature: MA Experiment 20000328 PARAMETER Experiment Name: At_42deg_Heat_Sub_P Parameter: Timepoint (hr) Value: 6
  misc_feature: MA Experiment 20000328 PARAMETER Experiment Name: At_42deg_Heat_Sub_P Parameter: Tissue Value: Aerial
atgattgttttgggtataaaacccgataattatgcgttccctgctttgctaaaggctgtagcagatcttcaggacatggaactggggaaacagattcatgcccatgtgtataaatttgggtacggtgtggattccgtgactgtggctaatacccttgtgaatttgtatagaaagtgtggagatttcggagctgtctataaggtgttcgatagaatatctgagagaaaccaagtctcttggaattctttaatttcttctttgtgtagttttgagaagtgggaaatggcgttagaggcatttcggtgtatgttggatgaaaatgtggaacctagttcgtttaccttggtgagtgtggttactgcttgttcgaatttgcctatgcctgagggattaatgatgggtaagcaggttcacgcctatggtttgagaaagggtgaattgaattcgtttataatcaacacattggtggctatgtatggtaaactgggaaaattagcatcttctaaagtcttacttggttcttttggaggccgtgacttggtcacatggaacactgtgttgagctcgttatgtcagaacgagcagttgcttgaagcattggaatatttgcgtgaaatggtgcttgaaggtgttgaaccagatgagttcactatttcaagtgttcttcctgcttgttcacacttggagatgcttcgcacagggaaagaattgcatgcttatgctttgaaaaatggctctttggatgagaattcctttgttggtagtgctttggttgacatgtattgcaattgcaagcaagtgttgagtggtcgtcgagtatttgatggaatgtttgatagaaagattggtctgtggaatgctatgatcgctgggtattcccagaatgagcatgacaaggaagcgttgttgcttttcattggaatggaagaaagtgctgggcttctggctaactctaccacaatggcaggtgttgttcctgcttgtgtccgttctggtgcgttctctagaaaggaagctatccatggatttgttgtgaagagaggtttagatagagacaggtttgtgcagaatacactgatggatatgtattctaggctgggaaagatcgatatcgccatgcggatattcggtaaaatggaagatagagatttagttacgtggaacacgatgattacgggttatgtattctcagaacaccatgaggacgcacttctcctgctacacaagatgcaaaaccttgaaagaaaagtgagcaagggggctagccgagttagtcttaaacctaattccatcactctgatgacaatccttcccagttgtgctgcactatcagcattagcaaaaggaaaagaaattcatgcttatgccatcaagaacaatttggcaactgatgtggctgtcggaagcgctttagttgacatgtacgcaaaatgcgggtgcctacagatgtcgagaaaagtgtttgatcagattccacaaaaaaatgttattacttggaatgtgattataatggcttacgggatgcatggaaacggtcaagaagccatagatctgctaagaatgatgatggttcagggagtaaaaccaaacgaggttacattcatctcagtatttgcagcttgtagccactcaggcatggtggatgaaggattaaggatattctatgttatgaaacccgactacggggttgaaccaagctcagatcattatgcttgtgttgtagatttgcttggaagggctggtagaattaaagaagcatatcaactcatgaatatgatgcctcgtgatttcaacaaagctggagcatggagtagcctccttggtgccagtcggattcacaataacctagaaattggagaaattgctgctcaaaatctcattcaactggaaccaaatgtagctagtcactatgtgttacttgccaatatttattcatcagcaggcctctgggataaagcaacagaggtaagaagaaatatgaaagagcaaggcgtgagaaaagaacctggatgtagctggattgagcatggcgatgaagtacataaatttgtagccggtgactcatctcacccgcaaagcgaaaagctcagtggatatctcgagacattgtgggagagaatgagaaaagaaggatatgtacctgacacatcttgtgtactccacaatgtagaggaagatgaaaaagagattctgctttgtggacacagtgagaagctagcaattgcgtttgggatacttaacacatcacccggtacaattattagggtggctaaaaacctcagggtttgtaatgattgtcatcttgcaaccaagtttatctcaaagattgttgatagagaaatcatcttgagagatgttaggaggtttcatcgtttcaagaatggaacttgctcctgtggagactattggtga

SEQ ID NO: 72444 - protein, 803 aa, Arabidopsis thaliana
  peptide (1)..(803): Ceres Seq. ID no. 4933883
  misc_feature (78)..(112): Pfam Name: PPR repeat Pfam Description: PPR repeat
  misc_feature (25)..(803): Homolog of NCBI NO: 34915012 NR Description: P0458A05.10 [Oryza sativa (japonica
  misc_feature (30)..(803): Homolog of NCBI NO: 15220337 NR Description: hypothetical protein; protein id: At1g11290.1
  misc_feature (15)..(803): Homolog of NCBI NO: 15234006 NR Description: putative protein; protein id: At4g18750.1
  misc_feature (8)..(803): Homolog of NCBI NO: 18394615 NR Description: hypothetical protein; protein id: At1g18485.1
  misc_feature (5)..(803): Homolog of NCBI NO: 30693150 NR Description: pentatricopeptide (PPR) repeat-containing protein
  misc_feature (42)..(803): Homolog of NCBI NO: 15228590 NR Description: hypothetical protein; protein id: At3g03580.1 thaliana] >gi|6091764|gb|AAF03474.1|AC009327_13 hypothetical [Arabidopsis thaliana] >gi|28393735|gb|AAO42278.1| unknown
  misc_feature (8)..(795): Homolog of NCBI NO: 25402861 NR Description: protein F15H18.4 [imported] - Arabidopsis >gi|6714305|gb|AAF26001.1|AC013354_20 F15H18.4 [Arabidopsis
  misc_feature (255)..(803): Homolog of NCBI NO: 15237421 NR Description: putative protein; protein id: At5g16860.1
  misc_feature (8)..(222): Homolog of NCBI NO: 15237421 NR Description: putative protein; protein id: At5g16860.1
  misc_feature (269)..(803): Homolog of NCBI NO: 15229426 NR Description: hypothetical protein; protein id: At3g23330.1 thaliana] >gi|11994318|dbj|BAB02277.1|
MIVLGIKPDNYAFPALLKAVADLQDMELGKQIHAHVYKFGYGVDSVTVANTLVNLYRKCGDFGAVYKVFDRISERNQVSWNSLISSLCSFEKWEMALEAFRCMLDENVEPSSFTLVSVVTACSNLPMPEGLMMGKQVHAYGLRKGELNSFIINTLVAMYGKLGKLASSKVLLGSFGGRDLVTWNTVLSSLCQNEQLLEALEYLREMVLEGVEPDEFTISSVLPACSHLEMLRTGKELHAYALKNGSLDENSFVGSALVDMYCNCKQVLSGRRVFDGMFDRKIGLWNAMIAGYSQNEHDKEALLLFIGMEESAGLLANSTTMAGVVPACVRSGAFSRKEAIHGFVVKRGLDRDRFVQNTLMDMYSRLGKIDIAMRIFGKMEDRDLVTWNTMITGYVFSEHHEDALLLLHKMQNLERKVSKGASRVSLKPNSITLMTILPSCAALSALAKGKEIHAYAIKNNLATDVAVGSALVDMYAKCGCLQMSRKVFDQIPQKNVITWNVIIMAYGMHGNGQEAIDLLRMMMVQGVKPNEVTFISVFAACSHSGMVDEGLRIFYVMKPDYGVEPSSDHYACVVDLLGRAGRIKEAYQLMNMMPRDFNKAGAWSSLLGASRIHNNLEIGEIAAQNLIQLEPNVASHYVLLANIYSSAGLWDKATEVRRNMKEQGVRKEPGCSWIEHGDEVHKFVAGDSSHPQSEKLSGYLETLWERMRKEGYVPDTSCVLHNVEEDEKEILLCGHSEKLAIAFGILNTSPGTIIRVAKNLRVCNDCHLATKFISKIVDREIILRDVRRFHRFKNGTCSCGDYW

SEQ ID NO: 72445 - protein, 778 aa, Arabidopsis thaliana
  peptide (1)..(778): Ceres Seq. ID no. 4933884
  misc_feature (53)..(87): Pfam Name: PPR repeat Pfam Description: PPR repeat
  misc_feature (1)..(778): Homolog of NCBI NO: 34915012 NR Description: P0458A05.10 [Oryza sativa (japonica
  misc_feature (5)..(778): Homolog of NCBI NO: 15220337 NR Description: hypothetical protein; protein id: At1g11290.1
  misc_feature (1)..(778): Homolog of NCBI NO: 15234006 NR Description: putative protein; protein id: At4g18750.1
  misc_feature (1)..(778): Homolog of NCBI NO: 18394615 NR Description: hypothetical protein; protein id: At1g18485.1
  misc_feature (1)..(778): Homolog of NCBI NO: 30693150 NR Description: pentatricopeptide (PPR) repeat-containing protein
  misc_feature (17)..(778): Homolog of NCBI NO: 15228590 NR Description: hypothetical protein; protein id: At3g03580.1 thaliana] >gi|6091764|gb|AAF03474.1|AC009327_13 hypothetical [Arabidopsis thaliana] >gi|28393735|gb|AAO42278.1| unknown
  misc_feature (1)..(770): Homolog of NCBI NO: 25402861 NR Description: protein F15H18.4 [imported] - Arabidopsis >gi|6714305|gb|AAF26001.1|AC013354_20 F15H18.4 [Arabidopsis
  misc_feature (230)..(778): Homolog of NCBI NO: 15237421 NR Description: putative protein; protein id: At5g16860.1
  misc_feature (1)..(197): Homolog of NCBI NO: 15237421 NR Description: putative protein; protein id: At5g16860.1
  misc_feature (244)..(778): Homolog of NCBI NO: 15229426 NR Description: hypothetical protein; protein id: At3g23330.1 thaliana] >gi|11994318|dbj|BAB02277.1|
MELGKQIHAHVYKFGYGVDSVTVANTLVNLYRKCGDFGAVYKVFDRISERNQVSWNSLISSLCSFEKWEMALEAFRCMLDENVEPSSFTLVSVVTACSNLPMPEGLMMGKQVHAYGLRKGELNSFIINTLVAMYGKLGKLASSKVLLGSFGGRDLVTWNTVLSSLCQNEQLLEALEYLREMVLEGVEPDEFTISSVLPACSHLEMLRTGKELHAYALKNGSLDENSFVGSALVDMYCNCKQVLSGRRVFDGMFDRKIGLWNAMIAGYSQNEHDKEALLLFIGMEESAGLLANSTTMAGVVPACVRSGAFSRKEAIHGFVVKRGLDRDRFVQNTLMDMYSRLGKIDIAMRIFGKMEDRDLVTWNTMITGYVFSEHHEDALLLLHKMQNLERKVSKGASRVSLKPNSITLMTILPSCAALSALAKGKEIHAYAIKNNLATDVAVGSALVDMYAKCGCLQMSRKVFDQIPQKNVITWNVIIMAYGMHGNGQEAIDLLRMMMVQGVKPNEVTFISVFAACSHSGMVDEGLRIFYVMKPDYGVEPSSDHYACVVDLLGRAGRIKEAYQLMNMMPRDFNKAGAWSSLLGASRIHNNLEIGEIAAQNLIQLEPNVASHYVLLANIYSSAGLWDKATEVRRNMKEQGVRKEPGCSWIEHGDEVHKFVAGDSSHPQSEKLSGYLETLWERMRKEGYVPDTSCVLHNVEEDEKEILLCGHSEKLAIAFGILNTSPGTIIRVAKNLRVCNDCHLATKFISKIVDREIILRDVRRFHRFKNGTCSCGDYW

SEQ ID NO: 72446 - protein, 709 aa, Arabidopsis thaliana
  peptide (1)..(709): Ceres Seq. ID no. 4933885
  misc_feature (1)..(709): Homolog of NCBI NO: 34915012 NR Description: P0458A05.10 [Oryza sativa (japonica
  misc_feature (1)..(709): Homolog of NCBI NO: 15220337 NR Description: hypothetical protein; protein id: At1g11290.1
  misc_feature (1)..(709): Homolog of NCBI NO: 15234006 NR Description: putative protein; protein id: At4g18750.1
  misc_feature (1)..(709): Homolog of NCBI NO: 18394615 NR Description: hypothetical protein; protein id: At1g18485.1
  misc_feature (1)..(709): Homolog of NCBI NO: 30693150 NR Description: pentatricopeptide (PPR) repeat-containing protein
  misc_feature (1)..(709): Homolog of NCBI NO: 15228590 NR Description: hypothetical protein; protein id: At3g03580.1 thaliana] >gi|6091764|gb|AAF03474.1|AC009327_13 hypothetical [Arabidopsis thaliana] >gi|28393735|gb|AAO42278.1| unknown
  misc_feature (1)..(701): Homolog of NCBI NO: 25402861 NR Description: protein F15H18.4 [imported] - Arabidopsis >gi|6714305|gb|AAF26001.1|AC013354_20 F15H18.4 [Arabidopsis
  misc_feature (161)..(709): Homolog of NCBI NO: 15237421 NR Description: putative protein; protein id: At5g16860.1
  misc_feature (1)..(128): Homolog of NCBI NO: 15237421 NR Description: putative protein; protein id: At5g16860.1
  misc_feature (175)..(709): Homolog of NCBI NO: 15229426 NR Description: hypothetical protein; protein id: At3g23330.1 thaliana] >gi|11994318|dbj|BAB02277.1|
MALEAFRCMLDENVEPSSFTLVSVVTACSNLPMPEGLMMGKQVHAYGLRKGELNSFIINTLVAMYGKLGKLASSKVLLGSFGGRDLVTWNTVLSSLCQNEQLLEALEYLREMVLEGVEPDEFTISSVLPACSHLEMLRTGKELHAYALKNGSLDENSFVGSALVDMYCNCKQVLSGRRVFDGMFDRKIGLWNAMIAGYSQNEHDKEALLLFIGMEESAGLLANSTTMAGVVPACVRSGAFSRKEAIHGFVVKRGLDRDRFVQNTLMDMYSRLGKIDIAMRIFGKMEDRDLVTWNTMITGYVFSEHHEDALLLLHKMQNLERKVSKGASRVSLKPNSITLMTILPSCAALSALAKGKEIHAYAIKNNLATDVAVGSALVDMYAKCGCLQMSRKVFDQIPQKNVITWNVIIMAYGMHGNGQEAIDLLRMMMVQGVKPNEVTFISVFAACSHSGMVDEGLRIFYVMKPDYGVEPSSDHYACVVDLLGRAGRIKEAYQLMNMMPRDFNKAGAWSSLLGASRIHNNLEIGEIAAQNLIQLEPNVASHYVLLANIYSSAGLWDKATEVRRNMKEQGVRKEPGCSWIEHGDEVHKFVAGDSSHPQSEKLSGYLETLWERMRKEGYVPDTSCVLHNVEEDEKEILLCGHSEKLAIAFGILNTSPGTIIRVAKNLRVCNDCHLATKFISKIVDREIILRDVRRFHRFKNGTCSCGDYW

SEQ ID NO: 72447 - DNA, 837 bp, Arabidopsis thaliana
  misc_feature (1)..(837): Ceres Seq. ID no. 4933894
  misc_feature: MA Experiment ID: 20000314 Result: Down-regulated in Transcription
  misc_feature: MA Experiment 20000314 PARAMETER Experiment Name: At_14day_Shoots-Roots_Sub_P Parameter: Age (day) Value: 14
  misc_feature: MA Experiment 20000314 PARAMETER Experiment Name: At_14day_Shoots-Roots_Sub_P Parameter: Organism Value: A. thaliana
  misc_feature: MA Experiment 20000314 PARAMETER Experiment Name: At_14day_Shoots-Roots_Sub_P Parameter: Plant Line Value: WS
  misc_feature: MA Experiment 20000314 PARAMETER Experiment Name: At_14day_Shoots-Roots_Sub_P Parameter: Tissue Value: Roots vs. Whole Plant
  misc_feature: MA Experiment ID: 20000315 Result: Down-regulated in Transcription
  misc_feature: MA Experiment 20000315 PARAMETER Experiment Name: At_14day_Shoots-Roots_Sub_P Parameter: Age (day) Value: 14
  misc_feature: MA Experiment 20000315 PARAMETER Experiment Name: At_14day_Shoots-Roots_Sub_P Parameter: Organism Value: A. thaliana
  misc_feature: MA Experiment 20000315 PARAMETER Experiment Name: At_14day_Shoots-Roots_Sub_P Parameter: Plant Line Value: WS
  misc_feature: MA Experiment 20000315 PARAMETER Experiment Name: At_14day_Shoots-Roots_Sub_P Parameter: Tissue Value: Shoots vs. Whole Plant
  misc_feature: MA Experiment ID: 20000327 Result: Down-regulated in Transcription
  misc_feature: MA Experiment 20000327 PARAMETER Experiment Name: At_42deg_Heat_Sub_P Parameter: Age (day) Value: 14
  misc_feature: MA Experiment 20000327 PARAMETER Experiment Name: At_42deg_Heat_Sub_P Parameter: Organism Value: A. thaliana
  misc_feature: MA Experiment 20000327 PARAMETER Experiment Name: At_42deg_Heat_Sub_P Parameter: Plant Line Value: WS
  misc_feature: MA Experiment 20000327 PARAMETER Experiment Name: At_42deg_Heat_Sub_P Parameter: Temperature (deg C) Value: 42 vs. 22
  misc_feature: MA Experiment 20000327 PARAMETER Experiment Name: At_42deg_Heat_Sub_P Parameter: Timepoint (hr) Value: 1
  misc_feature: MA Experiment 20000327 PARAMETER Experiment Name: At_42deg_Heat_Sub_P Parameter: Tissue Value: Aerial
  misc_feature: MA Experiment ID: 20000329 Result: Up-regulated in Transcription
  misc_feature: MA Experiment 20000329 PARAMETER Experiment Name: At_4deg_Cold_Sub_P Parameter: Age (day) Value: 14
  misc_feature: MA Experiment 20000329 PARAMETER Experiment Name: At_4deg_Cold_Sub_P Parameter: Organism Value: A. thaliana
  misc_feature: MA Experiment 20000329 PARAMETER Experiment Name: At_4deg_Cold_Sub_P Parameter: Plant Line Value: WS
  misc_feature: MA Experiment 20000329 PARAMETER Experiment Name: At_4deg_Cold_Sub_P Parameter: Temperature (deg C) Value: 4 vs. 22
  misc_feature: MA Experiment 20000329 PARAMETER Experiment Name: At_4deg_Cold_Sub_P Parameter: Timepoint (hr) Value: 6
  misc_feature: MA Experiment 20000329 PARAMETER Experiment Name: At_4deg_Cold_Sub_P Parameter: Tissue Value: Aerial
  misc_feature: MA Experiment ID: 20000347 Result: Up-regulated in Transcription
  misc_feature: MA Experiment 20000347 PARAMETER Experiment Name: At_2mM_SA_Sub_P Parameter: Age (day) Value: 14
  misc_feature: MA Experiment 20000347 PARAMETER Experiment Name: At_2mM_SA_Sub_P Parameter: Organism Value: A. thaliana
  misc_feature: MA Experiment 20000347 PARAMETER Experiment Name: At_2mM_SA_Sub_P Parameter: Plant Line Value: WS
  misc_feature: MA Experiment 20000347 PARAMETER Experiment Name: At_2mM_SA_Sub_P Parameter: Timepoint (hr) Value: 6
  misc_feature: MA Experiment 20000347 PARAMETER Experiment Name: At_2mM_SA_Sub_P Parameter: Tissue Value: Aerial
  misc_feature: MA Experiment 20000347 PARAMETER Experiment Name: At_2mM_SA_Sub_P Parameter: Treatment Value: 2mM SA vs. No Treatment
  misc_feature: MA Experiment ID: 20000440 Result: Down-regulated in Transcription
  misc_feature: MA Experiment 20000440 PARAMETER Experiment Name: At_Closed-Flower__Sub_P Parameter: Tissue Value: Closed Flower vs. Whole Plant
atgcggctgtacgatcccaaccaggagactctcaacgctctccgcggctccaatatcgagctcgtgctcgatgttccaaaccctgatctccagcgtctcgcctccagccaagcggaagccgacacatgggtccgcaacaacgtccgcaactatgcaaacgtcacatttcgctacatctctgtcgggaacgaggtacagccctcagaccaagctgcgagctttgtcctccccgcgatgcagaacatagagagagcagtttcaagcctcgggatcaaggtctcgacggctatagacaccagaggcatttccgggtttccgccgtcaagtgggacgttcacaccggagtttaggagctttatcgcaccggtgataagtttcttgtcaagcaagcaatctcctctgctcgtgaataattacccttacttcagctacacgggaaacatgcgagacatccggttagactacactctgttcaccgcaccgtcaactgtagtcaatgacggacaaaaccaatatcgaaacctattccacgcaatcttagacactgtttacgcatcattagagaaagctggaggtggttcgttggagatcgtggtgtccgagagtggttggccgacagcgggaggagcagcgacgggtgtggataatgcgagaacttatgtgaacaatttgatacaaactgtgaaaaatggatctccgaggagaccagggagagctacagagacttatatatttgctatgttcgatgagaattcgaagcagggtcccgagactgagaagttttggggactgtttcttccaaatctacagcctaagtatgttgtcaatttcaactaa

SEQ ID NO: 72448 - protein, 278 aa, Arabidopsis thaliana
  peptide (1)..(278): Ceres Seq. ID no. 4933895
  misc_feature (1)..(277): Pfam Name: Glycosyl hydrolases family 17 Pfam Description: Glycosyl hydrolases family 17
  misc_feature (1)..(278): Homolog of NCBI NO: 15230260 NR Description: glycosyl hydrolase family 17 (beta-1,3-glucanase protein id: At3g57240.1 [Arabidopsis thaliana]
  misc_feature (1)..(278): Homolog of NCBI NO: 553038 NR Description: beta-1,3-glucanase
  misc_feature (1)..(278): Homolog of NCBI NO: 16903144 NR Description: beta-1,3-glucanase [Prunus persica]
  misc_feature (1)..(278): Homolog of NCBI NO: 1706548 NR Description: Glucan endo-1,3-beta-glucosidase, basic isoform
  misc_feature (1)..(278): Homolog of NCBI NO: 16903142 NR Description: beta-1,3-glucanase [Prunus persica]
  misc_feature (1)..(278): Homolog of NCBI NO: 7801384 NR Description: beta 1-3 glucanase [Vitis vinifera]
  misc_feature (1)..(278): Homolog of NCBI NO: 7447980 NR Description: glucan endo-1,3-beta-D-glucosidase (EC 3.2.1.39)
  misc_feature (1)..(276): Homolog of NCBI NO: 11279332 NR Description: beta-1,3 glucanase (EC 3.2.1.-) [imported] -
  misc_feature (1)..(278): Homolog of NCBI NO: 21554264 NR Description: beta-1,3-glucanase 2 (BG2) (PR-2) [Arabidopsis
  misc_feature (1)..(278): Homolog of NCBI NO: 15230262 NR Description: glycosyl hydrolase family 17; protein id: supported by cDNA: 21719., supported by cDNA: gi_166862, by cDNA: gi_20466403 [Arabidopsis thaliana]
MRLYDPNQETLNALRGSNIELVLDVPNPDLQRLASSQAEADTWVRNNVRNYANVTFRYISVGNEVQPSDQAASFVLPAMQNIERAVSSLGIKVSTAIDTRGISGFPPSSGTFTPEFRSFIAPVISFLSSKQSPLLVNNYPYFSYTGNMRDIRLDYTLFTAPSTVVNDGQNQYRNLFHAILDTVYASLEKAGGGSLEIVVSESGWPTAGGAATGVDNARTYVNNLIQTVKNGSPRRPGRATETYIFAMFDENSKQGPETEKFWGLFLPNLQPKYVVNFN

SEQ ID NO: 72449 - protein, 200 aa, Arabidopsis thaliana
  peptide (1)..(200): Ceres Seq. ID no. 4933896
  misc_feature (1)..(199): Pfam Name: Glycosyl hydrolases family 17 Pfam Description: Glycosyl hydrolases family 17
  misc_feature (1)..(200): Homolog of NCBI NO: 15230260 NR Description: glycosyl hydrolase family 17 (beta-1,3-glucanase protein id: At3g57240.1 [Arabidopsis thaliana]
  misc_feature (1)..(200): Homolog of NCBI NO: 553038 NR Description: beta-1,3-glucanase
  misc_feature (1)..(200): Homolog of NCBI NO: 16903144 NR Description: beta-1,3-glucanase [Prunus persica]
  misc_feature (1)..(200): Homolog of NCBI NO: 1706548 NR Description: Glucan endo-1,3-beta-glucosidase, basic isoform
  misc_feature (1)..(200): Homolog of NCBI NO: 16903142 NR Description: beta-1,3-glucanase [Prunus persica]
  misc_feature (1)..(200): Homolog of NCBI NO: 7801384 NR Description: beta 1-3 glucanase [Vitis vinifera]
  misc_feature (1)..(200): Homolog of NCBI NO: 7447980 NR Description: glucan endo-1,3-beta-D-glucosidase (EC 3.2.1.39)
  misc_feature (1)..(198): Homolog of NCBI NO: 11279332 NR Description: beta-1,3 glucanase (EC 3.2.1.-) [imported] -
  misc_feature (1)..(200): Homolog of NCBI NO: 21554264 NR Description: beta-1,3-glucanase 2 (BG2) (PR-2) [Arabidopsis
  misc_feature (1)..(200): Homolog of NCBI NO: 15230262 NR Description: glycosyl hydrolase family 17; protein id: supported by cDNA: 21719., supported by cDNA: gi_166862, by cDNA: gi_20466403 [Arabidopsis thaliana]
MQNIERAVSSLGIKVSTAIDTRGISGFPPSSGTFTPEFRSFIAPVISFLSSKQSPLLVNNYPYFSYTGNMRDIRLDYTLFTAPSTVVNDGQNQYRNLFHAILDTVYASLEKAGGGSLEIVVSESGWPTAGGAATGVDNARTYVNNLIQTVKNGSPRRPGRATETYIFAMFDENSKQGPETEKFWGLFLPNLQPKYVVNFN

SEQ ID NO: 72450 - DNA, 1605 bp, Arabidopsis thaliana
  misc_feature (1)..(1605): Ceres Seq. ID no. 4934348
  misc_feature: MA Experiment ID: 20000527 Result: Down-regulated in Transcription
  misc_feature: MA Experiment 20000527 PARAMETER Experiment Name: At_10percent_PEG_P Parameter: Age (day) Value: 20
  misc_feature: MA Experiment 20000527 PARAMETER Experiment Name: At_10percent_PEG_P Parameter: Organism Value: A. thaliana
  misc_feature: MA Experiment 20000527 PARAMETER Experiment Name: At_10percent_PEG_P Parameter: Plant Line Value: WS
  misc_feature: MA Experiment 20000527 PARAMETER Experiment Name: At_10percent_PEG_P Parameter: Timepoint (day) Value: 20
  misc_feature: MA Experiment 20000527 PARAMETER Experiment Name: At_10percent_PEG_P Parameter: Tissue Value: Whole Plant
  misc_feature: MA Experiment 20000527 PARAMETER Experiment Name: At_10percent_PEG_P Parameter: Treatment Value: 10percent PEG vs. No Treatment
  misc_feature: Pfam Name: Glyco_hydro_1 Pfam Description: Glycosyl hydrolase family 1
atgtactcgaagaaaaactcgttcggccgatcagatttcccagagggtttccttttcggtacagcttcatcggcttaccaatatgaaggagccagaaacgaagctcctcgaggagagagtgtttgggacacatttgttcgcaaatatccagagagaaattgctactctaatgcggaccaagcaatcgagttctataaccattacaaggacgatatccagagaatgaaggatattaacatggatgctttcagattctctatctcttggcctaggatttttcctcttggaaagaaaagcaaaggagtgaacaaagaaggaatacaattctataacgatctcatcgatgaactcctcgctaacggaataacacctctcgccactttatttcactgggatactcctcaagcacttgaagatgaatacagtggatttttaagcgaagaagctgttgatgacttcaaggattttgcggccttatgttttgaggagtttggcgaccgtgtaaaattgtgggtcacactaaacgaaccatgggtgtacagtattggtggctatgacacgggaagaaaagcccccggacgtgcctccaaatacatgaacgaagcagccgtggcaggagaatctggtctcgaggtttacactgttagtcacaatctacttctggctcacgccgaagctgttgaggtcttcaggaacaatcccaaatgtaaagatggcaagatcggtatcgctcattgtcccgtatggttcgagccttatgactcgaactgccctaaagacatagaagcatgcgaacgagctatggagtttatgtttggatggcacatggatcctacggtgtatggagattaccctgcagtcatgaaaaaatcgatcggaaaaagattaccatcatttaccgcagcacaatccaagaagcttagaggatcttttgatttcgttggggtgaattattacagtgctttctacgtcaaaaatattgatgaagtgaatcatgacaagcccaattggagatcagacgcacgcatcgaatggagaaaagaaaacaacgcagggcaaacattaggtgtaagaggtggttcggaatgggactttctatatccacaaggccttagaaagtttctaaattatgccaagaataaatatgaaagcccgaaatttatgattaccgaaaacggacactgtgatatagattatgagaaaaagcctaaactttctaacttgatggatctccaaaggacagagtaccacaagaaacatctccaaagcatccaacaagccatccaggaggatggggttgtagttgaaggatactttgcgtggtcattactagacaattgtgaatggaacgccggttatggagttcgatatggactattctacgtcgattataacaatggactaaaacgtttcccgaaaatgtcggcgatgtggttcaaagaattcttgaagagagaagaagaaattgaagattcagaagaagaagagtacgtgttgaagtcaacaatgaacaagaagagattcttattagcaactggttcatcagcttcatgctttattcctaagatgtctgaatcttctaaagccctcgaactattattctag

SEQ ID NO: 72451 - protein, 534 aa, Arabidopsis thaliana; identical to SEQ ID NO: 70855
  peptide (1)..(534): Ceres Seq. ID no. 4934349
  misc_feature: Pfam Name: Glyco_hydro_1 Pfam Description: Glycosyl hydrolase family 1
  misc_feature (1)..(534): Homolog of NCBI NO: 15232260 NR Description: glycosyl hydrolase family 1; protein id:
  misc_feature (7)..(506): Homolog of NCBI NO: 15224886 NR Description: glycosyl hydrolase family 1; protein id: supported by cDNA: gi_20259434 [Arabidopsis thaliana]
  misc_feature (10)..(528): Homolog of NCBI NO: 15232262 NR Description: glycosyl hydrolase family 1, beta-glucosidase; id: At3g60140.1, supported by cDNA: gi_10834547 [Arabidopsis
  misc_feature (10)..(528): Homolog of NCBI NO: 10834548 NR Description: beta-glucosidase [Arabidopsis thaliana]
  misc_feature (8)..(514): Homolog of NCBI NO: 30689721 NR Description: glycosyl hydrolase family 1 [Arabidopsis thaliana]
  misc_feature (10)..(485): Homolog of NCBI NO: 15238569 NR Description: glycosyl hydrolase family 1; protein id:
  misc_feature (10)..(485): Homolog of NCBI NO: 22327030 NR Description: glycosyl hydrolase family 1; protein id:
  misc_feature (8)..(514): Homolog of NCBI NO: 7435453 NR Description: probable beta-glucosidase At2g44460 [imported] -
  misc_feature (6)..(485): Homolog of NCBI NO: 15228597 NR Description: glycosyl hydrolase family 1; protein id: supported by cDNA: gi_3420934 [Arabidopsis thaliana]
  misc_feature (10)..(485): Homolog of NCBI NO: 10177855 NR Description: beta-glucosidase [Arabidopsis thaliana]

SEQ ID NO: 72452 - protein, 460 aa, Arabidopsis thaliana; identical to SEQ ID NO: 70856
  peptide (1)..(460): Ceres Seq. ID no. 4934350
  misc_feature: Pfam Name: Glyco_hydro_1 Pfam Description: Glycosyl hydrolase family 1
  misc_feature (1)..(460): Homolog of NCBI NO: 15232260 NR Description: glycosyl hydrolase family 1; protein id:
  misc_feature (1)..(432): Homolog of NCBI NO: 15224886 NR Description: glycosyl hydrolase family 1; protein id: supported by cDNA: gi_20259434 [Arabidopsis thaliana]
  misc_feature (1)..(454): Homolog of NCBI NO: 15232262 NR Description: glycosyl hydrolase family 1, beta-glucosidase; id: At3g60140.1, supported by cDNA: gi_10834547 [Arabidopsis
  misc_feature (1)..(454): Homolog of NCBI NO: 10834548 NR Description: beta-glucosidase [Arabidopsis thaliana]
  misc_feature (1)..(440): Homolog of NCBI NO: 30689721 NR Description: glycosyl hydrolase family 1 [Arabidopsis thaliana]
  misc_feature (1)..(411): Homolog of NCBI NO: 15238569 NR Description: glycosyl hydrolase family 1; protein id:
  misc_feature (1)..(411): Homolog of NCBI NO: 22327030 NR Description: glycosyl hydrolase family 1; protein id:
  misc_feature (1)..(440): Homolog of NCBI NO: 7435453 NR Description: probable beta-glucosidase At2g44460 [imported] -
  misc_feature (1)..(411): Homolog of NCBI NO: 15228597 NR Description: glycosyl hydrolase family 1; protein id: supported by cDNA: gi_3420934 [Arabidopsis thaliana]
  misc_feature (1)..(411): Homolog of NCBI NO: 10177855 NR Description: beta-glucosidase [Arabidopsis thaliana]

SEQ ID NO: 72453 - protein, 455 aa, Arabidopsis thaliana
  peptide (1)..(455): Ceres Seq. ID no. 4934351
  misc_feature: Pfam Name: Glyco_hydro_1 Pfam Description: Glycosyl hydrolase family 1
  misc_feature (1)..(455): Homolog of NCBI NO: 15232260 NR Description: glycosyl hydrolase family 1; protein id:
  misc_feature (1)..(427): Homolog of NCBI NO: 15224886 NR Description: glycosyl hydrolase family 1; protein id: supported by cDNA: gi_20259434 [Arabidopsis thaliana]
  misc_feature (1)..(449): Homolog of NCBI NO: 15232262 NR Description: glycosyl hydrolase family 1, beta-glucosidase; id: At3g60140.1, supported by cDNA: gi_10834547 [Arabidopsis
  misc_feature (1)..(449): Homolog of NCBI NO: 10834548 NR Description: beta-glucosidase [Arabidopsis thaliana]
  misc_feature (1)..(435): Homolog of NCBI NO: 30689721 NR Description: glycosyl hydrolase family 1 [Arabidopsis thaliana]
  misc_feature (1)..(406): Homolog of NCBI NO: 15238569 NR Description: glycosyl hydrolase family 1; protein id:
  misc_feature (1)..(406): Homolog of NCBI NO: 22327030 NR Description: glycosyl hydrolase family 1; protein id:
  misc_feature (1)..(435): Homolog of NCBI NO: 7435453 NR Description: probable beta-glucosidase At2g44460 [imported] -
  misc_feature (1)..(406): Homolog of NCBI NO: 15228597 NR Description: glycosyl hydrolase family 1; protein id: supported by cDNA: gi_3420934 [Arabidopsis thaliana]
  misc_feature (1)..(406): Homolog of NCBI NO: 10177855 NR Description: beta-glucosidase [Arabidopsis thaliana]
MDAFRFSISWPRIFPLGKKSKGVNKEGIQFYNDLIDELLANGITPLATLFHWDTPQALEDEYSGFLSEEAVDDFKDFAALCFEEFGDRVKLWVTLNEPWVYSIGGYDTGRKAPGRASKYMNEAAVAGESGLEVYTVSHNLLLAHAEAVEVFRNNPKCKDGKIGIAHCPVWFEPYDSNCPKDIEACERAMEFMFGWHMDPTVYGDYPAVMKKSIGKRLPSFTAAQSKKLRGSFDFVGVNYYSAFYVKNIDEVNHDKPNWRSDARIEWRKENNAGQTLGVRGGSEWDFLYPQGLRKFLNYAKNKYESPKFMITENGHCDIDYEKKPKLSNLMDLQRTEYHKKHLQSIQQAIQEDGVVVEGYFAWSLLDNCEWNAGYGVRYGLFYVDYNNGLKRFPKMSAMWFKEFLKREEEIEDSEEEEYVLKSTMNKKRFLLATGSSASCFIPKMSESSKALELLF

SEQ ID NO: 72454 - DNA, 1302 bp, Arabidopsis thaliana
  misc_feature (1)..(1302): Ceres Seq. ID no. 4934356
  misc_feature: MA Experiment ID: 20000314 Result: Up-regulated in Transcription
  misc_feature: MA Experiment 20000314 PARAMETER Experiment Name: At_14day_Shoots-Roots_Sub_P Parameter: Age (day) Value: 14
  misc_feature: MA Experiment 20000314 PARAMETER Experiment Name: At_14day_Shoots-Roots_Sub_P Parameter: Organism Value: A. thaliana
  misc_feature: MA Experiment 20000314 PARAMETER Experiment Name: At_14day_Shoots-Roots_Sub_P Parameter: Plant Line Value: WS
  misc_feature: MA Experiment 20000314 PARAMETER Experiment Name: At_14day_Shoots-Roots_Sub_P Parameter: Tissue Value: Roots vs. Whole Plant
  misc_feature: MA Experiment ID: 20000440 Result: Up-regulated in Transcription
  misc_feature: MA Experiment 20000440 PARAMETER Experiment Name: At_Closed-Flower__Sub_P Parameter: Tissue Value: Closed Flower vs. Whole Plant
atggtaatgcaggacttgaagtcgcagatgcaagagatcattccagaacaacaggaccgtttgaagaaactgaaatcagaacaaggaaaggttccagtggggaacatcaccgttgatatggtacttggtggaatgagagggatgactggattactctgggaaacctcattgcttgatgcagatgagggaatacggtttagaggcatgtcgattcctgaatgtcagaaaatattaccttcagctgagtctggagaagagcccttgcctgagagtcttctgtggcttctattaactggaaaggtgccaactaaagagcaagctaatgctttgtcaacagagttggctcatcgtgcggctgtgccagctatagatgctttgccttcaacagctcatccaatgactcaatttgctagtggtgttatggcccttcaggttcaaagtgagtttcaaaaggcgtatgagcagggtgatatttctaagtcaaagtactgggaaccaaccttcgaagatgccctaaacttgattgctcgtgttcctgttgtagcttcatacgtttatcggaggatgtacaaggatggtagcatcattccattagatgattctttggattatggtgcaaatttttcacacatgctgggatttgatagtcctcagatgaaagagctcatgaggctttatgtcactatccacagtgatcatgaaggtggaaatgttagtgctcacgctggtcacctggttgggagtgcactttcagatccatatctttcatttgctgctgcattgaatggtttagctgggccactccatggtttggctaatcaggaagttttgctgtggatcaaattagttgttgaggaatgtggagaaagtatatcaaaggaacagctaaaagattatgtctggaaaacgttaaacagtggcaaggttgttccaggatatggccatggtgttttgcgtaaaacggatccaagatatatatgccaaagagagtttgccttgaagcatctacctgatgatcctctttttcagctggtctcaaaactttatgaagtggtgcctcctattctaaccgagctgggaaaggtcaagaacccgtggcctaacgttgatgctcatagcggagtgcttctgaactactatggtctaaccgaagcaagatactacacggtgctttttggcgtctcaagaagtcttggaatctgctcgcagctgatatgggacagggcacttggactgccacttgagagaccaaagagtgtaaacatggactggctcgataacttcacgcgcttgaaccgctaa

SEQ ID NO: 72455 - protein, 433 aa, Arabidopsis thaliana
  peptide (1)..(433): Ceres Seq. ID no. 4934357
  misc_feature (44)..(417): Pfam Name: Citrate synthase Pfam Description: Citrate synthase
  misc_feature (1)..(433): Homolog of NCBI NO: 15232248 NR Description: citrate synthase-like protein; protein id:
  misc_feature (5)..(426): Homolog of NCBI NO: 18406515 NR Description: citrate synthase; protein id: At2g44350.1, by cDNA: 16528., supported by cDNA: gi_14423561 [Arabidopsis >gi|27735166|sp|P20115|CISY_ARATH Citrate synthase, mitochondrial
  misc_feature (5)..(426): Homolog of NCBI NO: 21553775 NR Description: citrate synthase [Arabidopsis thaliana]
  misc_feature (5)..(426): Homolog of NCBI NO: 30689693 NR Description: citrate synthase [Arabidopsis thaliana]
  misc_feature (5)..(427): Homolog of NCBI NO: 8928010 NR Description: Citrate synthase, mitochondrial precursor
  misc_feature (5)..(430): Homolog of NCBI NO: 1556380 NR Description: citrate (si)-synthase [Beta vulgaris]
  misc_feature (5)..(430): Homolog of NCBI NO: 15982952 NR Description: citrate synthase [Prunus persica]
  misc_feature (5)..(426): Homolog of NCBI NO: 1352088 NR Description: Citrate synthase, mitochondrial precursor
  misc_feature (5)..(427): Homolog of NCBI NO: 11066954 NR Description: citrate synthase [Oryza sativa]
  misc_feature (5)..(427): Homolog of NCBI NO: 1556429 NR Description: citrate synthase [Nicotiana tabacum]
MVMQDLKSQMQEIIPEQQDRLKKLKSEQGKVPVGNITVDMVLGGMRGMTGLLWETSLLDADEGIRFRGMSIPECQKILPSAESGEEPLPESLLWLLLTGKVPTKEQANALSTELAHRAAVPAIDALPSTAHPMTQFASGVMALQVQSEFQKAYEQGDISKSKYWEPTFEDALNLIARVPVVASYVYRRMYKDGSIIPLDDSLDYGANFSHMLGFDSPQMKELMRLYVTIHSDHEGGNVSAHAGHLVGSALSDPYLSFAAALNGLAGPLHGLANQEVLLWIKLVVEECGESISKEQLKDYVWKTLNSGKVVPGYGHGVLRKTDPRYICQREFALKHLPDDPLFQLVSKLYEVVPPILTELGKVKNPWPNVDAHSGVLLNYYGLTEARYYTVLFGVSRSLGICSQLIWDRALGLPLERPKSVNMDWLDNFTRLNR

SEQ ID NO: 72456 - protein, 431 aa, Arabidopsis thaliana
  peptide (1)..(431): Ceres Seq. ID no. 4934358
  misc_feature (42)..(415): Pfam Name: Citrate synthase Pfam Description: Citrate synthase
  misc_feature (1)..(431): Homolog of NCBI NO: 15232248 NR Description: citrate synthase-like protein; protein id:
  misc_feature (3)..(424): Homolog of NCBI NO: 18406515 NR Description: citrate synthase; protein id: At2g44350.1, by cDNA: 16528., supported by cDNA: gi_14423561 [Arabidopsis >gi|27735166|sp|P20115|CISY_ARATH Citrate synthase, mitochondrial
  misc_feature (3)..(424): Homolog of NCBI NO: 30689693 NR Description: citrate synthase [Arabidopsis thaliana]
  misc_feature (3)..(424): Homolog of NCBI NO: 21553775 NR Description: citrate synthase [Arabidopsis thaliana]
  misc_feature (3)..(425): Homolog of NCBI NO: 8928010 NR Description: Citrate synthase, mitochondrial precursor
  misc_feature (3)..(428): Homolog of NCBI NO: 1556380 NR Description: citrate (si)-synthase [Beta vulgaris]
  misc_feature (3)..(428): Homolog of NCBI NO: 15982952 NR Description: citrate synthase [Prunus persica]
  misc_feature (3)..(424): Homolog of NCBI NO: 1352088 NR Description: Citrate synthase, mitochondrial precursor
  misc_feature (3)..(425): Homolog of NCBI NO: 11066954 NR Description: citrate synthase [Oryza sativa]
  misc_feature (3)..(425): Homolog of NCBI NO: 1556429 NR Description: citrate synthase [Nicotiana tabacum]
MQDLKSQMQEIIPEQQDRLKKLKSEQGKVPVGNITVDMVLGGMRGMTGLLWETSLLDADEGIRFRGMSIPECQKILPSAESGEEPLPESLLWLLLTGKVPTKEQANALSTELAHRAAVPAIDALPSTAHPMTQFASGVMALQVQSEFQKAYEQGDISKSKYWEPTFEDALNLIARVPVVASYVYRRMYKDGSIIPLDDSLDYGANFSHMLGFDSPQMKELMRLYVTIHSDHEGGNVSAHAGHLVGSALSDPYLSFAAALNGLAGPLHGLANQEVLLWIKLVVEECGESISKEQLKDYVWKTLNSGKVVPGYGHGVLRKTDPRYICQREFALKHLPDDPLFQLVSKLYEVVPPILTELGKVKNPWPNVDAHSGVLLNYYGLTEARYYTVLFGVSRSLGICSQLIWDRALGLPLERPKSVNMDWLDNFTRLNR

SEQ ID NO: 72457 - protein, 424 aa, Arabidopsis thaliana
  peptide (1)..(424): Ceres Seq. ID no. 4934359
  misc_feature (35)..(408): Pfam Name: Citrate synthase Pfam Description: Citrate synthase
  misc_feature (1)..(424): Homolog of NCBI NO: 15232248 NR Description: citrate synthase-like protein; protein id:
  misc_feature (1)..(417): Homolog of NCBI NO: 18406515 NR Description: citrate synthase; protein id: At2g44350.1, by cDNA: 16528., supported by cDNA: gi_14423561 [Arabidopsis >gi|27735166|sp|P20115|CISY_ARATH Citrate synthase, mitochondrial
  misc_feature (1)..(417): Homolog of NCBI NO: 21553775 NR Description: citrate synthase [Arabidopsis thaliana]
  misc_feature (1)..(417): Homolog of NCBI NO: 30689693 NR Description: citrate synthase [Arabidopsis thaliana]
  misc_feature (1)..(418): Homolog of NCBI NO: 8928010 NR Description: Citrate synthase, mitochondrial precursor
  misc_feature (1)..(421): Homolog of NCBI NO: 1556380 NR Description: citrate (si)-synthase [Beta vulgaris]
  misc_feature (1)..(421): Homolog of NCBI NO: 15982952 NR Description: citrate synthase [Prunus persica]
  misc_feature (1)..(417): Homolog of NCBI NO: 1352088 NR Description: Citrate synthase, mitochondrial precursor
  misc_feature (1)..(418): Homolog of NCBI NO: 11066954 NR Description: citrate synthase [Oryza sativa]
  misc_feature (1)..(418): Homolog of NCBI NO: 1556429 NR Description: citrate synthase [Nicotiana tabacum]
MQEIIPEQQDRLKKLKSEQGKVPVGNITVDMVLGGMRGMTGLLWETSLLDADEGIRFRGMSIPECQKILPSAESGEEPLPESLLWLLLTGKVPTKEQANALSTELAHRAAVPAIDALPSTAHPMTQFASGVMALQVQSEFQKAYEQGDISKSKYWEPTFEDALNLIARVPVVASYVYRRMYKDGSIIPLDDSLDYGANFSHMLGFDSPQMKELMRLYVTIHSDHEGGNVSAHAGHLVGSALSDPYLSFAAALNGLAGPLHGLANQEVLLWIKLVVEECGESISKEQLKDYVWKTLNSGKVVPGYGHGVLRKTDPRYICQREFALKHLPDDPLFQLVSKLYEVVPPILTELGKVKNPWPNVDAHSGVLLNYYGLTEARYYTVLFGVSRSLGICSQLIWDRALGLPLERPKSVNMDWLDNFTRLNR

SEQ ID NO: 72458 - DNA, 1884 bp, Arabidopsis thaliana
  misc_feature (1)..(1884): Ceres Seq. ID no. 4934675
atggagagtttgattgcgcttgtgaacaagattcagagagcctgtacggctctgggagatcacggcgagggaagctccctcccaactctctgggactcattgcctgcaattgccgtcgtcggtggtcagagttctggaaagtcttcagtgctagagagtgttgttggaaaagattttctacctcgtggagctgggattgttacacgcagacctcttgtcctgcagcttcatagaattgatgaagggaaagagtatgcagagtttatgcatcttccaaagaagaagttcacagattttggtattgtttgggaggagtttatgctccttagttttcctgtgactgcttgcactgctgtgaggcaggagatctcggatgagacagatcgtgaaactggtcgcagcagcaaagtaatatccacagtcccaattcatctcagtatcttctctcctaatgttgtgaatttgacacttgtcgatcttcctgggctaacaaaggtagctgttgatggccagcctgaaagcattgttcaagacatcgagaacatggtcagatcgtttattgagaagcccaactgcatcatacttgctatttcccctgcaaatcaggatcttgcaacatctgatgccattaagatctctcgtgaagttgatcccaaaggagacaggacttttggagttttaacaaaaattgatctcatggaccaaggcactaatgctgttgatatacttgaaggaaggggatacaaattaaggtatccttgggttggtgttgtaaaccggtctcaagctgacattaataaaagtgttgatatgattgctgctcgtcggcgtgaacgtgattacttccagactagcccagagtacagacatttaactgaaagaatgggttcagagtatttaggaaagatgctctctaagcatttggaagttgttatcaagtctagaatcccgggacttcagtctcttatcacaaagacaatttccgagttagagacagagctaagccgtcttgggaagcctgtagcagctgatgctggtggaaaactttatatgatcatggaaatttgccgtgcctttgatcaaacttttaaagaacacctggatggcacgcgttcaggtggtgaaaagataaattctgtgttcgacaatcaattcccagctgccattaaaagactgcaattcgacaaacatctctccatggacaatgtacggaaactgatcactgaagcagatggatatcaacctcatctcatagctcctgaacaaggttatcgccggctcatagaatcatgcttagtctccattagaggccctgctgaagcagctgttgatgcggttcattccattctcaaggatcttatccacaaatccatgggcgaaacatctgaactgaagcaatatccaacactcagagtagaagtatcaggtgcagccgtggattcattggatcgaatgagagacgaaagcaggaaagcaactctgttactagtggacatggagtctggttacttaacggtcgagttcttcaggaaactcccgcaagattctgaaaaaggtgggaatccgacacattcgatattcgacagatacaacgatgcttatctccgaagaatcggctcaaatgtgttgtcatatgtgaacatggtctgcgctggcttgagaaactccataccgaaatccattgtttactgtcaagtccgtgaagcaaaacgaagccttctagacatcttcttcaccgaacttggccagaaagagatgagcaaattgtcgaaattgttggatgaggatcctgcggttcagcagcgaaggacttcgattgcgaagaggctggaattgtatagaagtgctcaaacggatattgaagcagttgcttggtccaagtag

SEQ ID NO: 72459 - protein, 627 aa, Arabidopsis thaliana
  peptide (1)..(627): Ceres Seq. ID no. 4934676
  misc_feature (239)..(525): Pfam Name: Dynamin central region Pfam Description: Dynamin central region
  misc_feature (91)..(627): Homolog of NCBI NO: 30693985 NR Description: dynamin-related protein (pir||S59558)
  misc_feature (1)..(139): Homolog of NCBI NO: 30693985 NR Description: dynamin-related protein (pir||S59558)
  misc_feature (91)..(627): Homolog of NCBI NO: 20453081 NR Description: AT5g42080/MJC20_19 [Arabidopsis thaliana]
  misc_feature (1)..(139): Homolog of NCBI NO: 20453081 NR Description: AT5g42080/MJC20_19 [Arabidopsis thaliana]
  misc_feature (114)..(627): Homolog of NCBI NO: 2129826 NR Description: phragmoplastin 5 - soybean
  misc_feature (1)..(137): Homolog of NCBI NO: 2129826 NR Description: phragmoplastin 5 - soybean
  misc_feature (114)..(627): Homolog of NCBI NO: 2129825 NR Description: phragmoplastin 12 - soybean
  misc_feature (1)..(139): Homolog of NCBI NO: 2129825 NR Description: phragmoplastin 12 - soybean
  misc_feature (114)..(627): Homolog of NCBI NO: 5931765 NR Description: phragmoplastin [Nicotiana tabacum]
  misc_feature (1)..(105): Homolog of NCBI NO: 5931765 NR Description: phragmoplastin [Nicotiana tabacum]
MESLIALVNKIQRACTALGDHGEGSSLPTLWDSLPAIAVVGGQSSGKSSVLESVVGKDFLPRGAGIVTRRPLVLQLHRIDEGKEYAEFMHLPKKKFTDFGIVWEEFMLLSFPVTACTAVRQEISDETDRETGRSSKVISTVPIHLSIFSPNVVNLTLVDLPGLTKVAVDGQPESIVQDIENMVRSFIEKPNCIILAISPANQDLATSDAIKISREVDPKGDRTFGVLTKIDLMDQGTNAVDILEGRGYKLRYPWVGVVNRSQADINKSVDMIAARRRERDYFQTSPEYRHLTERMGSEYLGKMLSKHLEVVIKSRIPGLQSLITKTISELETELSRLGKPVAADAGGKLYMIMEICRAFDQTFKEHLDGTRSGGEKINSVFDNQFPAAIKRLQFDKHLSMDNVRKLITEADGYQPHLIAPEQGYRRLIESCLVSIRGPAEAAVDAVHSILKDLIHKSMGETSELKQYPTLRVEVSGAAVDSLDRMRDESRKATLLLVDMESGYLTVEFFRKLPQDSEKGGNPTHSIFDRYNDAYLRRIGSNVLSYVNMVCAGLRNSIPKSIVYCQVREAKRSLLDIFFTELGQKEMSKLSKLLDEDPAVQQRRTSIAKRLELYRSAQTDIEAVAWSK

SEQ ID NO: 72460 - protein, 539 aa, Arabidopsis thaliana
  peptide (1)..(539): Ceres Seq. ID no. 4934677
  misc_feature (151)..(437): Pfam Name: Dynamin central region Pfam Description: Dynamin central region
  misc_feature (3)..(539): Homolog of NCBI NO: 30693985 NR Description: dynamin-related protein (pir||S59558)
  misc_feature (1)..(51): Homolog of NCBI NO: 30693985 NR Description: dynamin-related protein (pir||S59558)
  misc_feature (3)..(539): Homolog of NCBI NO: 20453081 NR Description: AT5g42080/MJC20_19 [Arabidopsis thaliana]
  misc_feature (1)..(51): Homolog of NCBI NO: 20453081 NR Description: AT5g42080/MJC20_19 [Arabidopsis thaliana]
  misc_feature (26)..(539): Homolog of NCBI NO: 2129826 NR Description: phragmoplastin 5 - soybean
  misc_feature (1)..(49): Homolog of NCBI NO: 2129826 NR Description: phragmoplastin 5 - soybean
  misc_feature (26)..(539): Homolog of NCBI NO: 2129825 NR Description: phragmoplastin 12 - soybean
  misc_feature (1)..(51): Homolog of NCBI NO: 2129825 NR Description: phragmoplastin 12 - soybean
  misc_feature (26)..(539): Homolog of NCBI NO: 5931765 NR Description: phragmoplastin [Nicotiana tabacum]
  misc_feature (1)..(17): Homolog of NCBI NO: 5931765 NR Description: phragmoplastin [Nicotiana tabacum]
MHLPKKKFTDFGIVWEEFMLLSFPVTACTAVRQEISDETDRETGRSSKVISTVPIHLSIFSPNVVNLTLVDLPGLTKVAVDGQPESIVQDIENMVRSFIEKPNCIILAISPANQDLATSDAIKISREVDPKGDRTFGVLTKIDLMDQGTNAVDILEGRGYKLRYPWVGVVNRSQADINKSVDMIAARRRERDYFQTSPEYRHLTERMGSEYLGKMLSKHLEVVIKSRIPGLQSLITKTISELETELSRLGKPVAADAGGKLYMIMEICRAFDQTFKEHLDGTRSGGEKINSVFDNQFPAAIKRLQFDKHLSMDNVRKLITEADGYQPHLIAPEQGYRRLIESCLVSIRGPAEAAVDAVHSILKDLIHKSMGETSELKQYPTLRVEVSGAAVDSLDRMRDESRKATLLLVDMESGYLTVEFFRKLPQDSEKGGNPTHSIFDRYNDAYLRRIGSNVLSYVNMVCAGLRNSIPKSIVYCQVREAKRSLLDIFFTELGQKEMSKLSKLLDEDPAVQQRRTSIAKRLELYRSAQTDIEAVAWSK

SEQ ID NO: 72461 - protein, 521 aa, Arabidopsis thaliana
  peptide (1)..(521): Ceres Seq. ID no. 4934678
  misc_feature (133)..(419): Pfam Name: Dynamin central region Pfam Description: Dynamin central region
  misc_feature (1)..(521): Homolog of NCBI NO: 30693985 NR Description: dynamin-related protein (pir||S59558)
  misc_feature (1)..(33): Homolog of NCBI NO: 30693985 NR Description: dynamin-related protein (pir||S59558)
  misc_feature (1)..(521): Homolog of NCBI NO: 20453081 NR Description: AT5g42080/MJC20_19 [Arabidopsis thaliana]
  misc_feature (1)..(33): Homolog of NCBI NO: 20453081 NR Description: AT5g42080/MJC20_19 [Arabidopsis thaliana]
  misc_feature (8)..(521): Homolog of NCBI NO: 2129826 NR Description: phragmoplastin 5 - soybean
  misc_feature (1)..(31): Homolog of NCBI NO: 2129826 NR Description: phragmoplastin 5 - soybean
  misc_feature (8)..(521): Homolog of NCBI NO: 2129825 NR Description: phragmoplastin 12 - soybean
  misc_feature (1)..(33): Homolog of NCBI NO: 2129825 NR Description: phragmoplastin 12 - soybean
  misc_feature (8)..(521): Homolog of NCBI NO: 5931765 NR Description: phragmoplastin [Nicotiana tabacum]
  misc_feature (1)..(521): Homolog of NCBI NO: 2267213 NR Description: dynamin-like GTP binding protein [Arabidopsis
MLLSFPVTACTAVRQEISDETDRETGRSSKVISTVPIHLSIFSPNVVNLTLVDLPGLTKVAVDGQPESIVQDIENMVRSFIEKPNCIILAISPANQDLATSDAIKISREVDPKGDRTFGVLTKIDLMDQGTNAVDILEGRGYKLRYPWVGVVNRSQADINKSVDMIAARRRERDYFQTSPEYRHLTERMGSEYLGKMLSKHLEVVIKSRIPGLQSLITKTISELETELSRLGKPVAADAGGKLYMIMEICRAFDQTFKEHLDGTRSGGEKINSVFDNQFPAAIKRLQFDKHLSMDNVRKLITEADGYQPHLIAPEQGYRRLIESCLVSIRGPAEAAVDAVHSILKDLIHKSMGETSELKQYPTLRVEVSGAAVDSLDRMRDESRKATLLLVDMESGYLTVEFFRKLPQDSEKGGNPTHSIFDRYNDAYLRRIGSNVLSYVNMVCAGLRNSIPKSIVYCQVREAKRSLLDIFFTELGQKEMSKLSKLLDEDPAVQQRRTSIAKRLELYRSAQTDIEAVAWSK

SEQ ID NO: 72462 - DNA, 1458 bp, Arabidopsis thaliana
  misc_feature (1)..(1458): Ceres Seq. ID no. 4935487
  misc_feature: MA Experiment ID: 20000328 Result: Down-regulated in Transcription
  misc_feature: MA Experiment 20000328 PARAMETER Experiment Name: At_42deg_Heat_Sub_P Parameter: Age (day) Value: 14
  misc_feature: MA Experiment 20000328 PARAMETER Experiment Name: At_42deg_Heat_Sub_P Parameter: Organism Value: A. thaliana
  misc_feature: MA Experiment 20000328 PARAMETER Experiment Name: At_42deg_Heat_Sub_P Parameter: Plant Line Value: WS
  misc_feature: MA Experiment 20000328 PARAMETER Experiment Name: At_42deg_Heat_Sub_P Parameter: Temperature (deg C) Value: 42 vs. 22
  misc_feature: MA Experiment 20000328 PARAMETER Experiment Name: At_42deg_Heat_Sub_P Parameter: Timepoint (hr) Value: 6
  misc_feature: MA Experiment 20000328 PARAMETER Experiment Name: At_42deg_Heat_Sub_P Parameter: Tissue Value: Aerial
  misc_feature: MA Experiment ID: 20000355 Result: Up-regulated in Transcription
  misc_feature: MA Experiment 20000355 PARAMETER Experiment Name: At_Siliques_Sub_P Parameter: Age (day) Value: 21
  misc_feature: MA Experiment 20000355 PARAMETER Experiment Name: At_Siliques_Sub_P Parameter: Organism Value: A. thaliana
  misc_feature: MA Experiment 20000355 PARAMETER Experiment Name: At_Siliques_Sub_P Parameter: Plant Line Value: WS
  misc_feature: MA Experiment 20000355 PARAMETER Experiment Name: At_Siliques_Sub_P Parameter: Tissue Value: Less Than 5mm Siliques vs. Whole Plant
  misc_feature: MA Experiment ID: 20000440 Result: Up-regulated in Transcription
  misc_feature: MA Experiment 20000440 PARAMETER Experiment Name: At_Closed-Flower__Sub_P Parameter: Tissue Value: Closed Flower vs. Whole Plant
atggagaatttgccaaatcacgaagaaaacgacgatgtgggctatcatcagtcacctggtcccatcgatccaaatgatcattcagcatctgaaactccggtttactcaacaatgagcacagattcttttgcttatcatcgaacatgttctgaaacctctggaggaggcttttcagaccaaatagatgaaaccagcagtttctgcactgaggcttctcctagtgattggcctgtcttaaccgaatccaacaactctgcgagctcaaattttccaactgtcttcgacttgaaacataatcagattgagactgatgagcaccttgcggtccaagaaatttcagagccagagctggagacgatgaaggaaagattctcgaagcttctgcttggggaagatatgtcaggaagcggcaaaggcgtttgcaccgcagtgacaatctcaaacgctataaccaatctttatgctactgtttttggacagaatctaagattagaaccattggagatagagcagaagacgacgtggaagagagaaatgaattgccttctctctgtgtgtgactatattttcgagtttatcccaaagtcacagaatctaagcaatggagccactgttgaggtcatggagagtagaccaagagcagatatctacatcaatctgcctgcactcagaaaactagattccatgcttatggaggcattggatagttttcaaaagacagagttttggtatgcagaagaaggaagcttgtcgatgaagtcaacgcgttccgcaactggatcattcaggaaagtgattgtgcagaggaaagaagagaaatggtggttaccgattcctctggttccattacaaggtttatcagagaaggcaaggaaacaacttaagagcaagcgagagagcactaatcaaatccataaagctgctatggccatcaatagcagcatactcggtgaaatggatattcctgattcttacatggcaactcttccaaagagcggaaaagcgagcacaggagatgcaatctatcgacacatgacgagttcagggcggttttcaccagaaaaacttctagatcgtctcaagattgtatcagaacatgaagcgcttcagctggcagatagagtagaagcttcaatgtacacatggagacgcaaagcttgtcttaacaattccaagtcttcatggaatatggtgaaagatttaatgtcaattacagagagaagtgacaagaactatgttttggctgagagagcagagtctttgctcttctgtttgaaacaacggtacccagaattgtctcagacatcgttagatatttgcaagattcattgcaacaaggatgttggaaaagctgtgttagagagttattcaagagttcttgaaggtttagcttttaacatagttgcttggattgatgatgttctttatgtagacaaaacaatgagaggagaagaatga

SEQ ID NO: 72463 - protein, 485 aa, Arabidopsis thaliana
  peptide (1)..(485): Ceres Seq. ID no. 4935488
  misc_feature (12)..(231): Pfam Name: Domain of unknown function (DUF315) Pfam Description: Domain of unknown function (DUF315)
  misc_feature (1)..(485): Homolog of NCBI NO: 15223455 NR Description: hypothetical protein; protein id: At1g01700.1
  misc_feature (218)..(485): Homolog of NCBI NO: 25349309 NR Description: hypothetical protein T1N6.8 - Arabidopsis >gi|8671837|gb|AAF78400.1|AC009273_6 Contains strong similarity an unknown protein CAB81591 gi|7263554 from Arabidopsis thaliana
  misc_feature (1)..(231): Homolog of NCBI NO: 25349309 NR Description: hypothetical protein T1N6.8 - Arabidopsis >gi|8671837|gb|AAF78400.1|AC009273_6 Contains strong similarity an unknown protein CAB81591 gi|7263554 from Arabidopsis thaliana
  misc_feature (1)..(485): Homolog of NCBI NO: 15236138 NR Description: putative protein; protein id: At4g00460.1
  misc_feature (39)..(485): Homolog of NCBI NO: 30690159 NR Description: expressed protein [Arabidopsis thaliana]
  misc_feature (155)..(485): Homolog of NCBI NO: 7486457 NR Description: hypothetical protein At2g45890 [imported] - thaliana >gi|3386605|gb|AAC28535.1| hypothetical protein
  misc_feature (39)..(154): Homolog of NCBI NO: 7486457 NR Description: hypothetical protein At2g45890 [imported] - thaliana >gi|3386605|gb|AAC28535.1| hypothetical protein
  misc_feature (36)..(482): Homolog of NCBI NO: 37536670 NR Description: hypothetical protein [Oryza sativa (japonica group)] >gi|10140653|gb|AAG13489.1| hypothetical protein [Oryza
  misc_feature (229)..(485): Homolog of NCBI NO: 7485257 NR Description: hypothetical protein A_IG005I10.1 - Arabidopsis >gi|2252824|gb|AAB62823.1| A_IG005I10.1 gene product [Arabidopsis >gi|6049866|gb|AAF02781.1|AF195115_1 F5I10.1 gene product
  misc_feature (110)..(482): Homolog of NCBI NO: 38345761 NR Description: OSJNBa0065O17.14 [Oryza sativa (japonica
MENLPNHEENDDVGYHQSPGPIDPNDHSASETPVYSTMSTDSFAYHRTCSETSGGGFSDQIDETSSFCTEASPSDWPVLTESNNSASSNFPTVFDLKHNQIETDEHLAVQEISEPELETMKERFSKLLLGEDMSGSGKGVCTAVTISNAITNLYATVFGQNLRLEPLEIEQKTTWKREMNCLLSVCDYIFEFIPKSQNLSNGATVEVMESRPRADIYINLPALRKLDSMLMEALDSFQKTEFWYAEEGSLSMKSTRSATGSFRKVIVQRKEEKWWLPIPLVPLQGLSEKARKQLKSKRESTNQIHKAAMAINSSILGEMDIPDSYMATLPKSGKASTGDAIYRHMTSSGRFSPEKLLDRLKIVSEHEALQLADRVEASMYTWRRKACLNNSKSSWNMVKDLMSITERSDKNYVLAERAESLLFCLKQRYPELSQTSLDICKIHCNKDVGKAVLESYSRVLEGLAFNIVAWIDDVLYVDKTMRGEE

SEQ ID NO: 72464 - protein, 448 aa, Arabidopsis thaliana
  peptide (1)..(448): Ceres Seq. ID no. 4935489
  misc_feature (1)..(194): Pfam Name: Domain of unknown function (DUF315) Pfam Description: Domain of unknown function (DUF315)
  misc_feature (1)..(448): Homolog of NCBI NO: 15223455 NR Description: hypothetical protein; protein id: At1g01700.1
  misc_feature (181)..(448): Homolog of NCBI NO: 25349309 NR Description: hypothetical protein T1N6.8 - Arabidopsis >gi|8671837|gb|AAF78400.1|AC009273_6 Contains strong similarity an unknown protein CAB81591 gi|7263554 from Arabidopsis thaliana
  misc_feature (1)..(194): Homolog of NCBI NO: 25349309 NR Description: hypothetical protein T1N6.8 - Arabidopsis >gi|8671837|gb|AAF78400.1|AC009273_6 Contains strong similarity an unknown protein CAB81591 gi|7263554 from Arabidopsis thaliana
  misc_feature (1)..(448): Homolog of NCBI NO: 15236138 NR Description: putative protein; protein id: At4g00460.1
  misc_feature (2)..(448): Homolog of NCBI NO: 30690159 NR Description: expressed protein [Arabidopsis thaliana]
  misc_feature (118)..(448): Homolog of NCBI NO: 7486457 NR Description: hypothetical protein At2g45890 [imported] - thaliana >gi|3386605|gb|AAC28535.1| hypothetical protein
  misc_feature (2)..(117): Homolog of NCBI NO: 7486457 NR Description: hypothetical protein At2g45890 [imported] - thaliana >gi|3386605|gb|AAC28535.1| hypothetical protein
  misc_feature (1)..(445): Homolog of NCBI NO: 37536670 NR Description: hypothetical protein [Oryza sativa (japonica group)] >gi|10140653|gb|AAG13489.1| hypothetical protein [Oryza
  misc_feature (192)..(448): Homolog of NCBI NO: 7485257 NR Description: hypothetical protein A_IG005I10.1 - Arabidopsis >gi|2252824|gb|AAB62823.1| A_IG005I10.1 gene product [Arabidopsis >gi|6049866|gb|AAF02781.1|AF195115_1 F5I10.1 gene product
  misc_feature (73)..(445): Homolog of NCBI NO: 38345761 NR Description: OSJNBa0065O17.14 [Oryza sativa (japonica
MSTDSFAYHRTCSETSGGGFSDQIDETSSFCTEASPSDWPVLTESNNSASSNFPTVFDLKHNQIETDEHLAVQEISEPELETMKERFSKLLLGEDMSGSGKGVCTAVTISNAITNLYATVFGQNLRLEPLEIEQKTTWKREMNCLLSVCDYIFEFIPKSQNLSNGATVEVMESRPRADIYINLPALRKLDSMLMEALDSFQKTEFWYAEEGSLSMKSTRSATGSFRKVIVQRKEEKWWLPIPLVPLQGLSEKARKQLKSKRESTNQIHKAAMAINSSILGEMDIPDSYMATLPKSGKASTGDAIYRHMTSSGRFSPEKLLDRLKIVSEHEALQLADRVEASMYTWRRKACLNNSKSSWNMVKDLMSITERSDKNYVLAERAESLLFCLKQRYPELSQTSLDICKIHCNKDVGKAVLESYSRVLEGLAFNIVAWIDDVLYVDKTMRGEE

SEQ ID NO: 72465 - protein, 366 aa, Arabidopsis thaliana
  peptide (1)..(366): Ceres Seq. ID no. 4935490
  misc_feature (1)..(112): Pfam Name: Domain of unknown function (DUF315) Pfam Description: Domain of unknown function (DUF315)
  misc_feature (1)..(366): Homolog of NCBI NO: 15223455 NR Description: hypothetical protein; protein id: At1g01700.1
  misc_feature (99)..(366): Homolog of NCBI NO: 25349309 NR Description: hypothetical protein T1N6.8 - Arabidopsis >gi|8671837|gb|AAF78400.1|AC009273_6 Contains strong similarity an unknown protein CAB81591 gi|7263554 from Arabidopsis thaliana
  misc_feature (1)..(112): Homolog of NCBI NO: 25349309 NR Description: hypothetical protein T1N6.8 - Arabidopsis >gi|8671837|gb|AAF78400.1|AC009273_6 Contains strong similarity an unknown protein CAB81591 gi|7263554 from Arabidopsis thaliana
  misc_feature (1)..(366): Homolog of NCBI NO: 15236138 NR Description: putative protein; protein id: At4g00460.1
  misc_feature (1)..(366): Homolog of NCBI NO: 30690159 NR Description: expressed protein [Arabidopsis thaliana]
  misc_feature (36)..(366): Homolog of NCBI NO: 7486457 NR Description: hypothetical protein At2g45890 [imported] - thaliana >gi|3386605|gb|AAC28535.1| hypothetical protein
  misc_feature (1)..(35): Homolog of NCBI NO: 7486457 NR Description: hypothetical protein At2g45890 [imported] - thaliana >gi|3386605|gb|AAC28535.1| hypothetical protein
  misc_feature (1)..(363): Homolog of NCBI NO: 37536670 NR Description: hypothetical protein [Oryza sativa (japonica group)] >gi|10140653|gb|AAG13489.1| hypothetical protein [Oryza
  misc_feature (110)..(366): Homolog of NCBI NO: 7485257 NR Description: hypothetical protein A_IG005I10.1 - Arabidopsis >gi|2252824|gb|AAB62823.1| A_IG005I10.1 gene product [Arabidopsis >gi|6049866|gb|AAF02781.1|AF195115_1 F5I10.1 gene product
  misc_feature (1)..(363): Homolog of NCBI NO: 38345761 NR Description: OSJNBa0065O17.14 [Oryza sativa (japonica
MKERFSKLLLGEDMSGSGKGVCTAVTISNAITNLYATVFGQNLRLEPLEIEQKTTWKREMNCLLSVCDYIFEFIPKSQNLSNGATVEVMESRPRADIYINLPALRKLDSMLMEALDSFQKTEFWYAEEGSLSMKSTRSATGSFRKVIVQRKEEKWWLPIPLVPLQGLSEKARKQLKSKRESTNQIHKAAMAINSSILGEMDIPDSYMATLPKSGKASTGDAIYRHMTSSGRFSPEKLLDRLKIVSEHEALQLADRVEASMYTWRRKACLNNSKSSWNMVKDLMSITERSDKNYVLAERAESLLFCLKQRYPELSQTSLDICKIHCNKDVGKAVLESYSRVLEGLAFNIVAWIDDVLYVDKTMRGEE

SEQ ID NO: 72466 - DNA, 1437 bp, Arabidopsis thaliana
  misc_feature (1)..(1437): Ceres Seq. ID no. 4935519
  misc_feature: MA Experiment ID: 20000265 Result: Up-regulated in Transcription
  misc_feature: MA Experiment 20000265 PARAMETER Experiment Name: At_Open_Flower_P Parameter: Age (day) Value: 21
  misc_feature: MA Experiment 20000265 PARAMETER Experiment Name: At_Open_Flower_P Parameter: Plant Line Value: WS
  misc_feature: MA Experiment 20000265 PARAMETER Experiment Name: At_Open_Flower_P Parameter: Tissue Value: Closed Flower vs. Whole Plant
  misc_feature: MA Experiment ID: 20000286 Result: Up-regulated in Transcription
  misc_feature: MA Experiment 20000286 PARAMETER Experiment Name: At_Open_Flower_P Parameter: Age (day) Value: 21
  misc_feature: MA Experiment 20000286 PARAMETER Experiment Name: At_Open_Flower_P Parameter: Plant Line Value: WS
  misc_feature: MA Experiment 20000286 PARAMETER Experiment Name: At_Open_Flower_P Parameter: Tissue Value: Half Open vs. Whole Plant
  misc_feature: MA Experiment ID: 20000460 Result: Up-regulated in Transcription
  misc_feature: MA Experiment 20000460 PARAMETER Experiment Name: At_10percent_PEG_P Parameter: Age (day) Value: 12
  misc_feature: MA Experiment 20000460 PARAMETER Experiment Name: At_10percent_PEG_P Parameter: Organism Value: A. thaliana
  misc_feature: MA Experiment 20000460 PARAMETER Experiment Name: At_10percent_PEG_P Parameter: Plant Line Value: WS
  misc_feature: MA Experiment 20000460 PARAMETER Experiment Name: At_10percent_PEG_P Parameter: Timepoint (day) Value: 12
  misc_feature: MA Experiment 20000460 PARAMETER Experiment Name: At_10percent_PEG_P Parameter: Tissue Value: Whole Plant
  misc_feature: MA Experiment 20000460 PARAMETER Experiment Name: At_10percent_PEG_P Parameter: Treatment Value: 10percent PEG vs. No Treatment
  misc_feature: MA Experiment ID: 20000527 Result: Up-regulated in Transcription
  misc_feature: MA Experiment 20000527 PARAMETER Experiment Name: At_10percent_PEG_P Parameter: Age (day) Value: 20
  misc_feature: MA Experiment 20000527 PARAMETER Experiment Name: At_10percent_PEG_P Parameter: Organism Value: A. thaliana
  misc_feature: MA Experiment 20000527 PARAMETER Experiment Name: At_10percent_PEG_P Parameter: Plant Line Value: WS
  misc_feature: MA Experiment 20000527 PARAMETER Experiment Name: At_10percent_PEG_P Parameter: Timepoint (day) Value: 20
  misc_feature: MA Experiment 20000527 PARAMETER Experiment Name: At_10percent_PEG_P Parameter: Tissue Value: Whole Plant
  misc_feature: MA Experiment 20000527 PARAMETER Experiment Name: At_10percent_PEG_P Parameter: Treatment Value: 10percent PEG vs. No Treatment
  misc_feature: MA Experiment ID: 20000794 Result: Down-regulated in Transcription
  misc_feature: MA Experiment 20000794 PARAMETER Experiment Name: At_Petals_P Parameter: Age (day) Value: 23-25 days
  misc_feature: MA Experiment 20000794 PARAMETER Experiment Name: At_Petals_P Parameter: Plant Line Value: WS
  misc_feature: MA Experiment 20000794 PARAMETER Experiment Name: At_Petals_P Parameter: Tissue Value: Petals vs. Whole plant
  misc_feature: MA Experiment ID: 20001554 Result: Up-regulated in Transcription
  misc_feature: MA Experiment 20001554 PARAMETER Experiment Name: At_Drought_Soil_Dry_P Parameter: Age (day) Value: 21
  misc_feature: MA Experiment 20001554 PARAMETER Experiment Name: At_Drought_Soil_Dry_P Parameter: Organism Value: A. thaliana
  misc_feature: MA Experiment 20001554 PARAMETER Experiment Name: At_Drought_Soil_Dry_P Parameter: Plant Line Value: WS
  misc_feature: MA Experiment 20001554 PARAMETER Experiment Name: At_Drought_Soil_Dry_P Parameter: Post Timepoint (hr) Value: None
  misc_feature: MA Experiment 20001554 PARAMETER Experiment Name: At_Drought_Soil_Dry_P Parameter: Post-Treatment Value: None
  misc_feature: MA Experiment 20001554 PARAMETER Experiment Name: At_Drought_Soil_Dry_P Parameter: Timepoint (day) Value: 7
  misc_feature: MA Experiment 20001554 PARAMETER Experiment Name: At_Drought_Soil_Dry_P Parameter: Treatment Value: Drought vs. No Drought
  misc_feature: MA Experiment ID: 20001556 Result: Up-regulated in Transcription
  misc_feature: MA Experiment 20001556 PARAMETER Experiment Name: At_Drought_Soil_Dry_P Parameter: Age (day) Value: 26
  misc_feature: MA Experiment 20001556 PARAMETER Experiment Name: At_Drought_Soil_Dry_P Parameter: Organism Value: A. thaliana
  misc_feature: MA Experiment 20001556 PARAMETER Experiment Name: At_Drought_Soil_Dry_P Parameter: Plant Line Value: WS
  misc_feature: MA Experiment 20001556 PARAMETER Experiment Name: At_Drought_Soil_Dry_P Parameter: Post Timepoint (hr) Value: None
  misc_feature: MA Experiment 20001556 PARAMETER Experiment Name: At_Drought_Soil_Dry_P Parameter: Post-Treatment Value: None
  misc_feature: MA Experiment 20001556 PARAMETER Experiment Name: At_Drought_Soil_Dry_P Parameter: Timepoint (day) Value: 12
  misc_feature: MA Experiment 20001556 PARAMETER Experiment Name: At_Drought_Soil_Dry_P Parameter: Treatment Value: Drought vs. No Drought
  misc_feature: MA Experiment ID: 20001904 Result: Up-regulated in Transcription
  misc_feature: MA Experiment 20001904 PARAMETER Experiment Name: At_Drought_Reproduction_P Parameter: Age (day) Value: 37
  misc_feature: MA Experiment 20001904 PARAMETER Experiment Name: At_Drought_Reproduction_P Parameter: Organism Value: A. thaliana
  misc_feature: MA Experiment 20001904 PARAMETER Experiment Name: At_Drought_Reproduction_P Parameter: Plant Line Value: WS
  misc_feature: MA Experiment 20001904 PARAMETER Experiment Name: At_Drought_Reproduction_P Parameter: Timepoint (day) Value: 7
  misc_feature: MA Experiment 20001904 PARAMETER Experiment Name: At_Drought_Reproduction_P Parameter: Tissue Value: Rosettes
  misc_feature: MA Experiment 20001904 PARAMETER Experiment Name: At_Drought_Reproduction_P Parameter: Treatment Value: Drought vs. No Drought
  misc_feature: MA Experiment ID: 20001905 Result: Up-regulated in Transcription
  misc_feature: MA Experiment 20001905 PARAMETER Experiment Name: At_Drought_Reproduction_P Parameter: Age (day) Value: 40
  misc_feature: MA Experiment 20001905 PARAMETER Experiment Name: At_Drought_Reproduction_P Parameter: Organism Value: A. thaliana
  misc_feature: MA Experiment 20001905 PARAMETER Experiment Name: At_Drought_Reproduction_P Parameter: Plant Line Value: WS
  misc_feature: MA Experiment 20001905 PARAMETER Experiment Name: At_Drought_Reproduction_P Parameter: Timepoint (day) Value: 10
  misc_feature: MA Experiment 20001905 PARAMETER Experiment Name: At_Drought_Reproduction_P Parameter: Tissue Value: Rosettes
  misc_feature: MA Experiment 20001905 PARAMETER Experiment Name: At_Drought_Reproduction_P Parameter: Treatment Value: Drought vs. No Drought
atgtcgaggctaatcttcttaattctcgccattctcttctctcttcaattcgttttctaccctttaaatttcatctcctcttcttctcaacctctgatcaaattctctgtttcacccgtcgtatccggatccgggtcggttcatgaaccggaccaaaccgaactcaagcacgtcgttttcggaatcgccgcctctgcgaaattctggaaacaccgtaaagactacgtgaagctctggtggaaaccaaacggtgaaatgaacggcgtcgtttggttagaccaacacattaaccaaaacgacaacgtttcgaaaacattacctccgatcagaatctcctccgacacgtctaggtttcagtacagatacccaaagggtctccgatcggcgatcagaatcacgagaatcgtctcggagacggtgaggctgttgaacggaacagagttggagaaaaacgtgaggtggattgtgatgggagacgacgacactgtgtttttcccggagaatcttgtcaaggttttgagaaagtacgatcacaatcagttttattacatcggaagctcgtcggagagtcatatacagaatctcaagttctcttacgggatggcttatggaggaggagggttcgcgattagctatccgttggctaaagcattagagaaaatgcaagatcgttgtattcagagatattcggaattgtacggctccgatgatcggattcatgcttgtatgtcggaactcggtgttcctttgactaaggaagttggcttccatcagattgatttatacgggaaacttctgggcctattatcggcccatccactggctcctctagtatcgatccaccatttagacttagtggatccagtattcccaaacatgggccgagtcaacgccatgagacgtttcatggtccccgcaaaactcgactcaccgagcctcgcgcagcaatcaatctgctacgacgcggaccaccgatggaccgtgtctgtctcgtggggatacacagtccagatcatacgtggcgtgttgtcagctagagagatggtgatccccacgcgcacgttcatcgattggtacaaacaggcagacgaaagaagctatgcttttaacacgcgtcctatcgccaaaagcgcgtgtcagcgtccgcgagtgtattacctgtccaacgcgcttcctgacttggctttgcgtagaactgctagtgaatacgtgagatggtacgacatgtgggagcctgaatgtgactgggatatgtcggatccttcggaatttgaacgggtcattgtttataagaaacccgacccggatagatggaataaacatagggctccgagaagagattgttgtagagtattgcccacgacgaagaatgggactatggtaatcgatgtaggagcttgtaaagatgatgaatttgctgaattccttgtcaaatag

SEQ ID NO: 72467 - protein, 478 aa, Arabidopsis thaliana
  peptide (1)..(478): Ceres Seq. ID no. 4935520
  misc_feature (193)..(450): Pfam Name: Protein of unknown function, DUF604 Pfam Description: Protein of unknown function, DUF604
  misc_feature (1)..(478): Homolog of NCBI NO: 15223433 NR Description: hypothetical protein; protein id: At1g01570.1
  misc_feature (1)..(478): Homolog of NCBI NO: 25336194 NR Description: F22L4.11 protein - Arabidopsis thaliana Contains similarity to a hypothetical protein F16G20.190
  misc_feature (4)..(440): Homolog of NCBI NO: 18411279 NR Description: contains weak similarity to S. cerevisiae BOB1
  misc_feature (22)..(474): Homolog of NCBI NO: 15238082 NR Description: putative protein; protein id: At5g41460.1 thaliana] >gi|9758054|dbj|BAB08517.1|
  misc_feature (53)..(474): Homolog of NCBI NO: 18416156 NR Description: Expressed protein; protein id: At4g23490.1, by cDNA: gi_15529152 [Arabidopsis thaliana]
  misc_feature (53)..(474): Homolog of NCBI NO: 15529153 NR Description: AT4g23490/F16G20_190 [Arabidopsis thaliana]
  misc_feature (52)..(474): Homolog of NCBI NO: 32488507 NR Description: OSJNBa0011J08.14 [Oryza sativa (japonica
  misc_feature (177)..(474): Homolog of NCBI NO: 15233347 NR Description: putative protein; protein id: At4g11350.1
  misc_feature (4)..(165): Homolog of NCBI NO: 15233347 NR Description: putative protein; protein id: At4g11350.1
  misc_feature (26)..(474): Homolog of NCBI NO: 37536418 NR Description: hypothetical protein [Oryza sativa (japonica group)] >gi|22002140|gb|AAM88624.1| hypothetical protein [Oryza
MSRLIFLILAILFSLQFVFYPLNFISSSSQPLIKFSVSPVVSGSGSVHEPDQTELKHVVFGIAASAKFWKHRKDYVKLWWKPNGEMNGVVWLDQHINQNDNVSKTLPPIRISSDTSRFQYRYPKGLRSAIRITRIVSETVRLLNGTELEKNVRWIVMGDDDTVFFPENLVKVLRKYDHNQFYYIGSSSESHIQNLKFSYGMAYGGGGFAISYPLAKALEKMQDRCIQRYSELYGSDDRIHACMSELGVPLTKEVGFHQIDLYGKLLGLLSAHPLAPLVSIHHLDLVDPVFPNMGRVNAMRRFMVPAKLDSPSLAQQSICYDADHRWTVSVSWGYTVQIIRGVLSAREMVIPTRTFIDWYKQADERSYAFNTRPIAKSACQRPRVYYLSNALPDLALRRTASEYVRWYDMWEPECDWDMSDPSEFERVIVYKKPDPDRWNKHRAPRRDCCRVLPTTKNGTMVIDVGACKDDEFAEFLVK

SEQ ID NO: 72468 - protein, 393 aa, Arabidopsis thaliana
  peptide (1)..(393): Ceres Seq. ID no. 4935521
  misc_feature (108)..(365): Pfam Name: Protein of unknown function, DUF604 Pfam Description: Protein of unknown function, DUF604
  misc_feature (1)..(393): Homolog of NCBI NO: 15223433 NR Description: hypothetical protein; protein id: At1g01570.1
  misc_feature (1)..(393): Homolog of NCBI NO: 25336194 NR Description: F22L4.11 protein - Arabidopsis thaliana Contains similarity to a hypothetical protein F16G20.190
  misc_feature (1)..(355): Homolog of NCBI NO: 18411279 NR Description: contains weak similarity to S. cerevisiae BOB1
  misc_feature (1)..(389): Homolog of NCBI NO: 15238082 NR Description: putative protein; protein id: At5g41460.1 thaliana] >gi|9758054|dbj|BAB08517.1|
  misc_feature (1)..(389): Homolog of NCBI NO: 18416156 NR Description: Expressed protein; protein id: At4g23490.1, by cDNA: gi_15529152 [Arabidopsis thaliana]
  misc_feature (1)..(389): Homolog of NCBI NO: 15529153 NR Description: AT4g23490/F16G20_190 [Arabidopsis thaliana]
  misc_feature (1)..(389): Homolog of NCBI NO: 32488507 NR Description: OSJNBa0011J08.14 [Oryza sativa (japonica
  misc_feature (92)..(389): Homolog of NCBI NO: 15233347 NR Description: putative protein; protein id: At4g11350.1
  misc_feature (1)..(80): Homolog of NCBI NO: 15233347 NR Description: putative protein; protein id: At4g11350.1
  misc_feature (1)..(389): Homolog of NCBI NO: 37536418 NR Description: hypothetical protein [Oryza sativa (japonica group)] >gi|22002140|gb|AAM88624.1| hypothetical protein [Oryza
MNGVVWLDQHINQNDNVSKTLPPIRISSDTSRFQYRYPKGLRSAIRITRIVSETVRLLNGTELEKNVRWIVMGDDDTVFFPENLVKVLRKYDHNQFYYIGSSSESHIQNLKFSYGMAYGGGGFAISYPLAKALEKMQDRCIQRYSELYGSDDRIHACMSELGVPLTKEVGFHQIDLYGKLLGLLSAHPLAPLVSIHHLDLVDPVFPNMGRVNAMRRFMVPAKLDSPSLAQQSICYDADHRWTVSVSWGYTVQIIRGVLSAREMVIPTRTFIDWYKQADERSYAFNTRPIAKSACQRPRVYYLSNALPDLALRRTASEYVRWYDMWEPECDWDMSDPSEFERVIVYKKPDPDRWNKHRAPRRDCCRVLPTTKNGTMVIDVGACKDDEFAEFLVK

SEQ ID NO: 72469 - protein, 322 aa, Arabidopsis thaliana
  peptide (1)..(322): Ceres Seq. ID no. 4935522
  misc_feature (37)..(294): Pfam Name: Protein of unknown function, DUF604 Pfam Description: Protein of unknown function, DUF604
  misc_feature (1)..(322): Homolog of NCBI NO: 15223433 NR Description: hypothetical protein; protein id: At1g01570.1
  misc_feature (1)..(322): Homolog of NCBI NO: 25336194 NR Description: F22L4.11 protein - Arabidopsis thaliana Contains similarity to a hypothetical protein F16G20.190
  misc_feature (1)..(284): Homolog of NCBI NO: 18411279 NR Description: contains weak similarity to S. cerevisiae BOB1
  misc_feature (1)..(318): Homolog of NCBI NO: 15238082 NR Description: putative protein; protein id: At5g41460.1 thaliana] >gi|9758054|dbj|BAB08517.1|
  misc_feature (1)..(318): Homolog of NCBI NO: 18416156 NR Description: Expressed protein; protein id: At4g23490.1, by cDNA: gi_15529152 [Arabidopsis thaliana]
  misc_feature (1)..(318): Homolog of NCBI NO: 15529153 NR Description: AT4g23490/F16G20_190 [Arabidopsis thaliana]
  misc_feature (1)..(318): Homolog of NCBI NO: 32488507 NR Description: OSJNBa0011J08.14 [Oryza sativa (japonica
  misc_feature (21)..(318): Homolog of NCBI NO: 15233347 NR Description: putative protein; protein id: At4g11350.1
  misc_feature (1)..(318): Homolog of NCBI NO: 37536418 NR Description: hypothetical protein [Oryza sativa (japonica group)] >gi|22002140|gb|AAM88624.1| hypothetical protein [Oryza
  misc_feature (10)..(284): Homolog of NCBI NO: 7485555 NR Description: hypothetical protein F16G20.190 - Arabidopsis >gi|3451074|emb|CAA20470.1| putative protein [Arabidopsis >gi|7269197|emb|CAB79304.1| putative protein [Arabidopsis
MGDDDTVFFPENLVKVLRKYDHNQFYYIGSSSESHIQNLKFSYGMAYGGGGFAISYPLAKALEKMQDRCIQRYSELYGSDDRIHACMSELGVPLTKEVGFHQIDLYGKLLGLLSAHPLAPLVSIHHLDLVDPVFPNMGRVNAMRRFMVPAKLDSPSLAQQSICYDADHRWTVSVSWGYTVQIIRGVLSAREMVIPTRTFIDWYKQADERSYAFNTRPIAKSACQRPRVYYLSNALPDLALRRTASEYVRWYDMWEPECDWDMSDPSEFERVIVYKKPDPDRWNKHRAPRRDCCRVLPTTKNGTMVIDVGACKDDEFAEFLVK

SEQ ID NO: 72470 - DNA, 1461 bp, Arabidopsis thaliana
  misc_feature (1)..(1461): Ceres Seq. ID no. 4935571
  misc_feature: MA Experiment ID: 20000328 Result: Down-regulated in Transcription
  misc_feature: MA Experiment 20000328 PARAMETER Experiment Name: At_42deg_Heat_Sub_P Parameter: Age (day) Value: 14
  misc_feature: MA Experiment 20000328 PARAMETER Experiment Name: At_42deg_Heat_Sub_P Parameter: Organism Value: A. thaliana
  misc_feature: MA Experiment 20000328 PARAMETER Experiment Name: At_42deg_Heat_Sub_P Parameter: Plant Line Value: WS
  misc_feature: MA Experiment 20000328 PARAMETER Experiment Name: At_42deg_Heat_Sub_P Parameter: Temperature (deg C) Value: 42 vs. 22
  misc_feature: MA Experiment 20000328 PARAMETER Experiment Name: At_42deg_Heat_Sub_P Parameter: Timepoint (hr) Value: 6
  misc_feature: MA Experiment 20000328 PARAMETER Experiment Name: At_42deg_Heat_Sub_P Parameter: Tissue Value: Aerial
  misc_feature: MA Experiment ID: 20000355 Result: Up-regulated in Transcription
  misc_feature: MA Experiment 20000355 PARAMETER Experiment Name: At_Siliques_Sub_P Parameter: Age (day) Value: 21
  misc_feature: MA Experiment 20000355 PARAMETER Experiment Name: At_Siliques_Sub_P Parameter: Organism Value: A. thaliana
  misc_feature: MA Experiment 20000355 PARAMETER Experiment Name: At_Siliques_Sub_P Parameter: Plant Line Value: WS
  misc_feature: MA Experiment 20000355 PARAMETER Experiment Name: At_Siliques_Sub_P Parameter: Tissue Value: Less Than 5mm Siliques vs. Whole Plant
  misc_feature: MA Experiment ID: 20000440 Result: Up-regulated in Transcription
  misc_feature: MA Experiment 20000440 PARAMETER Experiment Name: At_Closed-Flower__Sub_P Parameter: Tissue Value: Closed Flower vs. Whole Plant
atggagaatttgccaaatcacgaagaaaacgacgatgtgggctatcatcagtcacctggtcccatcgatccaaatgatcattcagcatctgaaactccggtttactcaacaatgagcacagattcttttgcttatcatcgaacatgttctgaaacctctggaggaggcttttcagaccaaatagatgaaaccagcagtttctgcactgaggcttctcctagtgattggcctgtcttaaccgaatccaacaactctgcgagctcaaattttccaactgtcttcgacttgaaacataatcagattgagactgatgagcaccttgcggtccaagaaatttcagagccagcagagctggagacgatgaaggaaagattctcgaagcttctgcttggggaagatatgtcaggaagcggcaaaggcgtttgcaccgcagtgacaatctcaaacgctataaccaatctttatgctactgtttttggacagaatctaagattagaaccattggagatagagcagaagacgacgtggaagagagaaatgaattgccttctctctgtgtgtgactatattttcgagtttatcccaaagtcacagaatctaagcaatggagccactgttgaggtcatggagagtagaccaagagcagatatctacatcaatctgcctgcactcagaaaactagattccatgcttatggaggcattggatagttttcaaaagacagagttttggtatgcagaagaaggaagcttgtcgatgaagtcaacgcgttccgcaactggatcattcaggaaagtgattgtgcagaggaaagaagagaaatggtggttaccgattcctctggttccattacaaggtttatcagagaaggcaaggaaacaacttaagagcaagcgagagagcactaatcaaatccataaagctgctatggccatcaatagcagcatactcggtgaaatggatattcctgattcttacatggcaactcttccaaagagcggaaaagcgagcacaggagatgcaatctatcgacacatgacgagttcagggcggttttcaccagaaaaacttctagatcgtctcaagattgtatcagaacatgaagcgcttcagctggcagatagagtagaagcttcaatgtacacatggagacgcaaagcttgtcttaacaattccaagtcttcatggaatatggtgaaagatttaatgtcaattacagagagaagtgacaagaactatgttttggctgagagagcagagtctttgctcttctgtttgaaacaacggtacccagaattgtctcagacatcgttagatatttgcaagattcattgcaacaaggatgttggaaaagctgtgttagagagttattcaagagttcttgaaggtttagcttttaacatagttgcttggattgatgatgttctttatgtagacaaaacaatgagaggagaagaatga

SEQ ID NO: 72471 - protein, 486 aa, Arabidopsis thaliana
  peptide (1)..(486): Ceres Seq. ID no. 4935572
  misc_feature (12)..(232): Pfam Name: Domain of unknown function (DUF315) Pfam Description: Domain of unknown function (DUF315)
  misc_feature (1)..(486): Homolog of NCBI NO: 15223455 NR Description: hypothetical protein; protein id: At1g01700.1
  misc_feature (219)..(486): Homolog of NCBI NO: 25349309 NR Description: hypothetical protein T1N6.8 - Arabidopsis >gi|8671837|gb|AAF78400.1|AC009273_6 Contains strong similarity an unknown protein CAB81591 gi|7263554 from Arabidopsis thaliana
  misc_feature (1)..(232): Homolog of NCBI NO: 25349309 NR Description: hypothetical protein T1N6.8 - Arabidopsis >gi|8671837|gb|AAF78400.1|AC009273_6 Contains strong similarity an unknown protein CAB81591 gi|7263554 from Arabidopsis thaliana
  misc_feature (1)..(486): Homolog of NCBI NO: 15236138 NR Description: putative protein; protein id: At4g00460.1
  misc_feature (39)..(486): Homolog of NCBI NO: 30690159 NR Description: expressed protein [Arabidopsis thaliana]
  misc_feature (156)..(486): Homolog of NCBI NO: 7486457 NR Description: hypothetical protein At2g45890 [imported] - thaliana >gi|3386605|gb|AAC28535.1| hypothetical protein
  misc_feature (39)..(155): Homolog of NCBI NO: 7486457 NR Description: hypothetical protein At2g45890 [imported] - thaliana >gi|3386605|gb|AAC28535.1| hypothetical protein
  misc_feature (36)..(483): Homolog of NCBI NO: 37536670 NR Description: hypothetical protein [Oryza sativa (japonica group)] >gi|10140653|gb|AAG13489.1| hypothetical protein [Oryza
  misc_feature (230)..(486): Homolog of NCBI NO: 7485257 NR Description: hypothetical protein A_IG005I10.1 - Arabidopsis >gi|2252824|gb|AAB62823.1| A_IG005I10.1 gene product [Arabidopsis >gi|6049866|gb|AAF02781.1|AF195115_1 F5I10.1 gene product
  misc_feature (117)..(483): Homolog of NCBI NO: 38345761 NR Description: OSJNBa0065O17.14 [Oryza sativa (japonica
MENLPNHEENDDVGYHQSPGPIDPNDHSASETPVYSTMSTDSFAYHRTCSETSGGGFSDQIDETSSFCTEASPSDWPVLTESNNSASSNFPTVFDLKHNQIETDEHLAVQEISEPAELETMKERFSKLLLGEDMSGSGKGVCTAVTISNAITNLYATVFGQNLRLEPLEIEQKTTWKREMNCLLSVCDYIFEFIPKSQNLSNGATVEVMESRPRADIYINLPALRKLDSMLMEALDSFQKTEFWYAEEGSLSMKSTRSATGSFRKVIVQRKEEKWWLPIPLVPLQGLSEKARKQLKSKRESTNQIHKAAMAINSSILGEMDIPDSYMATLPKSGKASTGDAIYRHMTSSGRFSPEKLLDRLKIVSEHEALQLADRVEASMYTWRRKACLNNSKSSWNMVKDLMSITERSDKNYVLAERAESLLFCLKQRYPELSQTSLDICKIHCNKDVGKAVLESYSRVLEGLAFNIVAWIDDVLYVDKTMRGEE

SEQ ID NO: 72472 - protein, 449 aa, Arabidopsis thaliana
  peptide (1)..(449): Ceres Seq. ID no. 4935573
  misc_feature (1)..(195): Pfam Name: Domain of unknown function (DUF315) Pfam Description: Domain of unknown function (DUF315)
  misc_feature (1)..(449): Homolog of NCBI NO: 15223455 NR Description: hypothetical protein; protein id: At1g01700.1
  misc_feature (182)..(449): Homolog of NCBI NO: 25349309 NR Description: hypothetical protein T1N6.8 - Arabidopsis >gi|8671837|gb|AAF78400.1|AC009273_6 Contains strong similarity an unknown protein CAB81591 gi|7263554 from Arabidopsis thaliana
  misc_feature (1)..(195): Homolog of NCBI NO: 25349309 NR Description: hypothetical protein T1N6.8 - Arabidopsis >gi|8671837|gb|AAF78400.1|AC009273_6 Contains strong similarity an unknown protein CAB81591 gi|7263554 from Arabidopsis thaliana
  misc_feature (1)..(449): Homolog of NCBI NO: 15236138 NR Description: putative protein; protein id: At4g00460.1
  misc_feature (2)..(449): Homolog of NCBI NO: 30690159 NR Description: expressed protein [Arabidopsis thaliana]
  misc_feature (119)..(449): Homolog of NCBI NO: 7486457 NR Description: hypothetical protein At2g45890 [imported] - thaliana >gi|3386605|gb|AAC28535.1| hypothetical protein
  misc_feature (2)..(118): Homolog of NCBI NO: 7486457 NR Description: hypothetical protein At2g45890 [imported] - thaliana >gi|3386605|gb|AAC28535.1| hypothetical protein
  misc_feature (1)..(446): Homolog of NCBI NO: 37536670 NR Description: hypothetical protein [Oryza sativa (japonica group)] >gi|10140653|gb|AAG13489.1| hypothetical protein [Oryza
  misc_feature (193)..(449): Homolog of NCBI NO: 7485257 NR Description: hypothetical protein A_IG005I10.1 - Arabidopsis >gi|2252824|gb|AAB62823.1| A_IG005I10.1 gene product [Arabidopsis >gi|6049866|gb|AAF02781.1|AF195115_1 F5I10.1 gene product
  misc_feature (80)..(446): Homolog of NCBI NO: 38345761 NR Description: OSJNBa0065O17.14 [Oryza sativa (japonica
MSTDSFAYHRTCSETSGGGFSDQIDETSSFCTEASPSDWPVLTESNNSASSNFPTVFDLKHNQIETDEHLAVQEISEPAELETMKERFSKLLLGEDMSGSGKGVCTAVTISNAITNLYATVFGQNLRLEPLEIEQKTTWKREMNCLLSVCDYIFEFIPKSQNLSNGATVEVMESRPRADIYINLPALRKLDSMLMEALDSFQKTEFWYAEEGSLSMKSTRSATGSFRKVIVQRKEEKWWLPIPLVPLQGLSEKARKQLKSKRESTNQIHKAAMAINSSILGEMDIPDSYMATLPKSGKASTGDAIYRHMTSSGRFSPEKLLDRLKIVSEHEALQLADRVEASMYTWRRKACLNNSKSSWNMVKDLMSITERSDKNYVLAERAESLLFCLKQRYPELSQTSLDICKIHCNKDVGKAVLESYSRVLEGLAFNIVAWIDDVLYVDKTMRGEE

SEQ ID NO: 72473 - protein, 366 aa, Arabidopsis thaliana; identical to SEQ ID NO: 72465
  peptide (1)..(366): Ceres Seq. ID no. 4935574
  misc_feature (1)..(112): Pfam Name: Domain of unknown function (DUF315) Pfam Description: Domain of unknown function (DUF315)
  misc_feature (1)..(366): Homolog of NCBI NO: 15223455 NR Description: hypothetical protein; protein id: At1g01700.1
  misc_feature (99)..(366): Homolog of NCBI NO: 25349309 NR Description: hypothetical protein T1N6.8 - Arabidopsis >gi|8671837|gb|AAF78400.1|AC009273_6 Contains strong similarity an unknown protein CAB81591 gi|7263554 from Arabidopsis thaliana
  misc_feature (1)..(112): Homolog of NCBI NO: 25349309 NR Description: hypothetical protein T1N6.8 - Arabidopsis >gi|8671837|gb|AAF78400.1|AC009273_6 Contains strong similarity an unknown protein CAB81591 gi|7263554 from Arabidopsis thaliana
  misc_feature (1)..(366): Homolog of NCBI NO: 15236138 NR Description: putative protein; protein id: At4g00460.1
  misc_feature (1)..(366): Homolog of NCBI NO: 30690159 NR Description: expressed protein [Arabidopsis thaliana]
  misc_feature (36)..(366): Homolog of NCBI NO: 7486457 NR Description: hypothetical protein At2g45890 [imported] - thaliana >gi|3386605|gb|AAC28535.1| hypothetical protein
  misc_feature (1)..(35): Homolog of NCBI NO: 7486457 NR Description: hypothetical protein At2g45890 [imported] - thaliana >gi|3386605|gb|AAC28535.1| hypothetical protein
  misc_feature (1)..(363): Homolog of NCBI NO: 37536670 NR Description: hypothetical protein [Oryza sativa (japonica group)] >gi|10140653|gb|AAG13489.1| hypothetical protein [Oryza
  misc_feature (110)..(366): Homolog of NCBI NO: 7485257 NR Description: hypothetical protein A_IG005I10.1 - Arabidopsis >gi|2252824|gb|AAB62823.1| A_IG005I10.1 gene product [Arabidopsis >gi|6049866|gb|AAF02781.1|AF195115_1 F5I10.1 gene product
  misc_feature (1)..(363): Homolog of NCBI NO: 38345761 NR Description: OSJNBa0065O17.14 [Oryza sativa (japonica

SEQ ID NO: 72474 - DNA, 1140 bp, Arabidopsis thaliana
  misc_feature (1)..(1140): Ceres Seq. ID no. 4935674
  misc_feature: MA Experiment ID: 20000173 Result: Down-regulated in Transcription
  misc_feature: MA Experiment 20000173 PARAMETER Experiment Name: At_42deg_Heat_P Parameter: Age (day) Value: 14
  misc_feature: MA Experiment 20000173 PARAMETER Experiment Name: At_42deg_Heat_P Parameter: Organism Value: A. thaliana
  misc_feature: MA Experiment 20000173 PARAMETER Experiment Name: At_42deg_Heat_P Parameter: Plant Line Value: WS
  misc_feature: MA Experiment 20000173 PARAMETER Experiment Name: At_42deg_Heat_P Parameter: Temperature (deg C) Value: 42 vs. 22
  misc_feature: MA Experiment 20000173 PARAMETER Experiment Name: At_42deg_Heat_P Parameter: Timepoint (hr) Value: 6
  misc_feature: MA Experiment 20000173 PARAMETER Experiment Name: At_42deg_Heat_P Parameter: Tissue Value: Aerial
  misc_feature: MA Experiment ID: 20000182 Result: Up-regulated in Transcription
  misc_feature: MA Experiment 20000182 PARAMETER Experiment Name: At_2mM_SA_P Parameter: Age (day) Value: 14
  misc_feature: MA Experiment 20000182 PARAMETER Experiment Name: At_2mM_SA_P Parameter: Organism Value: A. thaliana
  misc_feature: MA Experiment 20000182 PARAMETER Experiment Name: At_2mM_SA_P Parameter: Plant Line Value: WS
  misc_feature: MA Experiment 20000182 PARAMETER Experiment Name: At_2mM_SA_P Parameter: Timepoint (hr) Value: 6
  misc_feature: MA Experiment 20000182 PARAMETER Experiment Name: At_2mM_SA_P Parameter: Tissue Value: Aerial
  misc_feature: MA Experiment 20000182 PARAMETER Experiment Name: At_2mM_SA_P Parameter: Treatment Value: 2mM SA vs. No Treatment
  misc_feature: MA Experiment ID: 20000794 Result: Up-regulated in Transcription
  misc_feature: MA Experiment 20000794 PARAMETER Experiment Name: At_Petals_P Parameter: Age (day) Value: 23-25 days
  misc_feature: MA Experiment 20000794 PARAMETER Experiment Name: At_Petals_P Parameter: Plant Line Value: WS
  misc_feature: MA Experiment 20000794 PARAMETER Experiment Name: At_Petals_P Parameter: Tissue Value: Petals vs. Whole plant
atgtacccgccacctccctcaagcatctacgctcctccgatgctggtgaattgctccggttgccggacgcctctccagctcccatccggcgcccgatctattcgctgcgctctctgccaggctgttactcatatcgccgaccctcgcaccgcccctcctccgcaaccttcctccgccccttctccgcctccccaaatccacgcgcctcccggtcagctgcctcacccccatggcaggaagagggccgtgatctgtggcatctcgtatcgtttctctcgccacgagctcaaaggctgcatcaacgacgccaagtgcatgcgtcaccttctcatcaacaaattcaaattctccccagattcaattctcatgcttaccgaggaagaaactgatccatatcgtatcccgaccaagcaaaacatgaggatggcattgtattggctcgtacagggatgcacagcaggcgactcacttgtcttccactactctggtcatggttcgcgtcaaagaaactacaacggtgatgaagttgatggctatgatgaaacactctgtcctctggattttgaaactcaggggatgattgtagacgatgagatcaacgcaaccattgtacgccctcttccacatggtgtcaagctccattcaattatcgatgcttgccatagtggtaccgttctggatttacccttcctatgcagaatgaacagagctgggcagtatgtgtgggaggatcatcggcctaggtcaggtttgtggaaaggaactgctggtggagaagccatttcaattagtggatgtgatgatgatcagacttcggccgacacatcattggttcctcctctcatgattaaaacacatacacaggcgctgtcgaagatcacgtctacgggtgctatgactttctgttttattcaagcaattgaacgcagcgcacaaggcacaacctatggaagccttctgaattctatgcgcaccacaataaggaatacagggaatgatggtggtggtagtggtggagttgtgacgactgtgctgagcatgcttctgacagggggaagtgcgattgggggattaagacaggagcctcaactgactgcttgccaaacattcgatgtctatgcaaagcctttcactctctag

SEQ ID NO: 72475 - protein, 379 aa, Arabidopsis thaliana
  peptide (1)..(379): Ceres Seq. ID no. 4935675
  misc_feature (80)..(379): Pfam Name: Caspase domain Pfam Description: Caspase domain
  misc_feature (1)..(379): Homolog of NCBI NO: 3258570 NR Description: Unknown protein [Arabidopsis thaliana]
  misc_feature (1)..(379): Homolog of NCBI NO: 30678252 NR Description: expressed protein [Arabidopsis thaliana]
  misc_feature (30)..(379): Homolog of NCBI NO: 37536924 NR Description: hypothetical protein [Oryza sativa (japonica group)] >gi|12597889|gb|AAG60197.1| hypothetical protein [Oryza >gi|31433553|gb|AAP55051.1| hypothetical protein [Oryza sativa
  misc_feature (44)..(379): Homolog of NCBI NO: 32482814 NR Description: metacaspase 2 [Arabidopsis thaliana]
  misc_feature (14)..(77): Homolog of NCBI NO: 32482814 NR Description: metacaspase 2 [Arabidopsis thaliana]
  misc_feature (44)..(296): Homolog of NCBI NO: 7485453 NR Description: hypothetical protein F13M23.250 - Arabidopsis >gi|4455254|emb|CAB36753.1| putative protein [Arabidopsis >gi|7269361|emb|CAB79420.1| putative protein [Arabidopsis
  misc_feature (44)..(296): Homolog of NCBI NO: 30686772 NR Description: expressed protein [Arabidopsis thaliana]
  misc_feature (16)..(328): Homolog of NCBI NO: 11358463 NR Description: hypothetical protein [imported] - Arabidopsis
  misc_feature (16)..(328): Homolog of NCBI NO: 15237654 NR Description: expressed protein; protein id: At5g64240.1,
  misc_feature (16)..(328): Homolog of NCBI NO: 37788549 NR Description: metacaspase 3 [Arabidopsis thaliana]
MYPPPPSSIYAPPMLVNCSGCRTPLQLPSGARSIRCALCQAVTHIADPRTAPPPQPSSAPSPPPQIHAPPGQLPHPHGRKRAVICGISYRFSRHELKGCINDAKCMRHLLINKFKFSPDSILMLTEEETDPYRIPTKQNMRMALYWLVQGCTAGDSLVFHYSGHGSRQRNYNGDEVDGYDETLCPLDFETQGMIVDDEINATIVRPLPHGVKLHSIIDACHSGTVLDLPFLCRMNRAGQYVWEDHRPRSGLWKGTAGGEAISISGCDDDQTSADTSLVPPLMIKTHTQALSKITSTGAMTFCFIQAIERSAQGTTYGSLLNSMRTTIRNTGNDGGGSGGVVTTVLSMLLTGGSAIGGLRQEPQLTACQTFDVYAKPFTL

SEQ ID NO: 72476 - protein, 366 aa, Arabidopsis thaliana
  peptide (1)..(366): Ceres Seq. ID no. 4935676
  misc_feature (67)..(366): Pfam Name: Caspase domain Pfam Description: Caspase domain
  misc_feature (1)..(366): Homolog of NCBI NO: 3258570 NR Description: Unknown protein [Arabidopsis thaliana]
  misc_feature (1)..(366): Homolog of NCBI NO: 30678252 NR Description: expressed protein [Arabidopsis thaliana]
  misc_feature (17)..(366): Homolog of NCBI NO: 37536924 NR Description: hypothetical protein [Oryza sativa (japonica group)] >gi|12597889|gb|AAG60197.1| hypothetical protein [Oryza >gi|31433553|gb|AAP55051.1| hypothetical protein [Oryza sativa
  misc_feature (31)..(366): Homolog of NCBI NO: 32482814 NR Description: metacaspase 2 [Arabidopsis thaliana]
  misc_feature (1)..(64): Homolog of NCBI NO: 32482814 NR Description: metacaspase 2 [Arabidopsis thaliana]
  misc_feature (31)..(283): Homolog of NCBI NO: 7485453 NR Description: hypothetical protein F13M23.250 - Arabidopsis >gi|4455254|emb|CAB36753.1| putative protein [Arabidopsis >gi|7269361|emb|CAB79420.1| putative protein [Arabidopsis
  misc_feature (31)..(283): Homolog of NCBI NO: 30686772 NR Description: expressed protein [Arabidopsis thaliana]
  misc_feature (3)..(315): Homolog of NCBI NO: 11358463 NR Description: hypothetical protein [imported] - Arabidopsis
  misc_feature (3)..(315): Homolog of NCBI NO: 15237654 NR Description: expressed protein; protein id: At5g64240.1,
  misc_feature (3)..(315): Homolog of NCBI NO: 37788549 NR Description: metacaspase 3 [Arabidopsis thaliana]
MLVNCSGCRTPLQLPSGARSIRCALCQAVTHIADPRTAPPPQPSSAPSPPPQIHAPPGQLPHPHGRKRAVICGISYRFSRHELKGCINDAKCMRHLLINKFKFSPDSILMLTEEETDPYRIPTKQNMRMALYWLVQGCTAGDSLVFHYSGHGSRQRNYNGDEVDGYDETLCPLDFETQGMIVDDEINATIVRPLPHGVKLHSIIDACHSGTVLDLPFLCRMNRAGQYVWEDHRPRSGLWKGTAGGEAISISGCDDDQTSADTSLVPPLMIKTHTQALSKITSTGAMTFCFIQAIERSAQGTTYGSLLNSMRTTIRNTGNDGGGSGGVVTTVLSMLLTGGSAIGGLRQEPQLTACQTFDVYAKPFTL

SEQ ID NO: 72477 - protein, 274 aa, Arabidopsis thaliana
  peptide (1)..(274): Ceres Seq. ID no. 4935677
  misc_feature (1)..(274): Pfam Name: Caspase domain Pfam Description: Caspase domain
  misc_feature (1)..(274): Homolog of NCBI NO: 3258570 NR Description: Unknown protein [Arabidopsis thaliana]
  misc_feature (1)..(274): Homolog of NCBI NO: 30678252 NR Description: expressed protein [Arabidopsis thaliana]
  misc_feature (1)..(274): Homolog of NCBI NO: 37536924 NR Description: hypothetical protein [Oryza sativa (japonica group)] >gi|12597889|gb|AAG60197.1| hypothetical protein [Oryza >gi|31433553|gb|AAP55051.1| hypothetical protein [Oryza sativa
  misc_feature (1)..(274): Homolog of NCBI NO: 32482814 NR Description: metacaspase 2 [Arabidopsis thaliana]
  misc_feature (1)..(191): Homolog of NCBI NO: 7485453 NR Description: hypothetical protein F13M23.250 - Arabidopsis >gi|4455254|emb|CAB36753.1| putative protein [Arabidopsis >gi|7269361|emb|CAB79420.1| putative protein [Arabidopsis
  misc_feature (1)..(191): Homolog of NCBI NO: 30686772 NR Description: expressed protein [Arabidopsis thaliana]
  misc_feature (1)..(223): Homolog of NCBI NO: 11358463 NR Description: hypothetical protein [imported] - Arabidopsis
  misc_feature (1)..(223): Homolog of NCBI NO: 15237654 NR Description: expressed protein; protein id: At5g64240.1,
  misc_feature (1)..(223): Homolog of NCBI NO: 37788549 NR Description: metacaspase 3 [Arabidopsis thaliana]
  misc_feature (1)..(181): Homolog of NCBI NO: 30697974 NR Description: expressed protein [Arabidopsis thaliana]
MRHLLINKFKFSPDSILMLTEEETDPYRIPTKQNMRMALYWLVQGCTAGDSLVFHYSGHGSRQRNYNGDEVDGYDETLCPLDFETQGMIVDDEINATIVRPLPHGVKLHSIIDACHSGTVLDLPFLCRMNRAGQYVWEDHRPRSGLWKGTAGGEAISISGCDDDQTSADTSLVPPLMIKTHTQALSKITSTGAMTFCFIQAIERSAQGTTYGSLLNSMRTTIRNTGNDGGGSGGVVTTVLSMLLTGGSAIGGLRQEPQLTACQTFDVYAKPFTL

SEQ ID NO: 72478 - DNA, 1671 bp, Arabidopsis thaliana
  misc_feature (1)..(1671): Ceres Seq. ID no. 4935684
  misc_feature: MA Experiment ID: 20000180 Result: Down-regulated in Transcription
  misc_feature: MA Experiment 20000180 PARAMETER Experiment Name: At_Germinating_Seeds_P Parameter: Age (hr) Value: 24 vs. 0
  misc_feature: MA Experiment 20000180 PARAMETER Experiment Name: At_Germinating_Seeds_P Parameter: Tissue Value: Germinating Seeds
  misc_feature: MA Experiment ID: 20000182 Result: Up-regulated in Transcription
  misc_feature: MA Experiment 20000182 PARAMETER Experiment Name: At_2mM_SA_P Parameter: Age (day) Value: 14
  misc_feature: MA Experiment 20000182 PARAMETER Experiment Name: At_2mM_SA_P Parameter: Organism Value: A. thaliana
  misc_feature: MA Experiment 20000182 PARAMETER Experiment Name: At_2mM_SA_P Parameter: Plant Line Value: WS
  misc_feature: MA Experiment 20000182 PARAMETER Experiment Name: At_2mM_SA_P Parameter: Timepoint (hr) Value: 6
  misc_feature: MA Experiment 20000182 PARAMETER Experiment Name: At_2mM_SA_P Parameter: Tissue Value: Aerial
  misc_feature: MA Experiment 20000182 PARAMETER Experiment Name: At_2mM_SA_P Parameter: Treatment Value: 2mM SA vs. No Treatment
  misc_feature: MA Experiment ID: 20000184 Result: Down-regulated in Transcription
  misc_feature: MA Experiment 20000184 PARAMETER Experiment Name: At_Shoots__P Parameter: Age (day) Value: 7
  misc_feature: MA Experiment 20000184 PARAMETER Experiment Name: At_Shoots__P Parameter: Tissue Value: Shoots vs. Whole Plant
  misc_feature: MA Experiment ID: 20001905 Result: Down-regulated in Transcription
  misc_feature: MA Experiment 20001905 PARAMETER Experiment Name: At_Drought_Reproduction_P Parameter: Age (day) Value: 40
  misc_feature: MA Experiment 20001905 PARAMETER Experiment Name: At_Drought_Reproduction_P Parameter: Organism Value: A. thaliana
  misc_feature: MA Experiment 20001905 PARAMETER Experiment Name: At_Drought_Reproduction_P Parameter: Plant Line Value: WS
  misc_feature: MA Experiment 20001905 PARAMETER Experiment Name: At_Drought_Reproduction_P Parameter: Timepoint (day) Value: 10
  misc_feature: MA Experiment 20001905 PARAMETER Experiment Name: At_Drought_Reproduction_P Parameter: Tissue Value: Rosettes
  misc_feature: MA Experiment 20001905 PARAMETER Experiment Name: At_Drought_Reproduction_P Parameter: Treatment Value: Drought vs. No Drought
  misc_feature: Pfam Name: GRAM Pfam Description: GRAM domain
atgggccaagaaagtgagagcccaaaagaggccgatcgttcgtttttgactcaatggccgttgacgttgacatcgtacgccgcacccaacgaccgccaaacagcaaacaacaacactttcccctttctctctctaaacatggcgatgctttctactgcttccgtttcggggagcgtcgaccttcctcgaggaaccatgaaggttgactcgtctgcgtctccggaggtcgtatccgatctcccaccatcttccccaaagggctcacctgatcgccatgacccttccacttcttctccgagccccagtcgtggtggtgacaatcagtctgaagtcatatccaagagtgaagagtatcggcaattgtttcggcttccagctgacgaaggtcatatgtacctcttcatccattatatctgcttttactccaacatctttggttatgagaccaagaaaattatcccatttgctgaaatatcttgtgttaaacgagccaagactgctggtatttttcctaatgccattgagattttagctggagggaagaagtacttttttgcatcgtttctttcccgcgatgaagctttcaagcttatccatgatggatggttggaatatggtagtgctgtcaaatcagaaggcgagattctggtgaccgaaccgcaggtaagcgatggagttgttaaaagggcacgcagttccatggatttggccaatgaactagatattccagtaagggatgaaactcttcatctttccagcagttccagtcttcctgtcattagtcagaatggcgttccaccttcatccgttcagcggcacgctgaaccagatgtagatgttgtggcggccaatactttcaactggaagcctgaagatacagatgcacctaaattgtcatctgactttacaaagattccagtagaagagttctttagattgtttttttcagatggtgctgtcagttttgttgaatctttccataaaaattgtggagacaaaggtgcaaagtttggtggctgccaggagtcacagaaatttcggatgtacagaaatagccatctggttattgaaacatcacaggagatcagcgatgtgccttatgcagattattttacggtagagggagtctgggacttgaaaagagattgcagagactcggtagaaggttgtatattggatgtttatgtcaatgtggccttctctaaaagaacagtgtggaaagggaataagttgattgaggatggtgaaccgctagcagcaagggaagaaagagtatctgaatgtgacgaggaggggaaggtggaaatggtgggcgaaggggtagttaaaaaaagcttaaaggaagcatgggtgaatctgacttcatttgtgaagaggcaaagcgggacaaggcaggttatagtattagcgtttgcagtaatcttactgatgcaggtgacgatagtggtgctactgaaaaaaggaggaggggggcaagtggagtatcatgagaggtacgacgagtacagtgtaaacggggagactttggggtggttagagaagagaatgcatttcctgagggaagagatgatgatggttgaggatcgtttgcagaggatgcgacaagaccatgccgccttgaaggctcagttccaccatttggaacgcctcctccgccgcaacaaacagtaa

SEQ ID NO: 72479 - protein, 556 aa, Arabidopsis thaliana
  peptide (1)..(556): Ceres Seq. ID no. 4935685
  misc_feature: Pfam Name: GRAM Pfam Description: GRAM domain
  misc_feature (1)..(556): Homolog of NCBI NO: 15217621 NR Description: unknown protein; protein id: At1g02120.1
  misc_feature (47)..(351): Homolog of NCBI NO: 18086353 NR Description: At1g02120/T7I23_26 [Arabidopsis thaliana]
  misc_feature (334)..(359): Homolog of NCBI NO: 18086353 NR Description: At1g02120/T7I23_26 [Arabidopsis thaliana]
  misc_feature (47)..(128): Homolog of NCBI NO: 18086353 NR Description: At1g02120/T7I23_26 [Arabidopsis thaliana]
  misc_feature (436)..(552): Homolog of NCBI NO: 34393622 NR Description: unknown protein [Oryza sativa (japonica
  misc_feature (355)..(408): Homolog of NCBI NO: 34393622 NR Description: unknown protein [Oryza sativa (japonica
  misc_feature (69)..(309): Homolog of NCBI NO: 22760671 NR Description: unnamed protein product [Homo sapiens]
  misc_feature (128)..(302): Homolog of NCBI NO: 39595679 NR Description: Hypothetical protein CBG12618 [Caenorhabditis
  misc_feature (128)..(309): Homolog of NCBI NO: 7959333 NR Description: KIAA1533 protein [Homo sapiens]
  misc_feature (128)..(309): Homolog of NCBI NO: 24308247 NR Description: KIAA1533 protein [Homo sapiens]
MGQESESPKEADRSFLTQWPLTLTSYAAPNDRQTANNNTFPFLSLNMAMLSTASVSGSVDLPRGTMKVDSSASPEVVSDLPPSSPKGSPDRHDPSTSSPSPSRGGDNQSEVISKSEEYRQLFRLPADEGHMYLFIHYICFYSNIFGYETKKIIPFAEISCVKRAKTAGIFPNAIEILAGGKKYFFASFLSRDEAFKLIHDGWLEYGSAVKSEGEILVTEPQVSDGVVKRARSSMDLANELDIPVRDETLHLSSSSSLPVISQNGVPPSSVQRHAEPDVDVVAANTFNWKPEDTDAPKLSSDFTKIPVEEFFRLFFSDGAVSFVESFHKNCGDKGAKFGGCQESQKFRMYRNSHLVIETSQEISDVPYADYFTVEGVWDLKRDCRDSVEGCILDVYVNVAFSKRTVWKGNKLIEDGEPLAAREERVSECDEEGKVEMVGEGVVKKSLKEAWVNLTSFVKRQSGTRQVIVLAFAVILLMQVTIVVLLKKGGGGQVEYHERYDEYSVNGETLGWLEKRMHFLREEMMMVEDRLQRMRQDHAALKAQFHHLERLLRRNKQ

SEQ ID NO: 72480 - protein, 510 aa, Arabidopsis thaliana
  peptide (1)..(510): Ceres Seq. ID no. 4935686
  misc_feature: Pfam Name: GRAM Pfam Description: GRAM domain
  misc_feature (1)..(510): Homolog of NCBI NO: 15217621 NR Description: unknown protein; protein id: At1g02120.1
  misc_feature (1)..(305): Homolog of NCBI NO: 18086353 NR Description: At1g02120/T7I23_26 [Arabidopsis thaliana]
  misc_feature (288)..(313): Homolog of NCBI NO: 18086353 NR Description: At1g02120/T7I23_26 [Arabidopsis thaliana]
  misc_feature (1)..(82): Homolog of NCBI NO: 18086353 NR Description: At1g02120/T7I23_26 [Arabidopsis thaliana]
  misc_feature (390)..(506): Homolog of NCBI NO: 34393622 NR Description: unknown protein [Oryza sativa (japonica
  misc_feature (309)..(362): Homolog of NCBI NO: 34393622 NR Description: unknown protein [Oryza sativa (japonica
  misc_feature (23)..(263): Homolog of NCBI NO: 22760671 NR Description: unnamed protein product [Homo sapiens]
  misc_feature (82)..(256): Homolog of NCBI NO: 39595679 NR Description: Hypothetical protein CBG12618 [Caenorhabditis
  misc_feature (82)..(263): Homolog of NCBI NO: 7959333 NR Description: KIAA1533 protein [Homo sapiens]
  misc_feature (82)..(263): Homolog of NCBI NO: 24308247 NR Description: KIAA1533 protein [Homo sapiens]
MAMLSTASVSGSVDLPRGTMKVDSSASPEVVSDLPPSSPKGSPDRHDPSTSSPSPSRGGDNQSEVISKSEEYRQLFRLPADEGHMYLFIHYICFYSNIFGYETKKIIPFAEISCVKRAKTAGIFPNAIEILAGGKKYFFASFLSRDEAFKLIHDGWLEYGSAVKSEGEILVTEPQVSDGVVKRARSSMDLANELDIPVRDETLHLSSSSSLPVISQNGVPPSSVQRHAEPDVDVVAANTFNWKPEDTDAPKLSSDFTKIPVEEFFRLFFSDGAVSFVESFHKNCGDKGAKFGGCQESQKFRMYRNSHLVIETSQEISDVPYADYFTVEGVWDLKRDCRDSVEGCILDVYVNVAFSKRTVWKGNKLIEDGEPLAAREERVSECDEEGKVEMVGEGVVKKSLKEAWVNLTSFVKRQSGTRQVIVLAFAVILLMQVTIVVLLKKGGGGQVEYHERYDEYSVNGETLGWLEKRMHFLREEMMMVEDRLQRMRQDHAALKAQFHHLERLLRRNKQ

SEQ ID NO: 72481 - protein, 508 aa, Arabidopsis thaliana
  peptide (1)..(508): Ceres Seq. ID no. 4935687
  misc_feature: Pfam Name: GRAM Pfam Description: GRAM domain
  misc_feature (1)..(508): Homolog of NCBI NO: 15217621 NR Description: unknown protein; protein id: At1g02120.1
  misc_feature (1)..(303): Homolog of NCBI NO: 18086353 NR Description: At1g02120/T7I23_26 [Arabidopsis thaliana]
  misc_feature (286)..(311): Homolog of NCBI NO: 18086353 NR Description: At1g02120/T7I23_26 [Arabidopsis thaliana]
  misc_feature (1)..(80): Homolog of NCBI NO: 18086353 NR Description: At1g02120/T7I23_26 [Arabidopsis thaliana]
  misc_feature (388)..(504): Homolog of NCBI NO: 34393622 NR Description: unknown protein [Oryza sativa (japonica
  misc_feature (307)..(360): Homolog of NCBI NO: 34393622 NR Description: unknown protein [Oryza sativa (japonica
  misc_feature (21)..(261): Homolog of NCBI NO: 22760671 NR Description: unnamed protein product [Homo sapiens]
  misc_feature (80)..(254): Homolog of NCBI NO: 39595679 NR Description: Hypothetical protein CBG12618 [Caenorhabditis
  misc_feature (80)..(261): Homolog of NCBI NO: 7959333 NR Description: KIAA1533 protein [Homo sapiens]
  misc_feature (80)..(261): Homolog of NCBI NO: 24308247 NR Description: KIAA1533 protein [Homo sapiens]
MLSTASVSGSVDLPRGTMKVDSSASPEVVSDLPPSSPKGSPDRHDPSTSSPSPSRGGDNQSEVISKSEEYRQLFRLPADEGHMYLFIHYICFYSNIFGYETKKIIPFAEISCVKRAKTAGIFPNAIEILAGGKKYFFASFLSRDEAFKLIHDGWLEYGSAVKSEGEILVTEPQVSDGVVKRARSSMDLANELDIPVRDETLHLSSSSSLPVISQNGVPPSSVQRHAEPDVDVVAANTFNWKPEDTDAPKLSSDFTKIPVEEFFRLFFSDGAVSFVESFHKNCGDKGAKFGGCQESQKFRMYRNSHLVIETSQEISDVPYADYFTVEGVWDLKRDCRDSVEGCILDVYVNVAFSKRTVWKGNKLIEDGEPLAAREERVSECDEEGKVEMVGEGVVKKSLKEAWVNLTSFVKRQSGTRQVIVLAFAVILLMQVTIVVLLKKGGGGQVEYHERYDEYSVNGETLGWLEKRMHFLREEMMMVEDRLQRMRQDHAALKAQFHHLERLLRRNKQ

SEQ ID NO: 72482 - DNA, 6681 bp, Arabidopsis thaliana
  misc_feature (1)..(6681): Ceres Seq. ID no. 4935696
  misc_feature: MA Experiment ID: 20000185 Result: Up-regulated in Transcription
  misc_feature: MA Experiment 20000185 PARAMETER Experiment Name: At_Roots__P Parameter: Age (day) Value: 7 vs. 21
  misc_feature: MA Experiment 20000185 PARAMETER Experiment Name: At_Roots__P Parameter: Organism Value: A. thaliana
  misc_feature: MA Experiment 20000185 PARAMETER Experiment Name: At_Roots__P Parameter: Tissue Value: Roots vs. Whole Plant
  misc_feature: MA Experiment ID: 20000234 Result: Up-regulated in Transcription
  misc_feature: MA Experiment 20000234 PARAMETER Experiment Name: At_Siliques_P Parameter: Age (day) Value: 21
  misc_feature: MA Experiment 20000234 PARAMETER Experiment Name: At_Siliques_P Parameter: Organism Value: A. thaliana
  misc_feature: MA Experiment 20000234 PARAMETER Experiment Name: At_Siliques_P Parameter: Plant Line Value: WS
  misc_feature: MA Experiment 20000234 PARAMETER Experiment Name: At_Siliques_P Parameter: Tissue Value: Less Than 5mm Siliques vs. Whole Plant
  misc_feature: MA Experiment ID: 20000235 Result: Up-regulated in Transcription
  misc_feature: MA Experiment 20000235 PARAMETER Experiment Name: At_Siliques_P Parameter: Age (day) Value: 21
  misc_feature: MA Experiment 20000235 PARAMETER Experiment Name: At_Siliques_P Parameter: Organism Value: A. thaliana
  misc_feature: MA Experiment 20000235 PARAMETER Experiment Name: At_Siliques_P Parameter: Plant Line Value: WS
  misc_feature: MA Experiment 20000235 PARAMETER Experiment Name: At_Siliques_P Parameter: Tissue Value: 5-10mm Siliques vs. Whole Plant
  misc_feature: MA Experiment ID: 20000264 Result: Up-regulated in Transcription
  misc_feature: MA Experiment 20000264 PARAMETER Experiment Name: At_Open_Flower_P Parameter: Age (day) Value: 21
  misc_feature: MA Experiment 20000264 PARAMETER Experiment Name: At_Open_Flower_P Parameter: Plant Line Value: WS
  misc_feature: MA Experiment 20000264 PARAMETER Experiment Name: At_Open_Flower_P Parameter: Tissue Value: Open Flower vs. Whole Plant
  misc_feature: MA Experiment ID: 20000265 Result: Up-regulated in Transcription
  misc_feature: MA Experiment 20000265 PARAMETER Experiment Name: At_Open_Flower_P Parameter: Age (day) Value: 21
  misc_feature: MA Experiment 20000265 PARAMETER Experiment Name: At_Open_Flower_P Parameter: Plant Line Value: WS
  misc_feature: MA Experiment 20000265 PARAMETER Experiment Name: At_Open_Flower_P Parameter: Tissue Value: Closed Flower vs. Whole Plant
  misc_feature: MA Experiment ID: 20000286 Result: Up-regulated in Transcription
  misc_feature: MA Experiment 20000286 PARAMETER Experiment Name: At_Open_Flower_P Parameter: Age (day) Value: 21
  misc_feature: MA Experiment 20000286 PARAMETER Experiment Name: At_Open_Flower_P Parameter: Plant Line Value: WS
  misc_feature: MA Experiment 20000286 PARAMETER Experiment Name: At_Open_Flower_P Parameter: Tissue Value: Half Open vs. Whole Plant
  misc_feature: MA Experiment ID: 20000439 Result: Up-regulated in Transcription
  misc_feature: MA Experiment 20000439 PARAMETER Experiment Name: At_Roots__P Parameter: Age (day) Value: 14 vs. 21
  misc_feature: MA Experiment 20000439 PARAMETER Experiment Name: At_Roots__P Parameter: Organism Value: A. thaliana
  misc_feature: MA Experiment 20000439 PARAMETER Experiment Name: At_Roots__P Parameter: Tissue Value: Roots vs. Whole Plant
  misc_feature: MA Experiment ID: 20000794 Result: Up-regulated in Transcription
  misc_feature: MA Experiment 20000794 PARAMETER Experiment Name: At_Petals_P Parameter: Age (day) Value: 23-25 days
  misc_feature: MA Experiment 20000794 PARAMETER Experiment Name: At_Petals_P Parameter: Plant Line Value: WS
  misc_feature: MA Experiment 20000794 PARAMETER Experiment Name: At_Petals_P Parameter: Tissue Value: Petals vs. Whole plant
  misc_feature: MA Experiment ID: 20001451 Result: Down-regulated in Transcription
  misc_feature: MA Experiment 20001451 PARAMETER Experiment Name: At_Far-red-induction_P Parameter: Age (day) Value: 7
  misc_feature: MA Experiment 20001451 PARAMETER Experiment Name: At_Far-red-induction_P Parameter: Light Value: Far-red vs. White
  misc_feature: MA Experiment 20001451 PARAMETER Experiment Name: At_Far-red-induction_P Parameter: Organism Value: A. thaliana
  misc_feature: MA Experiment 20001451 PARAMETER Experiment Name: At_Far-red-induction_P Parameter: Plant Line Value: Columbia
  misc_feature: MA Experiment 20001451 PARAMETER Experiment Name: At_Far-red-induction_P Parameter: Timepoint (hr) Value: 24
  misc_feature: MA Experiment 20001451 PARAMETER Experiment Name: At_Far-red-induction_P Parameter: Tissue Value: Whole Plant
atgactccctccaaggtcgccggtcatacccggttcttgctccacagctttcatgattccgatgtcgactccatcgccctccagctttctcagtttgttgattttggagtcgagactagtattccagttctcaagacctgcctggattgcttcaccgcccggagaagccatcctaattcgttgcagcttgagaaagttgtatccttgctctttaaacatgtgctcaagttgtcaaaccttgccaccctgcttcctcacgccctcaatgattttgagctcactcaagaatccgtggatgatttgactactactttgaatttttcaatctctgagaatattggctttgctctcgccctgaccgattttgaaagattagatgcaaagaccactggacggaacttactgttggctcagattgagcaactctgtgccaatactggccagattctttcatctgagctaatccattctgttctttcgtttctccgcaaatctgaggatctttccatgcatttggattccttcttacagtttttgtcttctgctcaacctagagatgacttctcttttgctctaacacctatgcttgctcaacaagttcatgaagctcctgttttcaggagcatggattttcacactgattctgctgataacgaccttgatgctatcttagctgaaatcgataaggaagtcagcgttggagatctcatgggagaattaggttgtggattcactgctgatgcccaacaatgcaaagaaatcttgtctagttttgctccactaggagaggctactatctcaagaattgttggcaatgtttctcggacctgtgctgatcttgaagataatcaaaccaccttttcaacgtttactgtagcccttggttcctgcattccaactgaacttcccacgccaaggtcgtggaatgttgatattctagttgacacaatcaagcagcttgctcctggcataagctggaggaaagtaattgagaatctcgatcatgacggatttgacatccctaatatggagtctttctcattttttatgcggatctataaagctgcttgcaaggagccatttcctcttgatgctgtatgtggttctgtctggaaaaatatggatggtcaattatcctttcttaagcacgcaatatctgctccaccagaagtattcacctttatgcattctccaaggaagctgattctctctgttgtcttagaatcagttccagtctcatccagtatcagattggcagtccttgcctcattgagaggtcttttggacattgagaactggttgcctaactgcttgtatatgtataaggatctctttgctgaggagtgcctcaaatttgtcaaaaatgtgcattttagcgaatcagacgatttcagggccaaaatttttcatccttctgatccattatcagatcttcatttggaagcaacaacttcccttttaaaagttttgaaagctcatgataatgcgattacttcatctcaactggtcgaggagattgaaaaagtcaatgcagctattttggattgtaatcctaagctgcagaatggtgaggctaaagattcatcagctcccaatgcatatggagatgatgttgaggcagaggcaaacgcatattttcatcaaatgttttctagtcatttgagtgttgacgcaatggttcaaatgctttcccgatacaaggaatctttggttccaagggaaaaattaatttttgaatgcatgattgctaatctgtttgaagaatatcggtttttccccaagtatcctgagagacagctgaaaatagcctccatactctttggttctgttataaaacaccagcttataagttcgctcactctggggatggccctgcgtctagtgttggattctttgcgtaaacctgcagattcaaaaatgtttctgtttggaagcaaagctctggaacagtttgtgaatcgtctggttgaattgcctcaatactgtaaccatattttgcaaatatctcatctgcgtagtactcacccggagttagtcactgttattgaacaagcactttcaaggatatcatctggtaatttagaatcagatgcctctgtttcacaccctggtccctcacaatctttccctggaaatggcgagttgagtggttctggaattggccaacctgcattacagctttcttctcccctacagcttcaacagaaaaatgaagtgccaagtgtgccatctaacgaggcaaagccacttctgccatcgttatcaactacttccgttgatgtttctgtcaatcctaagaatcctggcattccaacttcttcatcaacctcaactggttttgttcgtccagctcgtgcaaccacttcaacaaggtttggctcggctttgaacatagaaaccttggttgcagcagcagaaagaagggaaaacgcaatcgaggctccaccttcagatgttcaggacaaagtttcgttcataatcaataatatctctacaacaaacattgaatctaaagggaaagagtttgctgaaattttgccccaacagtattatccttggtttgcacagtacatggttatgaaaagagcgatgtgtttaatacctgatagagcgagcatcgagccgaattttcatgatctgtacctgaagttcttggacaaagttgattccaagctgctgtttaaggagatacttcaaaatacttacgaaaattgcaaggttcttttgggctcagagctcataaagtcgagttctgaagagcgttctcttcttaaaaatttaggcagttggcttggaaggttgaccattggaaggaattatgttttaagggcgcgagaaatagatccaaaatccttgattgtggaggcctatgaaaaagggttgatgatagcagtcattccgttcacttcaaaggttctggagccatgccaaaacagtattgcttatcaacctcccaatccttggacgatggctatactagggttgcttgctgagatctattcaatgccaaacctaaaaatgaatctgaagtttgacatagaggttttattcaagaaccttggtgttgaaatgaaggaagtagtgccaacttcccttctaaaggatcggaagagagaaatagatggcaatcctgattttagtaacaaagatcctggagtaacacagatatctcagccacagatgattccagagcctaaaacaatttctcctcttaaacaaattgacctacctcttgatgttgcaaattcgcctaatacagatgttccctcgaagttattatcacagtatgtagccccacaacgtgtttatactaatactttgatggatgaggagaaagtagcaactcttggcttgccagaacagctcccgtcacctcaaggactgttccagtcaactccatcgccattgttttctattagtcagcagctgtcagcagcacttcccaatattggaaatcatgttgttatcaatcagaaattaagcgcatttggtatgcactttccatttcaaagagtggtaccacttgccatggacagagctatcaaggagattgtgtctggtattgttcagcgaagtgtttgtattgcatgccaaacaacaaaggagcttgtgctaaaggattacgccctggaacccgatgagtcacgtatttataatgcagctcacttgatggttgcgagtttagctgggagtttggctcatgtgacttgcaaggaacccctgcgcacttcaatatccggtcatctacggaattcgcttcagggtctgaatatttcaaatgatgctcttgaacaaattgtgcaacttgtcaccaatgacaacctggatttgggttgtgctgctattgaacaggctgctacagaaaaggcaatacaaacaattgatgcggacattgctcaacaattgttgttacggagaaagcatagagatggtgctggatcctcctttttcgatccaaacattctatcacagaattccgtcagttttatacccgaatccctccgtccaaaacctggacacctctccctgtctcagcagagagtttatgaggactttgttcaacatccttggcaaaagcagtcgacccaaacttcacacggtttatctgctgcatcaagctcatctggtgatgttgcgcttggtagtggttatggtccagtatcaggaaaagttgcttctgaatttttgtctaatgctggaaacgctcggatggacatggtctcccggccatcagatatttctgtggatggttttgaatcttctccagtctcacttttgagctcacaagtcgatccagctggtgactcatccagtcttcaatttactaagtcactaccaacctctgaattgaatctggctgaatcctctgacgctgctacgaaagaaactggaacatcactgcagacattgacttcagctgctaccatggaacgacttggtgctagtaatattacacagccttcactgtccacgagagatgcactggataaatgtcaaattgttactcagaaggccgtaatttctgaagttcctgaaatcatcctcagatgtataagcagagatgaagccgcttttgctgtcgctcaaaaagctttcaaggctctttacgagaatgcatcaagtaaccttcacgtcagtgctaacctagcaatacttgttgctatccgtgatgtttgcaagcgtgttgttaaagagctcactagttgggtgatttattcagaggaggatcggaagctcaacaaagatattactattggtcttatccagcgtgagttgcttagcctagcggagtacaatgtccacatggcgaagcatcttgatggagggagaaacaagaccgcaactgactttgctatttctctactccaatccttggtcactgaggagtcgagtgtcatttcagagctccacagtcttgttgatgcgctggcaaagcttgcctcaaaatccggatcttctgagtcattgcaacagctaattgacatcatacgaaatccagttactaacacagctggcctctctgatagttcaaccggaaatgataacaacgataggcaaaaggatgagaaggttgcgtgcaacaccactaacacagaagagagtaccagcttggattatgtggaatcagatcctgcgggtttccagaatcgggtgtccacgctatttaaaaactggtatcaaatctgcgaacttcctggtgcaaatgaaaccgcatgttcacaatatgtcctgcatttgcaccagactggattacttaagggagatgatacaacagagagttttttccgaattcttctggaactttctgttgctcattgtatatcttctgaagatattaattccggtgctgtgcaatctcctcagcaacctcagagtccatcattccttatcattgatatgtatgcaaagcttgttttttcaatattgaagatcatggctgacacagtgagatttattcaaaaggacgcagaagataaaaagacatcactcaattctaaaccatatttccgattgttcatcaactggctactggacttgtgttccctggatcctgggacggatggtgcaaactttcaggttctcacagcttttgccaacgccttccacgcattgcagcctcttaagattcctgctttcagttttgcatggctagaacttgtcagccacagaagcttcatgcccaaactacttacagtaaatggccagaagggttggccatatgttcagcgcctgctggtggacttgcttcagtttcttgagccatttttaagaaatgctgaactcggaggaccggttcatttcctatacaaagggacattgagagtattactggttctgcttcatgatttcccagagttcctatgtgattatcattttactttctgtgatgtgattccttcaagttgcatacaaatgcggaatattatcctcagttcttttccacggaacatgaggcttcctgatccttctaccccaaatttaaagattgatttgttacctgagatagtagaagctccctgtatcctttctgaggttgatgctgcgctaaaggcaaagcaaatgaagaatgacgtggatgagtatcttacgtcgaggcagcaaaattcaactttcctaagtgagttgaagacaaagttacttctatcgtccagcgaggctagttcagctggaacccgttacagtgtaccattgatcaactcgcttgtgctatatactggaatgcaggctattcagcagcttcaggccggtgagacacaggctcaaaatgttgtggccttgcagatgttcaagtatttaagtatggaacttgatacggaagggcggtatctgttccttaatgcaatcgccaatcagcttcgataccccaacaaccacactcattacttttctttcatcatgctctatctattcttcgaatctgatcaggagatcatacaggagcaaataactagagtgctgttggaacggctaattgtgaacaggccacatccatggggacttctaatcacattcattgagctaataaagaacccaagatatagcttctggaaacaagccttcatcagatgtgcgcctgagattgagaagctgtttgaatcggtagccagatcctgtggtggcctgaagcctgtcgacgagggaatggtttcgggaggttgggtctcagacaattctcactag

SEQ ID NO: 72483 - protein, 2226 aa, Arabidopsis thaliana
  peptide (1)..(2226): Ceres Seq. ID no. 4935697
  misc_feature (1881)..(2221): Pfam Name: CCR4-Not complex component, Not1 Pfam Description: CCR4-Not complex component, Not1
  misc_feature (1147)..(1665): Homolog of NCBI NO: 28829417 NR Description: similar to Dictyostelium discoideum (Slime mold).
  misc_feature (1710)..(2205): Homolog of NCBI NO: 28829417 NR Description: similar to Dictyostelium discoideum (Slime mold).
  misc_feature (388)..(686): Homolog of NCBI NO: 28829417 NR Description: similar to Dictyostelium discoideum (Slime mold).
  misc_feature (792)..(1070): Homolog of NCBI NO: 28829417 NR Description: similar to Dictyostelium discoideum (Slime mold).
  misc_feature (1564)..(2205): Homolog of NCBI NO: 31238591 NR Description: ENSANGP00000016536 [Anopheles gambiae]
  misc_feature (749)..(1038): Homolog of NCBI NO: 31238591 NR Description: ENSANGP00000016536 [Anopheles gambiae]
  misc_feature (1107)..(1352): Homolog of NCBI NO: 31238591 NR Description: ENSANGP00000016536 [Anopheles gambiae]
  misc_feature (502)..(729): Homolog of NCBI NO: 31238591 NR Description: ENSANGP00000016536 [Anopheles gambiae]
  misc_feature (307)..(498): Homolog of NCBI NO: 31238591 NR Description: ENSANGP00000016536 [Anopheles gambiae]
  misc_feature (1504)..(2219): Homolog of NCBI NO: 32490577 NR Description: KIAA1007 protein; adrenal gland protein AD-005
MTPSKVAGHTRFLLHSFHDSDVDSIALQLSQFVDFGVETSIPVLKTCLDCFTARRSHPNSLQLEKVVSLLFKHVLKLSNLATLLPHALNDFELTQESVDDLTTTLNFSISENIGFALALTDFERLDAKTTGRNLLLAQIEQLCANTGQILSSELIHSVLSFLRKSEDLSMHLDSFLQFLSSAQPRDDFSFALTPMLAQQVHEAPVFRSMDFHTDSADNDLDAILAEIDKEVSVGDLMGELGCGFTADAQQCKEILSSFAPLGEATISRIVGNVSRTCADLEDNQTTFSTFTVALGSCIPTELPTPRSWNVDILVDTIKQLAPGISWRKVIENLDHDGFDIPNMESFSFFMRIYKAACKEPFPLDAVCGSVWKNMDGQLSFLKHAISAPPEVFTFMHSPRKLILSVVLESVPVSSSIRLAVLASLRGLLDIENWLPNCLYMYKDLFAEECLKFVKNVHFSESDDFRAKIFHPSDPLSDLHLEATTSLLKVLKAHDNAITSSQLVEEIEKVNAAILDCNPKLQNGEAKDSSAPNAYGDDVEAEANAYFHQMFSSHLSVDAMVQMLSRYKESLVPREKLIFECMIANLFEEYRFFPKYPERQLKIASILFGSVIKHQLISSLTLGMALRLVLDSLRKPADSKMFLFGSKALEQFVNRLVELPQYCNHILQISHLRSTHPELVTVIEQALSRISSGNLESDASVSHPGPSQSFPGNGELSGSGIGQPALQLSSPLQLQQKNEVPSVPSNEAKPLLPSLSTTSVDVSVNPKNPGIPTSSSTSTGFVRPARATTSTRFGSALNIETLVAAAERRENAIEAPPSDVQDKVSFIINNISTTNIESKGKEFAEILPQQYYPWFAQYMVMKRAMCLIPDRASIEPNFHDLYLKFLDKVDSKLLFKEILQNTYENCKVLLGSELIKSSSEERSLLKNLGSWLGRLTIGRNYVLRAREIDPKSLIVEAYEKGLMIAVIPFTSKVLEPCQNSIAYQPPNPWTMAILGLLAEIYSMPNLKMNLKFDIEVLFKNLGVEMKEVVPTSLLKDRKREIDGNPDFSNKDPGVTQISQPQMIPEPKTISPLKQIDLPLDVANSPNTDVPSKLLSQYVAPQRVYTNTLMDEEKVATLGLPEQLPSPQGLFQSTPSPLFSISQQLSAALPNIGNHVVINQKLSAFGMHFPFQRVVPLAMDRAIKEIVSGIVQRSVCIACQTTKELVLKDYALEPDESRIYNAAHLMVASLAGSLAHVTCKEPLRTSISGHLRNSLQGLNISNDALEQIVQLVTNDNLDLGCAAIEQAATEKAIQTIDADIAQQLLLRRKHRDGAGSSFFDPNILSQNSVSFIPESLRPKPGHLSLSQQRVYEDFVQHPWQKQSTQTSHGLSAASSSSGDVALGSGYGPVSGKVASEFLSNAGNARMDMVSRPSDISVDGFESSPVSLLSSQVDPAGDSSSLQFTKSLPTSELNLAESSDAATKETGTSLQTLTSAATMERLGASNITQPSLSTRDALDKCQIVTQKAVISEVPEIILRCISRDEAAFAVAQKAFKALYENASSNLHVSANLAILVAIRDVCKRVVKELTSWVIYSEEDRKLNKDITIGLIQRELLSLAEYNVHMAKHLDGGRNKTATDFAISLLQSLVTEESSVISELHSLVDALAKLASKSGSSESLQQLIDIIRNPVTNTAGLSDSSTGNDNNDRQKDEKVACNTTNTEESTSLDYVESDPAGFQNRVSTLFKNWYQICELPGANETACSQYVLHLHQTGLLKGDDTTESFFRILLELSVAHCISSEDINSGAVQSPQQPQSPSFLIIDMYAKLVFSILKIMADTVRFIQKDAEDKKTSLNSKPYFRLFINWLLDLCSLDPGTDGANFQVLTAFANAFHALQPLKIPAFSFAWLELVSHRSFMPKLLTVNGQKGWPYVQRLLVDLLQFLEPFLRNAELGGPVHFLYKGTLRVLLVLLHDFPEFLCDYHFTFCDVIPSSCIQMRNIILSSFPRNMRLPDPSTPNLKIDLLPEIVEAPCILSEVDAALKAKQMKNDVDEYLTSRQQNSTFLSELKTKLLLSSSEASSAGTRYSVPLINSLVLYTGMQAIQQLQAGETQAQNVVALQMFKYLSMELDTEGRYLFLNAIANQLRYPNNHTHYFSFIMLYLFFESDQEIIQEQITRVLLERLIVNRPHPWGLLITFIELIKNPRYSFWKQAFIRCAPEIEKLFESVARSCGGLKPVDEGMVSGGWVSDNSH

SEQ ID NO: 72484 - protein, 2057 aa, Arabidopsis thaliana
  peptide (1)..(2057): Ceres Seq. ID no. 4935698
  misc_feature (1712)..(2052): Pfam Name: CCR4-Not complex component, Not1 Pfam Description: CCR4-Not complex component, Not1
  misc_feature (978)..(1496): Homolog of NCBI NO: 28829417 NR Description: similar to Dictyostelium discoideum (Slime mold).
  misc_feature (1541)..(2036): Homolog of NCBI NO: 28829417 NR Description: similar to Dictyostelium discoideum (Slime mold).
  misc_feature (219)..(517): Homolog of NCBI NO: 28829417 NR Description: similar to Dictyostelium discoideum (Slime mold).
  misc_feature (623)..(901): Homolog of NCBI NO: 28829417 NR Description: similar to Dictyostelium discoideum (Slime mold).
  misc_feature (1395)..(2036): Homolog of NCBI NO: 31238591 NR Description: ENSANGP00000016536 [Anopheles gambiae]
  misc_feature (580)..(869): Homolog of NCBI NO: 31238591 NR Description: ENSANGP00000016536 [Anopheles gambiae]
  misc_feature (938)..(1183): Homolog of NCBI NO: 31238591 NR Description: ENSANGP00000016536 [Anopheles gambiae]
  misc_feature (333)..(560): Homolog of NCBI NO: 31238591 NR Description: ENSANGP00000016536 [Anopheles gambiae]
  misc_feature (138)..(329): Homolog of NCBI NO: 31238591 NR Description: ENSANGP00000016536 [Anopheles gambiae]
  misc_feature (1335)..(2050): Homolog of NCBI NO: 32490577 NR Description: KIAA1007 protein; adrenal gland protein AD-005
MHLDSFLQFLSSAQPRDDFSFALTPMLAQQVHEAPVFRSMDFHTDSADNDLDAILAEIDKEVSVGDLMGELGCGFTADAQQCKEILSSFAPLGEATISRIVGNVSRTCADLEDNQTTFSTFTVALGSCIPTELPTPRSWNVDILVDTIKQLAPGISWRKVIENLDHDGFDIPNMESFSFFMRIYKAACKEPFPLDAVCGSVWKNMDGQLSFLKHAISAPPEVFTFMHSPRKLILSVVLESVPVSSSIRLAVLASLRGLLDIENWLPNCLYMYKDLFAEECLKFVKNVHFSESDDFRAKIFHPSDPLSDLHLEATTSLLKVLKAHDNAITSSQLVEEIEKVNAAILDCNPKLQNGEAKDSSAPNAYGDDVEAEANAYFHQMFSSHLSVDAMVQMLSRYKESLVPREKLIFECMIANLFEEYRFFPKYPERQLKIASILFGSVIKHQLISSLTLGMALRLVLDSLRKPADSKMFLFGSKALEQFVNRLVELPQYCNHILQISHLRSTHPELVTVIEQALSRISSGNLESDASVSHPGPSQSFPGNGELSGSGIGQPALQLSSPLQLQQKNEVPSVPSNEAKPLLPSLSTTSVDVSVNPKNPGIPTSSSTSTGFVRPARATTSTRFGSALNIETLVAAAERRENAIEAPPSDVQDKVSFIINNISTTNIESKGKEFAEILPQQYYPWFAQYMVMKRAMCLIPDRASIEPNFHDLYLKFLDKVDSKLLFKEILQNTYENCKVLLGSELIKSSSEERSLLKNLGSWLGRLTIGRNYVLRAREIDPKSLIVEAYEKGLMIAVIPFTSKVLEPCQNSIAYQPPNPWTMAILGLLAEIYSMPNLKMNLKFDIEVLFKNLGVEMKEVVPTSLLKDRKREIDGNPDFSNKDPGVTQISQPQMIPEPKTISPLKQIDLPLDVANSPNTDVPSKLLSQYVAPQRVYTNTLMDEEKVATLGLPEQLPSPQGLFQSTPSPLFSISQQLSAALPNIGNHVVINQKLSAFGMHFPFQRVVPLAMDRAIKEIVSGIVQRSVCIACQTTKELVLKDYALEPDESRIYNAAHLMVASLAGSLAHVTCKEPLRTSISGHLRNSLQGLNISNDALEQIVQLVTNDNLDLGCAAIEQAATEKAIQTIDADIAQQLLLRRKHRDGAGSSFFDPNILSQNSVSFIPESLRPKPGHLSLSQQRVYEDFVQHPWQKQSTQTSHGLSAASSSSGDVALGSGYGPVSGKVASEFLSNAGNARMDMVSRPSDISVDGFESSPVSLLSSQVDPAGDSSSLQFTKSLPTSELNLAESSDAATKETGTSLQTLTSAATMERLGASNITQPSLSTRDALDKCQIVTQKAVISEVPEIILRCISRDEAAFAVAQKAFKALYENASSNLHVSANLAILVAIRDVCKRVVKELTSWVIYSEEDRKLNKDITIGLIQRELLSLAEYNVHMAKHLDGGRNKTATDFAISLLQSLVTEESSVISELHSLVDALAKLASKSGSSESLQQLIDIIRNPVTNTAGLSDSSTGNDNNDRQKDEKVACNTTNTEESTSLDYVESDPAGFQNRVSTLFKNWYQICELPGANETACSQYVLHLHQTGLLKGDDTTESFFRILLELSVAHCISSEDINSGAVQSPQQPQSPSFLIIDMYAKLVFSILKIMADTVRFIQKDAEDKKTSLNSKPYFRLFINWLLDLCSLDPGTDGANFQVLTAFANAFHALQPLKIPAFSFAWLELVSHRSFMPKLLTVNGQKGWPYVQRLLVDLLQFLEPFLRNAELGGPVHFLYKGTLRVLLVLLHDFPEFLCDYHFTFCDVIPSSCIQMRNIILSSFPRNMRLPDPSTPNLKIDLLPEIVEAPCILSEVDAALKAKQMKNDVDEYLTSRQQNSTFLSELKTKLLLSSSEASSAGTRYSVPLINSLVLYTGMQAIQQLQAGETQAQNVVALQMFKYLSMELDTEGRYLFLNAIANQLRYPNNHTHYFSFIMLYLFFESDQEIIQEQITRVLLERLIVNRPHPWGLLITFIELIKNPRYSFWKQAFIRCAPEIEKLFESVARSCGGLKPVDEGMVSGGWVSDNSH

SEQ ID NO: 72485 - protein, 2032 aa, Arabidopsis thaliana
  peptide (1)..(2032): Ceres Seq. ID no. 4935699
  misc_feature (1687)..(2027): Pfam Name: CCR4-Not complex component, Not1 Pfam Description: CCR4-Not complex component, Not1
  misc_feature (953)..(1471): Homolog of NCBI NO: 28829417 NR Description: similar to Dictyostelium discoideum (Slime mold).
  misc_feature (1516)..(2011): Homolog of NCBI NO: 28829417 NR Description: similar to Dictyostelium discoideum (Slime mold).
  misc_feature (194)..(492): Homolog of NCBI NO: 28829417 NR Description: similar to Dictyostelium discoideum (Slime mold).
  misc_feature (598)..(876): Homolog of NCBI NO: 28829417 NR Description: similar to Dictyostelium discoideum (Slime mold).
  misc_feature (1370)..(2011): Homolog of NCBI NO: 31238591 NR Description: ENSANGP00000016536 [Anopheles gambiae]
  misc_feature (555)..(844): Homolog of NCBI NO: 31238591 NR Description: ENSANGP00000016536 [Anopheles gambiae]
  misc_feature (913)..(1158): Homolog of NCBI NO: 31238591 NR Description: ENSANGP00000016536 [Anopheles gambiae]
  misc_feature (308)..(535): Homolog of NCBI NO: 31238591 NR Description: ENSANGP00000016536 [Anopheles gambiae]
  misc_feature (113)..(304): Homolog of NCBI NO: 31238591 NR Description: ENSANGP00000016536 [Anopheles gambiae]
  misc_feature (1310)..(2025): Homolog of NCBI NO: 32490577 NR Description: KIAA1007 protein; adrenal gland protein AD-005
MLAQQVHEAPVFRSMDFHTDSADNDLDAILAEIDKEVSVGDLMGELGCGFTADAQQCKEILSSFAPLGEATISRIVGNVSRTCADLEDNQTTFSTFTVALGSCIPTELPTPRSWNVDILVDTIKQLAPGISWRKVIENLDHDGFDIPNMESFSFFMRIYKAACKEPFPLDAVCGSVWKNMDGQLSFLKHAISAPPEVFTFMHSPRKLILSVVLESVPVSSSIRLAVLASLRGLLDIENWLPNCLYMYKDLFAEECLKFVKNVHFSESDDFRAKIFHPSDPLSDLHLEATTSLLKVLKAHDNAITSSQLVEEIEKVNAAILDCNPKLQNGEAKDSSAPNAYGDDVEAEANAYFHQMFSSHLSVDAMVQMLSRYKESLVPREKLIFECMIANLFEEYRFFPKYPERQLKIASILFGSVIKHQLISSLTLGMALRLVLDSLRKPADSKMFLFGSKALEQFVNRLVELPQYCNHILQISHLRSTHPELVTVIEQALSRISSGNLESDASVSHPGPSQSFPGNGELSGSGIGQPALQLSSPLQLQQKNEVPSVPSNEAKPLLPSLSTTSVDVSVNPKNPGIPTSSSTSTGFVRPARATTSTRFGSALNIETLVAAAERRENAIEAPPSDVQDKVSFIINNISTTNIESKGKEFAEILPQQYYPWFAQYMVMKRAMCLIPDRASIEPNFHDLYLKFLDKVDSKLLFKEILQNTYENCKVLLGSELIKSSSEERSLLKNLGSWLGRLTIGRNYVLRAREIDPKSLIVEAYEKGLMIAVIPFTSKVLEPCQNSIAYQPPNPWTMAILGLLAEIYSMPNLKMNLKFDIEVLFKNLGVEMKEVVPTSLLKDRKREIDGNPDFSNKDPGVTQISQPQMIPEPKTISPLKQIDLPLDVANSPNTDVPSKLLSQYVAPQRVYTNTLMDEEKVATLGLPEQLPSPQGLFQSTPSPLFSISQQLSAALPNIGNHVVINQKLSAFGMHFPFQRVVPLAMDRAIKEIVSGIVQRSVCIACQTTKELVLKDYALEPDESRIYNAAHLMVASLAGSLAHVTCKEPLRTSISGHLRNSLQGLNISNDALEQIVQLVTNDNLDLGCAAIEQAATEKAIQTIDADIAQQLLLRRKHRDGAGSSFFDPNILSQNSVSFIPESLRPKPGHLSLSQQRVYEDFVQHPWQKQSTQTSHGLSAASSSSGDVALGSGYGPVSGKVASEFLSNAGNARMDMVSRPSDISVDGFESSPVSLLSSQVDPAGDSSSLQFTKSLPTSELNLAESSDAATKETGTSLQTLTSAATMERLGASNITQPSLSTRDALDKCQIVTQKAVISEVPEIILRCISRDEAAFAVAQKAFKALYENASSNLHVSANLAILVAIRDVCKRVVKELTSWVIYSEEDRKLNKDITIGLIQRELLSLAEYNVHMAKHLDGGRNKTATDFAISLLQSLVTEESSVISELHSLVDALAKLASKSGSSESLQQLIDIIRNPVTNTAGLSDSSTGNDNNDRQKDEKVACNTTNTEESTSLDYVESDPAGFQNRVSTLFKNWYQICELPGANETACSQYVLHLHQTGLLKGDDTTESFFRILLELSVAHCISSEDINSGAVQSPQQPQSPSFLIIDMYAKLVFSILKIMADTVRFIQKDAEDKKTSLNSKPYFRLFINWLLDLCSLDPGTDGANFQVLTAFANAFHALQPLKIPAFSFAWLELVSHRSFMPKLLTVNGQKGWPYVQRLLVDLLQFLEPFLRNAELGGPVHFLYKGTLRVLLVLLHDFPEFLCDYHFTFCDVIPSSCIQMRNIILSSFPRNMRLPDPSTPNLKIDLLPEIVEAPCILSEVDAALKAKQMKNDVDEYLTSRQQNSTFLSELKTKLLLSSSEASSAGTRYSVPLINSLVLYTGMQAIQQLQAGETQAQNVVALQMFKYLSMELDTEGRYLFLNAIANQLRYPNNHTHYFSFIMLYLFFESDQEIIQEQITRVLLERLIVNRPHPWGLLITFIELIKNPRYSFWKQAFIRCAPEIEKLFESVARSCGGLKPVDEGMVSGGWVSDNSH

SEQ ID NO: 72486 - DNA, 501 bp, Arabidopsis thaliana
  misc_feature (1)..(501): Ceres Seq. ID no. 4935722
  misc_feature: MA Experiment ID: 20000171 Result: Up-regulated in Transcription
  misc_feature: MA Experiment 20000171 PARAMETER Experiment Name: At_42deg_Heat_P Parameter: Age (day) Value: 14
  misc_feature: MA Experiment 20000171 PARAMETER Experiment Name: At_42deg_Heat_P Parameter: Organism Value: A. thaliana
  misc_feature: MA Experiment 20000171 PARAMETER Experiment Name: At_42deg_Heat_P Parameter: Plant Line Value: WS
  misc_feature: MA Experiment 20000171 PARAMETER Experiment Name: At_42deg_Heat_P Parameter: Temperature (deg C) Value: 42 vs. 22
  misc_feature: MA Experiment 20000171 PARAMETER Experiment Name: At_42deg_Heat_P Parameter: Timepoint (hr) Value: 1
  misc_feature: MA Experiment 20000171 PARAMETER Experiment Name: At_42deg_Heat_P Parameter: Tissue Value: Aerial
  misc_feature: MA Experiment ID: 20000173 Result: Up-regulated in Transcription
  misc_feature: MA Experiment 20000173 PARAMETER Experiment Name: At_42deg_Heat_P Parameter: Age (day) Value: 14
  misc_feature: MA Experiment 20000173 PARAMETER Experiment Name: At_42deg_Heat_P Parameter: Organism Value: A. thaliana
  misc_feature: MA Experiment 20000173 PARAMETER Experiment Name: At_42deg_Heat_P Parameter: Plant Line Value: WS
  misc_feature: MA Experiment 20000173 PARAMETER Experiment Name: At_42deg_Heat_P Parameter: Temperature (deg C) Value: 42 vs. 22
  misc_feature: MA Experiment 20000173 PARAMETER Experiment Name: At_42deg_Heat_P Parameter: Timepoint (hr) Value: 6
  misc_feature: MA Experiment 20000173 PARAMETER Experiment Name: At_42deg_Heat_P Parameter: Tissue Value: Aerial
  misc_feature: MA Experiment ID: 20000184 Result: Down-regulated in Transcription
  misc_feature: MA Experiment 20000184 PARAMETER Experiment Name: At_Shoots__P Parameter: Age (day) Value: 7
  misc_feature: MA Experiment 20000184 PARAMETER Experiment Name: At_Shoots__P Parameter: Tissue Value: Shoots vs. Whole Plant
atggtgagtcgtttgtccatttcggtaactttgcacacgaacctgggtgacatcaagtgcgaaatcttctgtgacgaggttcccaagagtgctgagaactttttggcgttgtgtgctagtggctactacgatggtactatctttcatagaaatatcaaagggttcatgattcaaggaggagaccccaaggggaccggaaaaggaggaactagcatctggggcaagaaattcaatgatgagatccgagactcccttaagcacaatgcaagagggatgctgtcaatggcaaacagcggtccaaacaccaacggaagccagttcttcataacctatgcaaaacaaccacatctcaatggattatacaccatctttggcaaagtcattcatggcttcgaagtgcttgacattatggaaaagactcaaacaggaccaggagataggccgcttgctgagataaggctaaaccgtgtgacgatccacgccaatccacttgctggttaa

SEQ ID NO: 72487 - protein, 166 aa, Arabidopsis thaliana
  peptide (1)..(166): Ceres Seq. ID no. 4935723
  misc_feature (7)..(166): Homolog of NCBI NO: 30678211 NR Description: expressed protein [Arabidopsis thaliana]
  misc_feature (7)..(165): Homolog of NCBI NO: 6006361 NR Description: ESTs AU030008(E50477),AU078239(E50477) correspond
  misc_feature (7)..(165): Homolog of NCBI NO: 14043400 NR Description: Unknown (protein for MGC:10732) [Homo sapiens]
  misc_feature (7)..(165): Homolog of NCBI NO: 19557636 NR Description: peptidylprolyl isomerase-like protein 3 isoform
  misc_feature (7)..(165): Homolog of NCBI NO: 21746159 NR Description: peptidylprolyl isomerase-like 3; cyclophilin-like [Mus musculus] >gi|12845482|dbj|BAB26768.1| unnamed protein
  misc_feature (7)..(165): Homolog of NCBI NO: 29028318 NR Description: cyclophilin [Homo sapiens]
  misc_feature (7)..(165): Homolog of NCBI NO: 28190012 NR Description: CYP10L [Mus musculus]
  misc_feature (9)..(163): Homolog of NCBI NO: 31210953 NR Description: ENSANGP00000016027 [Anopheles gambiae]
  misc_feature (7)..(151): Homolog of NCBI NO: 39590255 NR Description: Hypothetical protein CBG11184 [Caenorhabditis
  misc_feature (9)..(163): Homolog of NCBI NO: 27924331 NR Description: Similar to peptidylprolyl isomerase
MVSRLSISVTLHTNLGDIKCEIFCDEVPKSAENFLALCASGYYDGTIFHRNIKGFMIQGGDPKGTGKGGTSIWGKKFNDEIRDSLKHNARGMLSMANSGPNTNGSQFFITYAKQPHLNGLYTIFGKVIHGFEVLDIMEKTQTGPGDRPLAEIRLNRVTIHANPLAG

SEQ ID NO: 72488 - protein, 111 aa, Arabidopsis thaliana; identical to SEQ ID NO: 20914
  peptide (1)..(111): Ceres Seq. ID no. 4935724
  misc_feature (1)..(111): Homolog of NCBI NO: 30678211 NR Description: expressed protein [Arabidopsis thaliana]
  misc_feature (1)..(110): Homolog of NCBI NO: 6006361 NR Description: ESTs AU030008(E50477),AU078239(E50477) correspond
  misc_feature (1)..(110): Homolog of NCBI NO: 14043400 NR Description: Unknown (protein for MGC:10732) [Homo sapiens]
  misc_feature (1)..(110): Homolog of NCBI NO: 19557636 NR Description: peptidylprolyl isomerase-like protein 3 isoform
  misc_feature (1)..(110): Homolog of NCBI NO: 21746159 NR Description: peptidylprolyl isomerase-like 3; cyclophilin-like [Mus musculus] >gi|12845482|dbj|BAB26768.1| unnamed protein
  misc_feature (1)..(110): Homolog of NCBI NO: 29028318 NR Description: cyclophilin [Homo sapiens]
  misc_feature (1)..(110): Homolog of NCBI NO: 28190012 NR Description: CYP10L [Mus musculus]
  misc_feature (1)..(108): Homolog of NCBI NO: 31210953 NR Description: ENSANGP00000016027 [Anopheles gambiae]
  misc_feature (1)..(96): Homolog of NCBI NO: 39590255 NR Description: Hypothetical protein CBG11184 [Caenorhabditis
  misc_feature (1)..(108): Homolog of NCBI NO: 27924331 NR Description: Similar to peptidylprolyl isomerase

SEQ ID NO: 72489 - DNA, 1104 bp, Arabidopsis thaliana
  misc_feature (1)..(1104): Ceres Seq. ID no. 4935733
  misc_feature: MA Experiment ID: 20000173 Result: Down-regulated in Transcription
  misc_feature: MA Experiment 20000173 PARAMETER Experiment Name: At_42deg_Heat_P Parameter: Age (day) Value: 14
  misc_feature: MA Experiment 20000173 PARAMETER Experiment Name: At_42deg_Heat_P Parameter: Organism Value: A. thaliana
  misc_feature: MA Experiment 20000173 PARAMETER Experiment Name: At_42deg_Heat_P Parameter: Plant Line Value: WS
  misc_feature: MA Experiment 20000173 PARAMETER Experiment Name: At_42deg_Heat_P Parameter: Temperature (deg C) Value: 42 vs. 22
  misc_feature: MA Experiment 20000173 PARAMETER Experiment Name: At_42deg_Heat_P Parameter: Timepoint (hr) Value: 6
  misc_feature: MA Experiment 20000173 PARAMETER Experiment Name: At_42deg_Heat_P Parameter: Tissue Value: Aerial
  misc_feature: MA Experiment ID: 20000182 Result: Up-regulated in Transcription
  misc_feature: MA Experiment 20000182 PARAMETER Experiment Name: At_2mM_SA_P Parameter: Age (day) Value: 14
  misc_feature: MA Experiment 20000182 PARAMETER Experiment Name: At_2mM_SA_P Parameter: Organism Value: A. thaliana
  misc_feature: MA Experiment 20000182 PARAMETER Experiment Name: At_2mM_SA_P Parameter: Plant Line Value: WS
  misc_feature: MA Experiment 20000182 PARAMETER Experiment Name: At_2mM_SA_P Parameter: Timepoint (hr) Value: 6
  misc_feature: MA Experiment 20000182 PARAMETER Experiment Name: At_2mM_SA_P Parameter: Tissue Value: Aerial
  misc_feature: MA Experiment 20000182 PARAMETER Experiment Name: At_2mM_SA_P Parameter: Treatment Value: 2mM SA vs. No Treatment
  misc_feature: MA Experiment ID: 20000794 Result: Up-regulated in Transcription
  misc_feature: MA Experiment 20000794 PARAMETER Experiment Name: At_Petals_P Parameter: Age (day) Value: 23-25 days
  misc_feature: MA Experiment 20000794 PARAMETER Experiment Name: At_Petals_P Parameter: Plant Line Value: WS
  misc_feature: MA Experiment 20000794 PARAMETER Experiment Name: At_Petals_P Parameter: Tissue Value: Petals vs. Whole plant
atgtacccgccacctccctcaagcatctacgctcctccgatgctggtgaattgctccggttgccggacgcctctccagctcccatccggcgcccgatctattcgctgcgctctctgccaggctgttactcatatcgccgaccctcgcaccgcccctcctccgcaaccttcctccgccccttctccgcctccccaaatccacgcgcctcccggtcagctgcctcacccccatggcaggaagagggccgtgatctgtggcatctcgtatcgtttctctcgccacgagctcaaaggctgcatcaacgacgccaagtgcatgcgtcaccttctcatcaacaaattcaaattctccccagattcaattctcatgcttaccgaggaagaaactgatccatatcgtatcccgaccaagcaaaacatgaggatggcattgtattggctcgtacagggatgcacagcaggcgactcacttgtcttccactactctggtcatggttcgcgtcaaagaaactacaacggtgatgaagttgatggctatgatgaaacactctgtcctctggattttgaaactcaggggatgattgtagacgatgagatcaacgcaaccattgtacgccctcttccacatggtgtcaagctccattcaattatcgatgcttgccatagtggtaccgttctggatttacccttcctatgcagaatgaacagagctgggcagtatgtgtgggaggatcatcggcctaggtcaggtttgtggaaaggaactgctggtggagaagccatttcaattagtggatgtgatgatgatcagacttcggccgacacatcagcgctgtcgaagatcacgtctacgggtgctatgactttctgttttattcaagcaattgaacgcagcgcacaaggcacaacctatggaagccttctgaattctatgcgcaccacaataaggaatacagggaatgatggtggtggtagtggtggagttgtgacgactgtgctgagcatgcttctgacagggggaagtgcgattgggggattaagacaggagcctcaactgactgcttgccaaacattcgatgtctatgcaaagcctttcactctctag

SEQ ID NO: 72490 - protein, 367 aa, Arabidopsis thaliana
  peptide (1)..(367): Ceres Seq. ID no. 4935734
  misc_feature (80)..(367): Pfam Name: Caspase domain Pfam Description: Caspase domain
  misc_feature (1)..(367): Homolog of NCBI NO: 30678252 NR Description: expressed protein [Arabidopsis thaliana]
  misc_feature (1)..(288): Homolog of NCBI NO: 3258570 NR Description: Unknown protein [Arabidopsis thaliana]
  misc_feature (30)..(367): Homolog of NCBI NO: 37536924 NR Description: hypothetical protein [Oryza sativa (japonica group)] >gi|12597889|gb|AAG60197.1| hypothetical protein [Oryza >gi|31433553|gb|AAP55051.1| hypothetical protein [Oryza sativa
  misc_feature (44)..(367): Homolog of NCBI NO: 32482814 NR Description: metacaspase 2 [Arabidopsis thaliana]
  misc_feature (14)..(77): Homolog of NCBI NO: 32482814 NR Description: metacaspase 2 [Arabidopsis thaliana]
  misc_feature (44)..(367): Homolog of NCBI NO: 30686772 NR Description: expressed protein [Arabidopsis thaliana]
  misc_feature (14)..(77): Homolog of NCBI NO: 30686772 NR Description: expressed protein [Arabidopsis thaliana]
  misc_feature (44)..(341): Homolog of NCBI NO: 7485453 NR Description: hypothetical protein F13M23.250 - Arabidopsis >gi|4455254|emb|CAB36753.1| putative protein [Arabidopsis >gi|7269361|emb|CAB79420.1| putative protein [Arabidopsis
  misc_feature (14)..(77): Homolog of NCBI NO: 7485453 NR Description: hypothetical protein F13M23.250 - Arabidopsis >gi|4455254|emb|CAB36753.1| putative protein [Arabidopsis >gi|7269361|emb|CAB79420.1| putative protein [Arabidopsis
  misc_feature (16)..(367): Homolog of NCBI NO: 15237654 NR Description: expressed protein; protein id: At5g64240.1,
MYPPPPSSIYAPPMLVNCSGCRTPLQLPSGARSIRCALCQAVTHIADPRTAPPPQPSSAPSPPPQIHAPPGQLPHPHGRKRAVICGISYRFSRHELKGCINDAKCMRHLLINKFKFSPDSILMLTEEETDPYRIPTKQNMRMALYWLVQGCTAGDSLVFHYSGHGSRQRNYNGDEVDGYDETLCPLDFETQGMIVDDEINATIVRPLPHGVKLHSIIDACHSGTVLDLPFLCRMNRAGQYVWEDHRPRSGLWKGTAGGEAISISGCDDDQTSADTSALSKITSTGAMTFCFIQAIERSAQGTTYGSLLNSMRTTIRNTGNDGGGSGGVVTTVLSMLLTGGSAIGGLRQEPQLTACQTFDVYAKPFTL

SEQ ID NO: 72491 - protein, 354 aa, Arabidopsis thaliana
  peptide (1)..(354): Ceres Seq. ID no. 4935735
  misc_feature (67)..(354): Pfam Name: Caspase domain Pfam Description: Caspase domain
  misc_feature (1)..(354): Homolog of NCBI NO: 30678252 NR Description: expressed protein [Arabidopsis thaliana]
  misc_feature (1)..(275): Homolog of NCBI NO: 3258570 NR Description: Unknown protein [Arabidopsis thaliana]
  misc_feature (17)..(354): Homolog of NCBI NO: 37536924 NR Description: hypothetical protein [Oryza sativa (japonica group)] >gi|12597889|gb|AAG60197.1| hypothetical protein [Oryza >gi|31433553|gb|AAP55051.1| hypothetical protein [Oryza sativa
  misc_feature (31)..(354): Homolog of NCBI NO: 32482814 NR Description: metacaspase 2 [Arabidopsis thaliana]
  misc_feature (1)..(64): Homolog of NCBI NO: 32482814 NR Description: metacaspase 2 [Arabidopsis thaliana]
  misc_feature (31)..(354): Homolog of NCBI NO: 30686772 NR Description: expressed protein [Arabidopsis thaliana]
  misc_feature (1)..(64): Homolog of NCBI NO: 30686772 NR Description: expressed protein [Arabidopsis thaliana]
  misc_feature (31)..(328): Homolog of NCBI NO: 7485453 NR Description: hypothetical protein F13M23.250 - Arabidopsis >gi|4455254|emb|CAB36753.1| putative protein [Arabidopsis >gi|7269361|emb|CAB79420.1| putative protein [Arabidopsis
  misc_feature (1)..(64): Homolog of NCBI NO: 7485453 NR Description: hypothetical protein F13M23.250 - Arabidopsis >gi|4455254|emb|CAB36753.1| putative protein [Arabidopsis >gi|7269361|emb|CAB79420.1| putative protein [Arabidopsis
  misc_feature (3)..(354): Homolog of NCBI NO: 15237654 NR Description: expressed protein; protein id: At5g64240.1,
MLVNCSGCRTPLQLPSGARSIRCALCQAVTHIADPRTAPPPQPSSAPSPPPQIHAPPGQLPHPHGRKRAVICGISYRFSRHELKGCINDAKCMRHLLINKFKFSPDSILMLTEEETDPYRIPTKQNMRMALYWLVQGCTAGDSLVFHYSGHGSRQRNYNGDEVDGYDETLCPLDFETQGMIVDDEINATIVRPLPHGVKLHSIIDACHSGTVLDLPFLCRMNRAGQYVWEDHRPRSGLWKGTAGGEAISISGCDDDQTSADTSALSKITSTGAMTFCFIQAIERSAQGTTYGSLLNSMRTTIRNTGNDGGGSGGVVTTVLSMLLTGGSAIGGLRQEPQLTACQTFDVYAKPFTL

SEQ ID NO: 72492 - protein, 262 aa, Arabidopsis thaliana
  peptide (1)..(262): Ceres Seq. ID no. 4935736
  misc_feature (1)..(262): Pfam Name: Caspase domain Pfam Description: Caspase domain
  misc_feature (1)..(262): Homolog of NCBI NO: 30678252 NR Description: expressed protein [Arabidopsis thaliana]
  misc_feature (1)..(183): Homolog of NCBI NO: 3258570 NR Description: Unknown protein [Arabidopsis thaliana]
  misc_feature (1)..(262): Homolog of NCBI NO: 37536924 NR Description: hypothetical protein [Oryza sativa (japonica group)] >gi|12597889|gb|AAG60197.1| hypothetical protein [Oryza >gi|31433553|gb|AAP55051.1| hypothetical protein [Oryza sativa
  misc_feature (1)..(262): Homolog of NCBI NO: 32482814 NR Description: metacaspase 2 [Arabidopsis thaliana]
  misc_feature (1)..(262): Homolog of NCBI NO: 30686772 NR Description: expressed protein [Arabidopsis thaliana]
  misc_feature (1)..(236): Homolog of NCBI NO: 7485453 NR Description: hypothetical protein F13M23.250 - Arabidopsis >gi|4455254|emb|CAB36753.1| putative protein [Arabidopsis >gi|7269361|emb|CAB79420.1| putative protein [Arabidopsis
  misc_feature (1)..(262): Homolog of NCBI NO: 15237654 NR Description: expressed protein; protein id: At5g64240.1,
  misc_feature (1)..(262): Homolog of NCBI NO: 37788549 NR Description: metacaspase 3 [Arabidopsis thaliana]
  misc_feature (1)..(211): Homolog of NCBI NO: 11358463 NR Description: hypothetical protein [imported] - Arabidopsis
  misc_feature (1)..(170): Homolog of NCBI NO: 30697974 NR Description: expressed protein [Arabidopsis thaliana]
MRHLLINKFKFSPDSILMLTEEETDPYRIPTKQNMRMALYWLVQGCTAGDSLVFHYSGHGSRQRNYNGDEVDGYDETLCPLDFETQGMIVDDEINATIVRPLPHGVKLHSIIDACHSGTVLDLPFLCRMNRAGQYVWEDHRPRSGLWKGTAGGEAISISGCDDDQTSADTSALSKITSTGAMTFCFIQAIERSAQGTTYGSLLNSMRTTIRNTGNDGGGSGGVVTTVLSMLLTGGSAIGGLRQEPQLTACQTFDVYAKPFTL

SEQ ID NO: 72493 - DNA, 1671 bp, Arabidopsis thaliana
  misc_feature (1)..(1671): Ceres Seq. ID no. 4935745
  misc_feature: MA Experiment ID: 20000180 Result: Down-regulated in Transcription
  misc_feature: MA Experiment 20000180 PARAMETER Experiment Name: At_Germinating_Seeds_P Parameter: Age (hr) Value: 24 vs. 0
  misc_feature: MA Experiment 20000180 PARAMETER Experiment Name: At_Germinating_Seeds_P Parameter: Tissue Value: Germinating Seeds
  misc_feature: MA Experiment ID: 20000182 Result: Up-regulated in Transcription
  misc_feature: MA Experiment 20000182 PARAMETER Experiment Name: At_2mM_SA_P Parameter: Age (day) Value: 14
  misc_feature: MA Experiment 20000182 PARAMETER Experiment Name: At_2mM_SA_P Parameter: Organism Value: A. thaliana
  misc_feature: MA Experiment 20000182 PARAMETER Experiment Name: At_2mM_SA_P Parameter: Plant Line Value: WS
  misc_feature: MA Experiment 20000182 PARAMETER Experiment Name: At_2mM_SA_P Parameter: Timepoint (hr) Value: 6
  misc_feature: MA Experiment 20000182 PARAMETER Experiment Name: At_2mM_SA_P Parameter: Tissue Value: Aerial
  misc_feature: MA Experiment 20000182 PARAMETER Experiment Name: At_2mM_SA_P Parameter: Treatment Value: 2mM SA vs. No Treatment
  misc_feature: MA Experiment ID: 20000184 Result: Down-regulated in Transcription
  misc_feature: MA Experiment 20000184 PARAMETER Experiment Name: At_Shoots__P Parameter: Age (day) Value: 7
  misc_feature: MA Experiment 20000184 PARAMETER Experiment Name: At_Shoots__P Parameter: Tissue Value: Shoots vs. Whole Plant
  misc_feature: MA Experiment ID: 20001905 Result: Down-regulated in Transcription
  misc_feature: MA Experiment 20001905 PARAMETER Experiment Name: At_Drought_Reproduction_P Parameter: Age (day) Value: 40
  misc_feature: MA Experiment 20001905 PARAMETER Experiment Name: At_Drought_Reproduction_P Parameter: Organism Value: A. thaliana
  misc_feature: MA Experiment 20001905 PARAMETER Experiment Name: At_Drought_Reproduction_P Parameter: Plant Line Value: WS
  misc_feature: MA Experiment 20001905 PARAMETER Experiment Name: At_Drought_Reproduction_P Parameter: Timepoint (day) Value: 10
  misc_feature: MA Experiment 20001905 PARAMETER Experiment Name: At_Drought_Reproduction_P Parameter: Tissue Value: Rosettes
  misc_feature: MA Experiment 20001905 PARAMETER Experiment Name: At_Drought_Reproduction_P Parameter: Treatment Value: Drought vs. No Drought
atggcgatgctttctactgcttccgtttcggggagcgtcgaccttcctcgaggaaccatgaaggttgactcgtctgcgtctccggaggtcgtatccgatctcccaccatcttccccaaagggctcacctgatcgccatgacccttccacttcttctccgagccccagtcgtggtggtgacaatcagtctgaagtcatatccaagagtgaagagtatcggcaattgtttcggcttccagctgacgaaatccttgttcaagattttaactgtgcttgtcaggagagtattcttatgcagggtcatatgtacctcttcatccattatatctgcttttactccaacatctttggttatgagaccaagaaaattatcccatttgctgaaatatcttgtgttaaacgagccaagactgctggtatttttcctaatgccattgagattttagctggagggaagaagtacttttttgcatcgtttctttcccgcgatgaagctttcaagcttatccatgatggatggttggaatatggtagtgctgtcaaatcagaaggcgagattctggtgaccgaaccgcaggtaagcgatggagttgttaaaagggcacgcagttccatggatttggccaatgaactagatattccagtaagggatgaaactcttcatctttccagcagttccagtcttcctgtcattagtcagaatggcgttccaccttcatccgttcagcggcacgctgaaccagatgtagatgttgtggcggccaatactttcaactggaagcctgaagatacagatgcacctaaattgtcatctgactttacaaagattccagtagaagagttctttagattgtttttttcagatggtgctgtcagttttgttgaatctttccataaaaattgtggagacaaagagtttaggtgtacctcttggcaacctcatgaaaagcttggacacacccgcaatgtctcatttcaacatccgataaaaatttattttggtgcaaagtttggtggctgccaggagtcacagaaatttcggatgtacagaaatagccatctggttattgaaacatcacaggagatcagcgatgtgccttatgcagattattttacggtagagggagtctgggacttgaaaagagattgcagagactcggtagaaggttgtatattggatgtttatgtcaatgtggccttctctaaaagaacagtgtggaaagggaataagttgattgaggatggtgaaccgctagcagcaagggaagaaagagtatctgaatgtgacgaggaggggaaggtggaaatggtgggcgaaggggtagttaaaaaaagcttaaaggaagcatgggtgaatctgacttcatttgtgaagaggcaaagcgggacaaggcaggttatagtattagcgtttgcagtaatcttactgatgcaggtgacgatagtggtgctactgaaaaaaggaggaggggggcaagtggagtatcatgagaggtacgacgagtacagtgtaaacggggagactttggggtggttagagaagagaatgcatttcctgagggaagagatgatgatggttgaggatcgtttgcagaggatgcgacaagaccatgccgccttgaaggctcagttccaccatttggaacgcctcctccgccgcaacaaacagtaa

SEQ ID NO: 72494 - protein, 556 aa, Arabidopsis thaliana
  peptide (1)..(556): Ceres Seq. ID no. 4935746
  misc_feature (70)..(136): Pfam Name: GRAM domain Pfam Description: GRAM domain
  misc_feature (20)..(322): Homolog of NCBI NO: 15217621 NR Description: unknown protein; protein id: At1g02120.1
  misc_feature (334)..(556): Homolog of NCBI NO: 15217621 NR Description: unknown protein; protein id: At1g02120.1
  misc_feature (1)..(359): Homolog of NCBI NO: 18086353 NR Description: At1g02120/T7I23_26 [Arabidopsis thaliana]
  misc_feature (1)..(82): Homolog of NCBI NO: 15217621 NR Description: unknown protein; protein id: At1g02120.1
  misc_feature (436)..(552): Homolog of NCBI NO: 34393622 NR Description: unknown protein [Oryza sativa (japonica
  misc_feature (355)..(408): Homolog of NCBI NO: 34393622 NR Description: unknown protein [Oryza sativa (japonica
  misc_feature (37)..(280): Homolog of NCBI NO: 22760671 NR Description: unnamed protein product [Homo sapiens]
  misc_feature (68)..(280): Homolog of NCBI NO: 7959333 NR Description: KIAA1533 protein [Homo sapiens]
  misc_feature (68)..(280): Homolog of NCBI NO: 24308247 NR Description: KIAA1533 protein [Homo sapiens]
  misc_feature (68)..(173): Homolog of NCBI NO: 26350799 NR Description: unnamed protein product [Mus musculus]
MAMLSTASVSGSVDLPRGTMKVDSSASPEVVSDLPPSSPKGSPDRHDPSTSSPSPSRGGDNQSEVISKSEEYRQLFRLPADEILVQDFNCACQESILMQGHMYLFIHYICFYSNIFGYETKKIIPFAEISCVKRAKTAGIFPNAIEILAGGKKYFFASFLSRDEAFKLIHDGWLEYGSAVKSEGEILVTEPQVSDGVVKRARSSMDLANELDIPVRDETLHLSSSSSLPVISQNGVPPSSVQRHAEPDVDVVAANTFNWKPEDTDAPKLSSDFTKIPVEEFFRLFFSDGAVSFVESFHKNCGDKEFRCTSWQPHEKLGHTRNVSFQHPIKIYFGAKFGGCQESQKFRMYRNSHLVIETSQEISDVPYADYFTVEGVWDLKRDCRDSVEGCILDVYVNVAFSKRTVWKGNKLIEDGEPLAAREERVSECDEEGKVEMVGEGVVKKSLKEAWVNLTSFVKRQSGTRQVIVLAFAVILLMQVTIVVLLKKGGGGQVEYHERYDEYSVNGETLGWLEKRMHFLREEMMMVEDRLQRMRQDHAALKAQFHHLERLLRRNKQ

SEQ ID NO: 72495 - protein, 554 aa, Arabidopsis thaliana
  peptide (1)..(554): Ceres Seq. ID no. 4935747
  misc_feature (68)..(134): Pfam Name: GRAM domain Pfam Description: GRAM domain
  misc_feature (18)..(320): Homolog of NCBI NO: 15217621 NR Description: unknown protein; protein id: At1g02120.1
  misc_feature (332)..(554): Homolog of NCBI NO: 15217621 NR Description: unknown protein; protein id: At1g02120.1
  misc_feature (1)..(357): Homolog of NCBI NO: 18086353 NR Description: At1g02120/T7I23_26 [Arabidopsis thaliana]
  misc_feature (1)..(80): Homolog of NCBI NO: 15217621 NR Description: unknown protein; protein id: At1g02120.1
  misc_feature (434)..(550): Homolog of NCBI NO: 34393622 NR Description: unknown protein [Oryza sativa (japonica
  misc_feature (353)..(406): Homolog of NCBI NO: 34393622 NR Description: unknown protein [Oryza sativa (japonica
  misc_feature (35)..(278): Homolog of NCBI NO: 22760671 NR Description: unnamed protein product [Homo sapiens]
  misc_feature (66)..(278): Homolog of NCBI NO: 7959333 NR Description: KIAA1533 protein [Homo sapiens]
  misc_feature (66)..(278): Homolog of NCBI NO: 24308247 NR Description: KIAA1533 protein [Homo sapiens]
  misc_feature (66)..(171): Homolog of NCBI NO: 26350799 NR Description: unnamed protein product [Mus musculus]
MLSTASVSGSVDLPRGTMKVDSSASPEVVSDLPPSSPKGSPDRHDPSTSSPSPSRGGDNQSEVISKSEEYRQLFRLPADEILVQDFNCACQESILMQGHMYLFIHYICFYSNIFGYETKKIIPFAEISCVKRAKTAGIFPNAIEILAGGKKYFFASFLSRDEAFKLIHDGWLEYGSAVKSEGEILVTEPQVSDGVVKRARSSMDLANELDIPVRDETLHLSSSSSLPVISQNGVPPSSVQRHAEPDVDVVAANTFNWKPEDTDAPKLSSDFTKIPVEEFFRLFFSDGAVSFVESFHKNCGDKEFRCTSWQPHEKLGHTRNVSFQHPIKIYFGAKFGGCQESQKFRMYRNSHLVIETSQEISDVPYADYFTVEGVWDLKRDCRDSVEGCILDVYVNVAFSKRTVWKGNKLIEDGEPLAAREERVSECDEEGKVEMVGEGVVKKSLKEAWVNLTSFVKRQSGTRQVIVLAFAVILLMQVTIVVLLKKGGGGQVEYHERYDEYSVNGETLGWLEKRMHFLREEMMMVEDRLQRMRQDHAALKAQFHHLERLLRRNKQ

SEQ ID NO: 72496 - protein, 537 aa, Arabidopsis thaliana
  peptide (1)..(537): Ceres Seq. ID no. 4935748
  misc_feature (51)..(117): Pfam Name: GRAM domain Pfam Description: GRAM domain
  misc_feature (1)..(303): Homolog of NCBI NO: 15217621 NR Description: unknown protein; protein id: At1g02120.1
  misc_feature (315)..(537): Homolog of NCBI NO: 15217621 NR Description: unknown protein; protein id: At1g02120.1
  misc_feature (1)..(340): Homolog of NCBI NO: 18086353 NR Description: At1g02120/T7I23_26 [Arabidopsis thaliana]
  misc_feature (1)..(63): Homolog of NCBI NO: 15217621 NR Description: unknown protein; protein id: At1g02120.1
  misc_feature (417)..(533): Homolog of NCBI NO: 34393622 NR Description: unknown protein [Oryza sativa (japonica
  misc_feature (336)..(389): Homolog of NCBI NO: 34393622 NR Description: unknown protein [Oryza sativa (japonica
  misc_feature (18)..(261): Homolog of NCBI NO: 22760671 NR Description: unnamed protein product [Homo sapiens]
  misc_feature (49)..(261): Homolog of NCBI NO: 7959333 NR Description: KIAA1533 protein [Homo sapiens]
  misc_feature (49)..(261): Homolog of NCBI NO: 24308247 NR Description: KIAA1533 protein [Homo sapiens]
  misc_feature (49)..(154): Homolog of NCBI NO: 26350799 NR Description: unnamed protein product [Mus musculus]
MKVDSSASPEVVSDLPPSSPKGSPDRHDPSTSSPSPSRGGDNQSEVISKSEEYRQLFRLPADEILVQDFNCACQESILMQGHMYLFIHYICFYSNIFGYETKKIIPFAEISCVKRAKTAGIFPNAIEILAGGKKYFFASFLSRDEAFKLIHDGWLEYGSAVKSEGEILVTEPQVSDGVVKRARSSMDLANELDIPVRDETLHLSSSSSLPVISQNGVPPSSVQRHAEPDVDVVAANTFNWKPEDTDAPKLSSDFTKIPVEEFFRLFFSDGAVSFVESFHKNCGDKEFRCTSWQPHEKLGHTRNVSFQHPIKIYFGAKFGGCQESQKFRMYRNSHLVIETSQEISDVPYADYFTVEGVWDLKRDCRDSVEGCILDVYVNVAFSKRTVWKGNKLIEDGEPLAAREERVSECDEEGKVEMVGEGVVKKSLKEAWVNLTSFVKRQSGTRQVIVLAFAVILLMQVTIVVLLKKGGGGQVEYHERYDEYSVNGETLGWLEKRMHFLREEMMMVEDRLQRMRQDHAALKAQFHHLERLLRRNKQ

SEQ ID NO: 72497 - DNA, 1278 bp, Arabidopsis thaliana
  misc_feature (1)..(1278): Ceres Seq. ID no. 4936090
  misc_feature: MA Experiment ID: 20000315 Result: Down-regulated in Transcription
  misc_feature: MA Experiment 20000315 PARAMETER Experiment Name: At_14day_Shoots-Roots_Sub_P Parameter: Age (day) Value: 14
  misc_feature: MA Experiment 20000315 PARAMETER Experiment Name: At_14day_Shoots-Roots_Sub_P Parameter: Organism Value: A. thaliana
  misc_feature: MA Experiment 20000315 PARAMETER Experiment Name: At_14day_Shoots-Roots_Sub_P Parameter: Plant Line Value: WS
  misc_feature: MA Experiment 20000315 PARAMETER Experiment Name: At_14day_Shoots-Roots_Sub_P Parameter: Tissue Value: Shoots vs. Whole Plant
atgaatggccccatcgtgtctattgcgcgtgaacttgggtttgaaggcaattctattcttgagggtcttgttgtgagcatatttattgccggtgcatttattggtagcatagtcgccggtccactagttgacaagtttggctaccgacgcacctttcagattttcacgatacccctcattcttggtgcccttgtgagtgcacaagctcactccttggatgagatcttatgtggaagatttcttgttggtcttggtattggcgtcaacacagttcttgttccaatatatatatccgaggttgctccgacgaaatacagaggttcccttggaactttatgtcaaattggcacttgtctcgggataatcttttctcttctcttagggattcctgcagaagatgaccctcattggtggaggacaatgctctatgtagcgagtatgcctggttttcttcttgcacttggtatgcaatttgcagtagaaagtccccgttggctctgtaaggttggacgacttgatgatgccaaagtagtgataagaaacatctggggaggatctgaagtcgagaaagctgtagaagattttcagtcggttatgaagaatagtggctccaacttaaatagcagatggctggaactccttgataaaccacattcacgagttgcattcattgggggctccctttttgtcctacagcaattcgcgggcataaatggcgttctttatttctcatctttaacattccaaaatgttggaatcacgagtggtgctcaagcaagtctatatgttggagtcacaaattttgcaggtgctctgtgtgcgtcttatttgattgataagcaaggaagaaagaagcttcttatcggtagctacttgggaatggcagtctctatgtttcttattgtttatgctgttggtttccccttggatgaagatctgagccagagtttgtcaatacttggaacactcatgtatatattcagttttgcaattggagctggtcctgtaacaggtctcatcatccctgagctaagcagcaacagaacgcgtggaaaaatcatgggtttcagcttctctgtacattgggtctccaacttcttggttggtttgttcttcctggatctggtggagaaatacggggttggaacggtctatgccagctttggctcagtatcattgttggcagcggcattctcacacctcttcacggtggaaacaaagggtcgatcactagaagagatcgaactgtctttgaactccagagacgacctgagttaa

SEQ ID NO: 72498 - protein, 425 aa, Arabidopsis thaliana
  peptide (1)..(425): Ceres Seq. ID no. 4936091
  misc_feature (1)..(271): Pfam Name: Sugar (and other) transporter Pfam Description: Sugar (and other) transporter
  misc_feature (1)..(425): Homolog of NCBI NO: 15220390 NR Description: putative sugar transporter protein; protein id:
  misc_feature (1)..(271): Homolog of NCBI NO: 25406827 NR Description: hypothetical protein [imported] - Arabidopsis >gi|4056428|gb|AAC98002.1|AAC98002 Similar to gb|U43629 integral protein from Beta vulgaris and a member of sugar transporter
  misc_feature (227)..(425): Homolog of NCBI NO: 25406827 NR Description: hypothetical protein [imported] - Arabidopsis >gi|4056428|gb|AAC98002.1|AAC98002 Similar to gb|U43629 integral protein from Beta vulgaris and a member of sugar transporter
  misc_feature (1)..(419): Homolog of NCBI NO: 8347244 NR Description: hexose transporter [Nicotiana tabacum]
  misc_feature (1)..(419): Homolog of NCBI NO: 8347246 NR Description: hexose transporter [Solanum tuberosum]
  misc_feature (1)..(420): Homolog of NCBI NO: 15625046 NR Description: hexose transporter pGlT [Olea europaea]
  misc_feature (1)..(419): Homolog of NCBI NO: 8347248 NR Description: hexose transporter [Zea mays]
  misc_feature (1)..(419): Homolog of NCBI NO: 9858106 NR Description: putative glucose translocator [Mesembryanthemum
  misc_feature (1)..(420): Homolog of NCBI NO: 18417892 NR Description: sugar transporter-like protein; protein id: supported by cDNA: gi_16648752, supported by cDNA: gi_20259505 thaliana] >gi|16648753|gb|AAL25568.1| AT5g16150/T21H19_70
  misc_feature (1)..(419): Homolog of NCBI NO: 8347242 NR Description: hexose transporter [Spinacia oleracea]
MNGPIVSIARELGFEGNSILEGLVVSIFIAGAFIGSIVAGPLVDKFGYRRTFQIFTIPLILGALVSAQAHSLDEILCGRFLVGLGIGVNTVLVPIYISEVAPTKYRGSLGTLCQIGTCLGIIFSLLLGIPAEDDPHWWRTMLYVASMPGFLLALGMQFAVESPRWLCKVGRLDDAKVVIRNIWGGSEVEKAVEDFQSVMKNSGSNLNSRWLELLDKPHSRVAFIGGSLFVLQQFAGINGVLYFSSLTFQNVGITSGAQASLYVGVTNFAGALCASYLIDKQGRKKLLIGSYLGMAVSMFLIVYAVGFPLDEDLSQSLSILGTLMYIFSFAIGAGPVTGLIIPELSSNRTRGKIMGFSFSVHWVSNFLVGLFFLDLVEKYGVGTVYASFGSVSLLAAAFSHLFTVETKGRSLEEIELSLNSRDDLS

SEQ ID NO: 72499 - protein, 285 aa, Arabidopsis thaliana
  peptide (1)..(285): Ceres Seq. ID no. 4936092
  misc_feature (1)..(131): Pfam Name: Sugar (and other) transporter Pfam Description: Sugar (and other) transporter
  misc_feature (1)..(285): Homolog of NCBI NO: 15220390 NR Description: putative sugar transporter protein; protein id:
  misc_feature (1)..(131): Homolog of NCBI NO: 25406827 NR Description: hypothetical protein [imported] - Arabidopsis >gi|4056428|gb|AAC98002.1|AAC98002 Similar to gb|U43629 integral protein from Beta vulgaris and a member of sugar transporter
  misc_feature (87)..(285): Homolog of NCBI NO: 25406827 NR Description: hypothetical protein [imported] - Arabidopsis >gi|4056428|gb|AAC98002.1|AAC98002 Similar to gb|U43629 integral protein from Beta vulgaris and a member of sugar transporter
  misc_feature (1)..(279): Homolog of NCBI NO: 8347244 NR Description: hexose transporter [Nicotiana tabacum]
  misc_feature (1)..(279): Homolog of NCBI NO: 8347246 NR Description: hexose transporter [Solanum tuberosum]
  misc_feature (1)..(280): Homolog of NCBI NO: 15625046 NR Description: hexose transporter pGlT [Olea europaea]
  misc_feature (1)..(279): Homolog of NCBI NO: 8347248 NR Description: hexose transporter [Zea mays]
  misc_feature (1)..(279): Homolog of NCBI NO: 9858106 NR Description: putative glucose translocator [Mesembryanthemum
  misc_feature (1)..(280): Homolog of NCBI NO: 18417892 NR Description: sugar transporter-like protein; protein id: supported by cDNA: gi_16648752, supported by cDNA: gi_20259505 thaliana] >gi|16648753|gb|AAL25568.1| AT5g16150/T21H19_70
  misc_feature (1)..(279): Homolog of NCBI NO: 8347242 NR Description: hexose transporter [Spinacia oleracea]
MLYVASMPGFLLALGMQFAVESPRWLCKVGRLDDAKVVIRNIWGGSEVEKAVEDFQSVMKNSGSNLNSRWLELLDKPHSRVAFIGGSLFVLQQFAGINGVLYFSSLTFQNVGITSGAQASLYVGVTNFAGALCASYLIDKQGRKKLLIGSYLGMAVSMFLIVYAVGFPLDEDLSQSLSILGTLMYIFSFAIGAGPVTGLIIPELSSNRTRGKIMGFSFSVHWVSNFLVGLFFLDLVEKYGVGTVYASFGSVSLLAAAFSHLFTVETKGRSLEEIELSLNSRDDLS

SEQ ID NO: 72500 - protein, 279 aa, Arabidopsis thaliana
  peptide (1)..(279): Ceres Seq. ID no. 4936093
  misc_feature (1)..(125): Pfam Name: Sugar (and other) transporter Pfam Description: Sugar (and other) transporter
  misc_feature (1)..(279): Homolog of NCBI NO: 15220390 NR Description: putative sugar transporter protein; protein id:
  misc_feature (1)..(125): Homolog of NCBI NO: 25406827 NR Description: hypothetical protein [imported] - Arabidopsis >gi|4056428|gb|AAC98002.1|AAC98002 Similar to gb|U43629 integral protein from Beta vulgaris and a member of sugar transporter
  misc_feature (81)..(279): Homolog of NCBI NO: 25406827 NR Description: hypothetical protein [imported] - Arabidopsis >gi|4056428|gb|AAC98002.1|AAC98002 Similar to gb|U43629 integral protein from Beta vulgaris and a member of sugar transporter
  misc_feature (1)..(273): Homolog of NCBI NO: 8347244 NR Description: hexose transporter [Nicotiana tabacum]
  misc_feature (1)..(273): Homolog of NCBI NO: 8347246 NR Description: hexose transporter [Solanum tuberosum]
  misc_feature (1)..(274): Homolog of NCBI NO: 15625046 NR Description: hexose transporter pGlT [Olea europaea]
  misc_feature (1)..(273): Homolog of NCBI NO: 8347248 NR Description: hexose transporter [Zea mays]
  misc_feature (1)..(273): Homolog of NCBI NO: 9858106 NR Description: putative glucose translocator [Mesembryanthemum
  misc_feature (1)..(274): Homolog of NCBI NO: 18417892 NR Description: sugar transporter-like protein; protein id: supported by cDNA: gi_16648752, supported by cDNA: gi_20259505 thaliana] >gi|16648753|gb|AAL25568.1| AT5g16150/T21H19_70
  misc_feature (1)..(273): Homolog of NCBI NO: 8347242 NR Description: hexose transporter [Spinacia oleracea]
MPGFLLALGMQFAVESPRWLCKVGRLDDAKVVIRNIWGGSEVEKAVEDFQSVMKNSGSNLNSRWLELLDKPHSRVAFIGGSLFVLQQFAGINGVLYFSSLTFQNVGITSGAQASLYVGVTNFAGALCASYLIDKQGRKKLLIGSYLGMAVSMFLIVYAVGFPLDEDLSQSLSILGTLMYIFSFAIGAGPVTGLIIPELSSNRTRGKIMGFSFSVHWVSNFLVGLFFLDLVEKYGVGTVYASFGSVSLLAAAFSHLFTVETKGRSLEEIELSLNSRDDLS

SEQ ID NO: 72501 - DNA, 1320 bp, Arabidopsis thaliana
  misc_feature (1)..(1320): Ceres Seq. ID no. 4936172
  misc_feature: MA Experiment ID: 20001451 Result: Down-regulated in Transcription
  misc_feature: MA Experiment 20001451 PARAMETER Experiment Name: At_Far-red-induction_P Parameter: Age (day) Value: 7
  misc_feature: MA Experiment 20001451 PARAMETER Experiment Name: At_Far-red-induction_P Parameter: Light Value: Far-red vs. White
  misc_feature: MA Experiment 20001451 PARAMETER Experiment Name: At_Far-red-induction_P Parameter: Organism Value: A. thaliana
  misc_feature: MA Experiment 20001451 PARAMETER Experiment Name: At_Far-red-induction_P Parameter: Plant Line Value: Columbia
  misc_feature: MA Experiment 20001451 PARAMETER Experiment Name: At_Far-red-induction_P Parameter: Timepoint (hr) Value: 24
  misc_feature: MA Experiment 20001451 PARAMETER Experiment Name: At_Far-red-induction_P Parameter: Tissue Value: Whole Plant
atgacactcgccggcgtagagcctaaccacatcactttcatagctctactctccgggtgtggtgattttacctccggaagtgaagccttgggcgatttgcttcatgggtatgcttgtaaacttggtcttgatagaaaccatgtcatggttggcaccgcaattatcggcatgtactccaaacgcggccgttttaagaaggctagattggtttttgattacatggaagataaaaattcggttacttggaatacaatgatcgatgggtacatgagaagtggtcaagtcgataacgctgctaagatgttcgacaaaatgcctgaacgagacttgatttcttggacggctatgataaatggctttgttaagaaaggttatcaagaggaagctttgttatggttccgtgaaatgcagatttctggagtaaaaccagattacgttgctattattgctgctcttaacgcttgcacaaaccttggtgctctctcatttggattatgggtacatcgttatgttttgagtcaggatttcaagaacaatgtgagggtgagtaattcactgatcgatttgtattgtcgatgcgggtgtgtggagtttgctcgacaagttttttacaacatggagaaacgaaccgtagtttcgtggaattcagtcattgttggttttgctgctaatggaaatgcacatgaatcattagtctacttcaggaaaatgcaagagaaaggctttaaacctgacgcagtcactttcactggggcgcttaccgcgtgtagccatgtaggtctagttgaagaaggtcttcgatattttcaaattatgaaatgtgattacagaatctcgcctcgaattgagcattatggatgcttagtggatttgtatagtcgggctgggagattggaagacgctttgaagttggtgcagagcatgccaatgaagccaaatgaagttgtgattggatcgttgcttgcagcttgcagcaatcatgggaacaatatcgtcttagcagagaggctgatgaagcatcttaccgacctgaatgtgaaaagccattcaaattatgtgattctctcgaatatgtatgctgctgatggaaaatgggaaggagcaagtaagatgagaaggaagatgaagggtctcggtctaaaaaagcagcctgggtttagttcgatagagattgatgattgcatgcatgtgttcatggccggtgacaatgcccatgttgagaccacttatatccgcgaggtcctggagcttatttcttctgatttgcgattacagggctgtgtagttgaaacccttgctggtgatctcctcaatgcttga

SEQ ID NO: 72502 - protein, 439 aa, Arabidopsis thaliana
  peptide (1)..(439): Ceres Seq. ID no. 4936173
  misc_feature (111)..(145): Pfam Name: PPR repeat Pfam Description: PPR repeat
  misc_feature (1)..(439): Homolog of NCBI NO: 15221249 NR Description: hypothetical protein; protein id: At1g05750.1
  misc_feature (8)..(420): Homolog of NCBI NO: 15225375 NR Description: unknown protein; protein id: At2g20540.1
  misc_feature (1)..(430): Homolog of NCBI NO: 15239979 NR Description: selenium-binding protein-like; protein id:
  misc_feature (6)..(431): Homolog of NCBI NO: 15235537 NR Description: putative protein; protein id: At4g37380.1
  misc_feature (5)..(431): Homolog of NCBI NO: 34915288 NR Description: similar to selenium-binding protein [Oryza sativa
  misc_feature (6)..(423): Homolog of NCBI NO: 15225445 NR Description: hypothetical protein; protein id: At2g13600.1
  misc_feature (6)..(421): Homolog of NCBI NO: 15227619 NR Description: hypothetical protein; protein id: At2g29760.1
  misc_feature (4)..(423): Homolog of NCBI NO: 37534112 NR Description: putative selenium-binding protein-like [Oryza
  misc_feature (85)..(428): Homolog of NCBI NO: 15233590 NR Description: putative protein; protein id: At4g21300.1
  misc_feature (1)..(105): Homolog of NCBI NO: 15233590 NR Description: putative protein; protein id: At4g21300.1
MTLAGVEPNHITFIALLSGCGDFTSGSEALGDLLHGYACKLGLDRNHVMVGTAIIGMYSKRGRFKKARLVFDYMEDKNSVTWNTMIDGYMRSGQVDNAAKMFDKMPERDLISWTAMINGFVKKGYQEEALLWFREMQISGVKPDYVAIIAALNACTNLGALSFGLWVHRYVLSQDFKNNVRVSNSLIDLYCRCGCVEFARQVFYNMEKRTVVSWNSVIVGFAANGNAHESLVYFRKMQEKGFKPDAVTFTGALTACSHVGLVEEGLRYFQIMKCDYRISPRIEHYGCLVDLYSRAGRLEDALKLVQSMPMKPNEVVIGSLLAACSNHGNNIVLAERLMKHLTDLNVKSHSNYVILSNMYAADGKWEGASKMRRKMKGLGLKKQPGFSSIEIDDCMHVFMAGDNAHVETTYIREVLELISSDLRLQGCVVETLAGDLLNA

SEQ ID NO: 72503 - protein, 391 aa, Arabidopsis thaliana
  peptide (1)..(391): Ceres Seq. ID no. 4936174
  misc_feature (63)..(97): Pfam Name: PPR repeat Pfam Description: PPR repeat
  misc_feature (1)..(391): Homolog of NCBI NO: 15221249 NR Description: hypothetical protein; protein id: At1g05750.1
  misc_feature (1)..(372): Homolog of NCBI NO: 15225375 NR Description: unknown protein; protein id: At2g20540.1
  misc_feature (1)..(382): Homolog of NCBI NO: 15239979 NR Description: selenium-binding protein-like; protein id:
  misc_feature (1)..(383): Homolog of NCBI NO: 15235537 NR Description: putative protein; protein id: At4g37380.1
  misc_feature (1)..(383): Homolog of NCBI NO: 34915288 NR Description: similar to selenium-binding protein [Oryza sativa
  misc_feature (1)..(375): Homolog of NCBI NO: 15225445 NR Description: hypothetical protein; protein id: At2g13600.1
  misc_feature (1)..(373): Homolog of NCBI NO: 15227619 NR Description: hypothetical protein; protein id: At2g29760.1
  misc_feature (1)..(375): Homolog of NCBI NO: 37534112 NR Description: putative selenium-binding protein-like [Oryza
  misc_feature (37)..(380): Homolog of NCBI NO: 15233590 NR Description: putative protein; protein id: At4g21300.1
  misc_feature (1)..(57): Homolog of NCBI NO: 15233590 NR Description: putative protein; protein id: At4g21300.1
MVGTAIIGMYSKRGRFKKARLVFDYMEDKNSVTWNTMIDGYMRSGQVDNAAKMFDKMPERDLISWTAMINGFVKKGYQEEALLWFREMQISGVKPDYVAIIAALNACTNLGALSFGLWVHRYVLSQDFKNNVRVSNSLIDLYCRCGCVEFARQVFYNMEKRTVVSWNSVIVGFAANGNAHESLVYFRKMQEKGFKPDAVTFTGALTACSHVGLVEEGLRYFQIMKCDYRISPRIEHYGCLVDLYSRAGRLEDALKLVQSMPMKPNEVVIGSLLAACSNHGNNIVLAERLMKHLTDLNVKSHSNYVILSNMYAADGKWEGASKMRRKMKGLGLKKQPGFSSIEIDDCMHVFMAGDNAHVETTYIREVLELISSDLRLQGCVVETLAGDLLNA

SEQ ID NO: 72504 - protein, 383 aa, Arabidopsis thaliana
  peptide (1)..(383): Ceres Seq. ID no. 4936175
  misc_feature (55)..(89): Pfam Name: PPR repeat Pfam Description: PPR repeat
  misc_feature (1)..(383): Homolog of NCBI NO: 15221249 NR Description: hypothetical protein; protein id: At1g05750.1
  misc_feature (1)..(364): Homolog of NCBI NO: 15225375 NR Description: unknown protein; protein id: At2g20540.1
  misc_feature (1)..(374): Homolog of NCBI NO: 15239979 NR Description: selenium-binding protein-like; protein id:
  misc_feature (1)..(375): Homolog of NCBI NO: 15235537 NR Description: putative protein; protein id: At4g37380.1
  misc_feature (1)..(375): Homolog of NCBI NO: 34915288 NR Description: similar to selenium-binding protein [Oryza sativa
  misc_feature (1)..(367): Homolog of NCBI NO: 15225445 NR Description: hypothetical protein; protein id: At2g13600.1
  misc_feature (1)..(365): Homolog of NCBI NO: 15227619 NR Description: hypothetical protein; protein id: At2g29760.1
  misc_feature (1)..(367): Homolog of NCBI NO: 37534112 NR Description: putative selenium-binding protein-like [Oryza
  misc_feature (29)..(372): Homolog of NCBI NO: 15233590 NR Description: putative protein; protein id: At4g21300.1
  misc_feature (1)..(49): Homolog of NCBI NO: 15233590 NR Description: putative protein; protein id: At4g21300.1
MYSKRGRFKKARLVFDYMEDKNSVTWNTMIDGYMRSGQVDNAAKMFDKMPERDLISWTAMINGFVKKGYQEEALLWFREMQISGVKPDYVAIIAALNACTNLGALSFGLWVHRYVLSQDFKNNVRVSNSLIDLYCRCGCVEFARQVFYNMEKRTVVSWNSVIVGFAANGNAHESLVYFRKMQEKGFKPDAVTFTGALTACSHVGLVEEGLRYFQIMKCDYRISPRIEHYGCLVDLYSRAGRLEDALKLVQSMPMKPNEVVIGSLLAACSNHGNNIVLAERLMKHLTDLNVKSHSNYVILSNMYAADGKWEGASKMRRKMKGLGLKKQPGFSSIEIDDCMHVFMAGDNAHVETTYIREVLELISSDLRLQGCVVETLAGDLLNA

SEQ ID NO: 72505 - DNA, 1503 bp, Arabidopsis thaliana
  misc_feature (1)..(1503): Ceres Seq. ID no. 4936269
  misc_feature: MA Experiment ID: 20001451 Result: Down-regulated in Transcription
  misc_feature: MA Experiment 20001451 PARAMETER Experiment Name: At_Far-red-induction_P Parameter: Age (day) Value: 7
  misc_feature: MA Experiment 20001451 PARAMETER Experiment Name: At_Far-red-induction_P Parameter: Light Value: Far-red vs. White
  misc_feature: MA Experiment 20001451 PARAMETER Experiment Name: At_Far-red-induction_P Parameter: Organism Value: A. thaliana
  misc_feature: MA Experiment 20001451 PARAMETER Experiment Name: At_Far-red-induction_P Parameter: Plant Line Value: Columbia
  misc_feature: MA Experiment 20001451 PARAMETER Experiment Name: At_Far-red-induction_P Parameter: Timepoint (hr) Value: 24
  misc_feature: MA Experiment 20001451 PARAMETER Experiment Name: At_Far-red-induction_P Parameter: Tissue Value: Whole Plant
atgggtctccttcccgtcgtcggaattacttcgccggcgctcatcacccacaaaaatcacgccaatccaaagatacagagacataatcaatctacctccgagaccactgtttcatggacttctcgcatcaatctcctcacgcgcaatggtcgattagcggaggcagcgaaggaattctccgatatgacactcgccggcgtagagcctaaccacatcactttcatagctctactctccgggtgtggtgattttacctccggaagtgaagccttgggcgatttgcttcatgggtatgcttgtaaacttggtcttgatagaaaccatgtcatggttggcaccgcaattatcggcatgtactccaaacgcggccgttttaagaaggctagattggtttttgattacatggaagataaaaattcggttacttggaatacaatgatcgatgggtacatgagaagtggtcaagtcgataacgctgctaagatgttcgacaaaatgcctgaacgagacttgatttcttggacggctatgataaatggctttgttaagaaaggttatcaagaggaagctttgttatggttccgtgaaatgcagatttctggagtaaaaccagattacgttgctattattgctgctcttaacgcttgcacaaaccttggtgctctctcatttggattatgggtacatcgttatgttttgagtcaggatttcaagaacaatgtgagggtgagtaattcactgatcgatttgtattgtcgatgcgggtgtgtggagtttgctcgacaagttttttacaacatggagaaacgaaccgtagtttcgtggaattcagtcattgttggttttgctgctaatggaaatgcacatgaatcattagtctacttcaggaaaatgcaagagaaaggctttaaacctgacgcagtcactttcactggggcgcttaccgcgtgtagccatgtaggtctagttgaagaaggtcttcgatattttcaaattatgaaatgtgattacagaatctcgcctcgaattgagcattatggatgcttagtggatttgtatagtcgggctgggagattggaagacgctttgaagttggtgcagagcatgccaatgaagccaaatgaagttgtgattggatcgttgcttgcagcttgcagcaatcatgggaacaatatcgtcttagcagagaggctgatgaagcatcttaccgacctgaatgtgaaaagccattcaaattatgtgattctctcgaatatgtatgctgctgatggaaaatgggaaggagcaagtaagatgagaaggaagatgaagggtctcggtctaaaaaagcagcctgggtttagttcgatagagattgatgattgcatgcatgtgttcatggccggtgacaatgcccatgttgagaccacttatatccgcgaggtcctggagcttatttcttctgatttgcgattacagggctgtgtagttgaaacccttgctggtgatctcctcaatgcttga

SEQ ID NO: 72506 - protein, 500 aa, Arabidopsis thaliana
  peptide (1)..(500): Ceres Seq. ID no. 4936270
  misc_feature (172)..(206): Pfam Name: PPR repeat Pfam Description: PPR repeat
  misc_feature (1)..(500): Homolog of NCBI NO: 15221249 NR Description: hypothetical protein; protein id: At1g05750.1
  misc_feature (29)..(481): Homolog of NCBI NO: 15225375 NR Description: unknown protein; protein id: At2g20540.1
  misc_feature (37)..(484): Homolog of NCBI NO: 15225445 NR Description: hypothetical protein; protein id: At2g13600.1
  misc_feature (35)..(492): Homolog of NCBI NO: 34915288 NR Description: similar to selenium-binding protein [Oryza sativa
  misc_feature (37)..(482): Homolog of NCBI NO: 15227619 NR Description: hypothetical protein; protein id: At2g29760.1
  misc_feature (17)..(492): Homolog of NCBI NO: 15235537 NR Description: putative protein; protein id: At4g37380.1
  misc_feature (29)..(484): Homolog of NCBI NO: 37534112 NR Description: putative selenium-binding protein-like [Oryza
  misc_feature (59)..(491): Homolog of NCBI NO: 15239979 NR Description: selenium-binding protein-like; protein id:
  misc_feature (37)..(489): Homolog of NCBI NO: 34910298 NR Description: P0013F10.8 [Oryza sativa (japonica
  misc_feature (146)..(489): Homolog of NCBI NO: 15233590 NR Description: putative protein; protein id: At4g21300.1
MGLLPVVGITSPALITHKNHANPKIQRHNQSTSETTVSWTSRINLLTRNGRLAEAAKEFSDMTLAGVEPNHITFIALLSGCGDFTSGSEALGDLLHGYACKLGLDRNHVMVGTAIIGMYSKRGRFKKARLVFDYMEDKNSVTWNTMIDGYMRSGQVDNAAKMFDKMPERDLISWTAMINGFVKKGYQEEALLWFREMQISGVKPDYVAIIAALNACTNLGALSFGLWVHRYVLSQDFKNNVRVSNSLIDLYCRCGCVEFARQVFYNMEKRTVVSWNSVIVGFAANGNAHESLVYFRKMQEKGFKPDAVTFTGALTACSHVGLVEEGLRYFQIMKCDYRISPRIEHYGCLVDLYSRAGRLEDALKLVQSMPMKPNEVVIGSLLAACSNHGNNIVLAERLMKHLTDLNVKSHSNYVILSNMYAADGKWEGASKMRRKMKGLGLKKQPGFSSIEIDDCMHVFMAGDNAHVETTYIREVLELISSDLRLQGCVVETLAGDLLNA

SEQ ID NO: 72507 - protein, 439 aa, Arabidopsis thaliana; identical to SEQ ID NO: 72502
  peptide (1)..(439): Ceres Seq. ID no. 4936271
  misc_feature (111)..(145): Pfam Name: PPR repeat Pfam Description: PPR repeat
  misc_feature (1)..(439): Homolog of NCBI NO: 15221249 NR Description: hypothetical protein; protein id: At1g05750.1
  misc_feature (1)..(420): Homolog of NCBI NO: 15225375 NR Description: unknown protein; protein id: At2g20540.1
  misc_feature (1)..(423): Homolog of NCBI NO: 15225445 NR Description: hypothetical protein; protein id: At2g13600.1
  misc_feature (1)..(431): Homolog of NCBI NO: 34915288 NR Description: similar to selenium-binding protein [Oryza sativa
  misc_feature (1)..(421): Homolog of NCBI NO: 15227619 NR Description: hypothetical protein; protein id: At2g29760.1
  misc_feature (1)..(431): Homolog of NCBI NO: 15235537 NR Description: putative protein; protein id: At4g37380.1
  misc_feature (1)..(423): Homolog of NCBI NO: 37534112 NR Description: putative selenium-binding protein-like [Oryza
  misc_feature (1)..(430): Homolog of NCBI NO: 15239979 NR Description: selenium-binding protein-like; protein id:
  misc_feature (1)..(428): Homolog of NCBI NO: 34910298 NR Description: P0013F10.8 [Oryza sativa (japonica
  misc_feature (85)..(428): Homolog of NCBI NO: 15233590 NR Description: putative protein; protein id: At4g21300.1

SEQ ID NO: 72508 - protein, 391 aa, Arabidopsis thaliana; identical to SEQ ID NO: 72503
  peptide (1)..(391): Ceres Seq. ID no. 4936272
  misc_feature (63)..(97): Pfam Name: PPR repeat Pfam Description: PPR repeat
  misc_feature (1)..(391): Homolog of NCBI NO: 15221249 NR Description: hypothetical protein; protein id: At1g05750.1
  misc_feature (1)..(372): Homolog of NCBI NO: 15225375 NR Description: unknown protein; protein id: At2g20540.1
  misc_feature (1)..(375): Homolog of NCBI NO: 15225445 NR Description: hypothetical protein; protein id: At2g13600.1
  misc_feature (1)..(383): Homolog of NCBI NO: 34915288 NR Description: similar to selenium-binding protein [Oryza sativa
  misc_feature (1)..(373): Homolog of NCBI NO: 15227619 NR Description: hypothetical protein; protein id: At2g29760.1
  misc_feature (1)..(383): Homolog of NCBI NO: 15235537 NR Description: putative protein; protein id: At4g37380.1
  misc_feature (1)..(375): Homolog of NCBI NO: 37534112 NR Description: putative selenium-binding protein-like [Oryza
  misc_feature (1)..(382): Homolog of NCBI NO: 15239979 NR Description: selenium-binding protein-like; protein id:
  misc_feature (1)..(380): Homolog of NCBI NO: 34910298 NR Description: P0013F10.8 [Oryza sativa (japonica
  misc_feature (37)..(380): Homolog of NCBI NO: 15233590 NR Description: putative protein; protein id: At4g21300.1

SEQ ID NO: 72509 - DNA, 546 bp, Arabidopsis thaliana
  misc_feature (1)..(546): Ceres Seq. ID no. 4936284
  misc_feature: MA Experiment ID: 108573 Result: Down-regulated in Transcription
  misc_feature: MA Experiment 108573 PARAMETER Experiment Name: At_Drought_cDNA_P Parameter: Timepoint (hr) Value: 6
  misc_feature: MA Experiment 108573 PARAMETER Experiment Name: At_Drought_cDNA_P Parameter: Tissue Value: Aerial
  misc_feature: MA Experiment 108573 PARAMETER Experiment Name: At_Drought_cDNA_P Parameter: Treatment Value: Drought vs. No Drought
  misc_feature: MA Experiment ID: 108577 Result: Down-regulated in Transcription
  misc_feature: MA Experiment 108577 PARAMETER Experiment Name: At_42deg_Heat_cDNA_P Parameter: Temperature (deg C) Value: 42 vs. 22
  misc_feature: MA Experiment 108577 PARAMETER Experiment Name: At_42deg_Heat_cDNA_P Parameter: Timepoint (hr) Value: 6
  misc_feature: MA Experiment 108577 PARAMETER Experiment Name: At_42deg_Heat_cDNA_P Parameter: Tissue Value: Aerial
  misc_feature: MA Experiment ID: 20000093 Result: Down-regulated in Transcription
  misc_feature: MA Experiment 20000093 PARAMETER Experiment Name: At_42deg_Heat_cDNA_P Parameter: Temperature (deg C) Value: 42 vs. 22
  misc_feature: MA Experiment 20000093 PARAMETER Experiment Name: At_42deg_Heat_cDNA_P Parameter: Timepoint (hr) Value: 0.5
  misc_feature: MA Experiment 20000093 PARAMETER Experiment Name: At_42deg_Heat_cDNA_P Parameter: Tissue Value: Aerial
  misc_feature: MA Experiment ID: 20000111 Result: Down-regulated in Transcription
  misc_feature: MA Experiment 20000111 PARAMETER Experiment Name: At_42deg_Heat_cDNA_P Parameter: Temperature (deg C) Value: 42 vs. 22
  misc_feature: MA Experiment 20000111 PARAMETER Experiment Name: At_42deg_Heat_cDNA_P Parameter: Timepoint (hr) Value: 6
  misc_feature: MA Experiment 20000111 PARAMETER Experiment Name: At_42deg_Heat_cDNA_P Parameter: Tissue Value: Aerial
  misc_feature: MA Experiment ID: 20000112 Result: Down-regulated in Transcription
  misc_feature: MA Experiment 20000112 PARAMETER Experiment Name: At_42deg_Heat_cDNA_P Parameter: Temperature (deg C) Value: 42 vs. 22
  misc_feature: MA Experiment 20000112 PARAMETER Experiment Name: At_42deg_Heat_cDNA_P Parameter: Timepoint (hr) Value: 2
  misc_feature: MA Experiment 20000112 PARAMETER Experiment Name: At_42deg_Heat_cDNA_P Parameter: Tissue Value: Aerial
  misc_feature: MA Experiment ID: 20000113 Result: Down-regulated in Transcription
  misc_feature: MA Experiment 20000113 PARAMETER Experiment Name: At_42deg_Heat_cDNA_P Parameter: Temperature (deg C) Value: 42 vs. 22
  misc_feature: MA Experiment 20000113 PARAMETER Experiment Name: At_42deg_Heat_cDNA_P Parameter: Timepoint (hr) Value: 8
  misc_feature: MA Experiment 20000113 PARAMETER Experiment Name: At_42deg_Heat_cDNA_P Parameter: Tissue Value: Aerial
  misc_feature: MA Experiment ID: 20000144 Result: Down-regulated in Transcription
  misc_feature: MA Experiment 20000144 PARAMETER Experiment Name: At_42deg_Heat_cDNA_P Parameter: Temperature (deg C) Value: 42 vs. 22
  misc_feature: MA Experiment 20000144 PARAMETER Experiment Name: At_42deg_Heat_cDNA_P Parameter: Timepoint (hr) Value: 1
  misc_feature: MA Experiment 20000144 PARAMETER Experiment Name: At_42deg_Heat_cDNA_P Parameter: Tissue Value: Aerial
  misc_feature: MA Experiment ID: 20000495 Result: Down-regulated in Transcription
  misc_feature: MA Experiment 20000495 PARAMETER Experiment Name: At_Guard_Cells_P Parameter: Harvest Date Value: 8/2/2002
  misc_feature: MA Experiment 20000495 PARAMETER Experiment Name: At_Guard_Cells_P Parameter: Organism Value: A. thaliana
  misc_feature: MA Experiment 20000495 PARAMETER Experiment Name: At_Guard_Cells_P Parameter: Tissue Value: Guard Cells vs. Leaves
  misc_feature: MA Experiment ID: 20001451 Result: Down-regulated in Transcription
  misc_feature: MA Experiment 20001451 PARAMETER Experiment Name: At_Far-red-induction_P Parameter: Age (day) Value: 7
  misc_feature: MA Experiment 20001451 PARAMETER Experiment Name: At_Far-red-induction_P Parameter: Light Value: Far-red vs. White
  misc_feature: MA Experiment 20001451 PARAMETER Experiment Name: At_Far-red-induction_P Parameter: Organism Value: A. thaliana
  misc_feature: MA Experiment 20001451 PARAMETER Experiment Name: At_Far-red-induction_P Parameter: Plant Line Value: Columbia
  misc_feature: MA Experiment 20001451 PARAMETER Experiment Name: At_Far-red-induction_P Parameter: Timepoint (hr) Value: 24
  misc_feature: MA Experiment 20001451 PARAMETER Experiment Name: At_Far-red-induction_P Parameter: Tissue Value: Whole Plant
aacatactttttacaatcacatttttgaagaactttcattccataaatctacagatctttgtgtatcaagtaaagagatgtcaggaagaggaaagggaggaaaaggattgggaaagggaggagcctattcgtcgtcttgctcgtagaggtggtgtcaagcgtatcagtggtctcatctacgaagagaccagaggtgtcctcaagatcttcctcgagaatgttatccgtgacgccgttacctacactgagcacgccaggaggaagacggtgaccgccatggatgttgtctacgctttgaagaggcaaggtcgtactctctacggtttcggaggttaatccgatttgggggattagggtttatgcaagtttggggatttcttcttgtttctgagatccgtgttaaatggtttgaattagtcaaaagtaaattcaggagttagtttttgtttctcgtttttcgttgttattagccaatgtgatgtagtagttaattatcttttgcaagctttgtgctaagaaaatctaatgagaattatccatttgctt

SEQ ID NO: 72510 - protein, 111 aa, Arabidopsis thaliana; identical to SEQ ID NO: 20534
  peptide (1)..(111): Ceres Seq. ID no. 4936285
  misc_feature (43)..(105): Pfam Name: Core histone H2A/H2B/H3/H4 Pfam Description: Core histone H2A/H2B/H3/H4
  misc_feature (43)..(111): Homolog of NCBI NO: 462242 NR Description: Histone H4 >gi|166311|gb|AAC37355.1| histone H4 formosa] >gi|455652|gb|AAB28739.1| histone H4; H4 [Acropora
  misc_feature (43)..(111): Homolog of NCBI NO: 12845285 NR Description: unnamed protein product [Mus musculus]
  misc_feature (43)..(111): Homolog of NCBI NO: 32363170 NR Description: Histone H4
  misc_feature (43)..(111): Homolog of NCBI NO: 11121217 NR Description: histone H4 [Mortierella alpina]
  misc_feature (43)..(111): Homolog of NCBI NO: 1883026 NR Description: histone H4 [Diprion pini]
  misc_feature (43)..(111): Homolog of NCBI NO: 1883001 NR Description: histone H4 [Apis mellifera]
  misc_feature (43)..(110): Homolog of NCBI NO: 462244 NR Description: Histone H4 >gi|101931|pir||S25638 histone H4 - (Phanerochaete chrysosporium) >gi|3140|emb|CAA78837.1| histone [Phanerochaete chrysosporium] >gi|3142|emb|CAA78838.1| histone
  misc_feature (43)..(111): Homolog of NCBI NO: 84451 NR Description: histone H4 - Caenorhabditis elegans
  misc_feature (43)..(111): Homolog of NCBI NO: 23508257 NR Description: histone H4, putative [Plasmodium falciparum 3D7]
  misc_feature (43)..(111): Homolog of NCBI NO: 122092 NR Description: Histone H4.1 >gi|101785|pir||S11939 histone H4.1 Emericella nidulans >gi|296341|emb|CAA39155.1| H4.1 [Emericella >gi|529955|gb|AAA20820.1| histone H4.1

SEQ ID NO: 72511 - DNA, 3060 bp, Arabidopsis thaliana
  misc_feature (1)..(3060): Ceres Seq. ID no. 4936388
  misc_feature: MA Experiment ID: 20000171 Result: Down-regulated in Transcription
  misc_feature: MA Experiment 20000171 PARAMETER Experiment Name: At_42deg_Heat_P Parameter: Age (day) Value: 14
  misc_feature: MA Experiment 20000171 PARAMETER Experiment Name: At_42deg_Heat_P Parameter: Organism Value: A. thaliana
  misc_feature: MA Experiment 20000171 PARAMETER Experiment Name: At_42deg_Heat_P Parameter: Plant Line Value: WS
  misc_feature: MA Experiment 20000171 PARAMETER Experiment Name: At_42deg_Heat_P Parameter: Temperature (deg C) Value: 42 vs. 22
  misc_feature: MA Experiment 20000171 PARAMETER Experiment Name: At_42deg_Heat_P Parameter: Timepoint (hr) Value: 1
  misc_feature: MA Experiment 20000171 PARAMETER Experiment Name: At_42deg_Heat_P Parameter: Tissue Value: Aerial
  misc_feature: MA Experiment ID: 20000173 Result: Down-regulated in Transcription
  misc_feature: MA Experiment 20000173 PARAMETER Experiment Name: At_42deg_Heat_P Parameter: Age (day) Value: 14
  misc_feature: MA Experiment 20000173 PARAMETER Experiment Name: At_42deg_Heat_P Parameter: Organism Value: A. thaliana
  misc_feature: MA Experiment 20000173 PARAMETER Experiment Name: At_42deg_Heat_P Parameter: Plant Line Value: WS
  misc_feature: MA Experiment 20000173 PARAMETER Experiment Name: At_42deg_Heat_P Parameter: Temperature (deg C) Value: 42 vs. 22
  misc_feature: MA Experiment 20000173 PARAMETER Experiment Name: At_42deg_Heat_P Parameter: Timepoint (hr) Value: 6
  misc_feature: MA Experiment 20000173 PARAMETER Experiment Name: At_42deg_Heat_P Parameter: Tissue Value: Aerial
  misc_feature: MA Experiment ID: 20000182 Result: Up-regulated in Transcription
  misc_feature: MA Experiment 20000182 PARAMETER Experiment Name: At_2mM_SA_P Parameter: Age (day) Value: 14
  misc_feature: MA Experiment 20000182 PARAMETER Experiment Name: At_2mM_SA_P Parameter: Organism Value: A. thaliana
  misc_feature: MA Experiment 20000182 PARAMETER Experiment Name: At_2mM_SA_P Parameter: Plant Line Value: WS
  misc_feature: MA Experiment 20000182 PARAMETER Experiment Name: At_2mM_SA_P Parameter: Timepoint (hr) Value: 6
  misc_feature: MA Experiment 20000182 PARAMETER Experiment Name: At_2mM_SA_P Parameter: Tissue Value: Aerial
  misc_feature: MA Experiment 20000182 PARAMETER Experiment Name: At_2mM_SA_P Parameter: Treatment Value: 2mM SA vs. No Treatment
  misc_feature: MA Experiment ID: 20000184 Result: Down-regulated in Transcription
  misc_feature: MA Experiment 20000184 PARAMETER Experiment Name: At_Shoots__P Parameter: Age (day) Value: 7
  misc_feature: MA Experiment 20000184 PARAMETER Experiment Name: At_Shoots__P Parameter: Tissue Value: Shoots vs. Whole Plant
  misc_feature: MA Experiment ID: 20000185 Result: Down-regulated in Transcription
  misc_feature: MA Experiment 20000185 PARAMETER Experiment Name: At_Roots__P Parameter: Age (day) Value: 7 vs. 21
  misc_feature: MA Experiment 20000185 PARAMETER Experiment Name: At_Roots__P Parameter: Organism Value: A. thaliana
  misc_feature: MA Experiment 20000185 PARAMETER Experiment Name: At_Roots__P Parameter: Tissue Value: Roots vs. Whole Plant
  misc_feature: MA Experiment ID: 20000794 Result: Down-regulated in Transcription
  misc_feature: MA Experiment 20000794 PARAMETER Experiment Name: At_Petals_P Parameter: Age (day) Value: 23-25 days
  misc_feature: MA Experiment 20000794 PARAMETER Experiment Name: At_Petals_P Parameter: Plant Line Value: WS
  misc_feature: MA Experiment 20000794 PARAMETER Experiment Name: At_Petals_P Parameter: Tissue Value: Petals vs. Whole plant
  misc_feature: MA Experiment ID: 20001451 Result: Up-regulated in Transcription
  misc_feature: MA Experiment 20001451 PARAMETER Experiment Name: At_Far-red-induction_P Parameter: Age (day) Value: 7
  misc_feature: MA Experiment 20001451 PARAMETER Experiment Name: At_Far-red-induction_P Parameter: Light Value: Far-red vs. White
  misc_feature: MA Experiment 20001451 PARAMETER Experiment Name: At_Far-red-induction_P Parameter: Organism Value: A. thaliana
  misc_feature: MA Experiment 20001451 PARAMETER Experiment Name: At_Far-red-induction_P Parameter: Plant Line Value: Columbia
  misc_feature: MA Experiment 20001451 PARAMETER Experiment Name: At_Far-red-induction_P Parameter: Timepoint (hr) Value: 24
  misc_feature: MA Experiment 20001451 PARAMETER Experiment Name: At_Far-red-induction_P Parameter: Tissue Value: Whole Plant
  misc_feature: MA Experiment ID: 20001904 Result: Down-regulated in Transcription
  misc_feature: MA Experiment 20001904 PARAMETER Experiment Name: At_Drought_Reproduction_P Parameter: Age (day) Value: 37
  misc_feature: MA Experiment 20001904 PARAMETER Experiment Name: At_Drought_Reproduction_P Parameter: Organism Value: A. thaliana
  misc_feature: MA Experiment 20001904 PARAMETER Experiment Name: At_Drought_Reproduction_P Parameter: Plant Line Value: WS
  misc_feature: MA Experiment 20001904 PARAMETER Experiment Name: At_Drought_Reproduction_P Parameter: Timepoint (day) Value: 7
  misc_feature: MA Experiment 20001904 PARAMETER Experiment Name: At_Drought_Reproduction_P Parameter: Tissue Value: Rosettes
  misc_feature: MA Experiment 20001904 PARAMETER Experiment Name: At_Drought_Reproduction_P Parameter: Treatment Value: Drought vs. No Drought
  misc_feature: MA Experiment ID: 20001905 Result: Down-regulated in Transcription
  misc_feature: MA Experiment 20001905 PARAMETER Experiment Name: At_Drought_Reproduction_P Parameter: Age (day) Value: 40
  misc_feature: MA Experiment 20001905 PARAMETER Experiment Name: At_Drought_Reproduction_P Parameter: Organism Value: A. thaliana
  misc_feature: MA Experiment 20001905 PARAMETER Experiment Name: At_Drought_Reproduction_P Parameter: Plant Line Value: WS
  misc_feature: MA Experiment 20001905 PARAMETER Experiment Name: At_Drought_Reproduction_P Parameter: Timepoint (day) Value: 10
  misc_feature: MA Experiment 20001905 PARAMETER Experiment Name: At_Drought_Reproduction_P Parameter: Tissue Value: Rosettes
  misc_feature: MA Experiment 20001905 PARAMETER Experiment Name: At_Drought_Reproduction_P Parameter: Treatment Value: Drought vs. No Drought
atggcagctaatatgatgagaccggcgtttgcttacactgttgtgtacgtgaaggacgtagctaaatctgtagaattctactctagagcttttggtcacaacgtccgtcgtcttgacgaatcccacaggtggggggagctagagagcgggcaaaccacgatagcgttcacaccgcttcaccagcatgagaccgacgacctaaccgggaaggttcaggctacgcagtcagcacgtgaaagagcacccatcgaagtctgcttctgttaccctgatgttgatgccgctttcaagagagcggtggagaacggtgcggaggcagtgagcaagccggaagataaagaatgggggcagaaggagatagggaagaagctagggaagaaagattgggacttcaacaaagatccatgtagtggtgaaggcacttggattgtaacaacttacacaaccaaagggtttgagagtaatatcacttgtgattgctcctttcttcctcaaaactcttcttgccacgtcattagaatagtagtggctagtttaatgatggtgacaatgaaggggaaaaccactaaattccttggtgaagctctgaagtcgcagaacttaacaggcattgtccctccagaattctctaagcttcgtcaccttaaagttttagacctaagccgtaactctctgactggttccattccaaaggaatgggcttctatgcgcttggaagatttatctttcatggggaaccgattgtctggtccgtttccgaaagtcctgacccgccttacaatgctcagaaacttgagcctagaaggaaatcagttttcaggaccaatccctcctgatattggacagttggttcatttggagaaacttcatctcccttcaaatgctttcactggtccattgactgaaaaacttggattgctcaagaacctgactgatatgaggataagtgataataatttcactggaccaataccagatttcatcagcaattggacaagaatactgaaactgcagatgcatggttgcggtttggatggtccgataccttccagtatttctagcttaacaagcttgaccgacctgagaattagcgacttaggaggcaaaccgtcttccttccccccactgaagaatttggaatctatcaagacgcttgacctcagttttaatctcctaagtggtgagattccttcatcgtttgaaaatatgaagaaagccgatttcatagatgtttcttttaataacttcaccgatgaaagttcaattcctagccatgactgtaaccgagttacttcacacaagggttcaacctgttttcttcaacgcatgccttgtgttcatcctaagagatatcgaggtgaagtaaaagtggataaagaaataacatatcaggctgatgacgaacccaaaggtgcttctatgtacgtccttggcgctaacaagcgctgggcgttgagcagcaccgggaacttcatggacaatgatgacgatgctgatgagtatactgtgcagaacacatccaggttatcagttaatgcttcctctcccagctttggactttataggacagctcgagtctctcctttatcgttgacttactacggaatctgtcttggaaatgggaactacactgtgaatctccactttgctgagatcatctttaccgatgacaatacattatacagtctcggcaaacgtttgtttgatatttatgttcaggatcagttggtgattaaaaactttaacattcaagaagctgctcgaggatcagggacaacaggcattccgattagaggggtatatggtcctatgatttcagctatatctgtggaacccaatttcaaacctccggtatattatgacacaaaggatatcatactaaaagtgggggtacctgtcgctgcagcaacacttcttttgtttatcatagtgggtgtattctggaaaaaaaggcgtgacaaaaatgatattgacaaagagctaaggggtctagatcttcaaactggaacttttactctacggcagataaaagcagccactgataatttcgatgtaacaagaaagattggtgaaggtggatttggctctgtttacaagggtgaattatctgaggggaaattaattgcagttaaacaactgtctgcaaaatcgaggcagggaaatcgcgagtttgtaaatgagataggaatgatctcagctcttcaacatccgaatcttgtgaagctatatggatgttgtgttgaaggaaaccaattgatattggtgtatgagtacttggagaacaactgtctatctcgagcgttatttggaaaggatgagagttctagactgaaactagactggtcaacaaggaagaagatttttttggggatagccaagggactgacatttctccatgaagaatctaggataaagattgtacacagagatataaaggcaagcaatgtgttactcgataaggatctcaacgctaaaatttctgactttggtttggcaaagctgaatgatgatggaaacacacacatcagcactcgtattgcaggaactataggttatatggctcctgaatatgcaatgcgtggttacttgactgaaaaagcggatgtttatagcttcggcgtcgttgcactcgaaatcgttagtggaaagagtaacacaaactttaggccaaccgaggactttgtttaccttcttgattgggcttacgttttgcaagagagaggaagcttactagagctggttgatccaacgttagcctcagattactcagaagaggaagccatgttgatgctgaacgtggcattgatgtgcactaacgcatcaccgactctaaggcctacaatgtcgcaggtggtgagtctcatagaggggaagacagcgatgcaagagttgctgtcggatccgagcttctcaacggttaacccgaagcttaaagccttgaggaaccatttttggcaaaacgagctgagcagatcgcttagcttctccacaagcgggcctcgtactgcctctgctaactcactcgttgatgcagaggagaaaaccggacttttggattaa

SEQ ID NO: 72512 - protein, 1019 aa, Arabidopsis thaliana
  peptide (1)..(1019): Ceres Seq. ID no. 4936389
  misc_feature (9)..(118): Pfam Name: Glyoxalase/Bleomycin resistance Pfam Description: Glyoxalase/Bleomycin resistance
  misc_feature (589)..(1019): Homolog of NCBI NO: 25406989 NR Description: hypothetical protein [imported] - Arabidopsis
  misc_feature (492)..(591): Homolog of NCBI NO: 25406989 NR Description: hypothetical protein [imported] - Arabidopsis
  misc_feature (539)..(1006): Homolog of NCBI NO: 15220901 NR Description: leucine-rich repeat transmembrane protein kinase,
  misc_feature (182)..(595): Homolog of NCBI NO: 15220901 NR Description: leucine-rich repeat transmembrane protein kinase,
  misc_feature (110)..(591): Homolog of NCBI NO: 15231938 NR Description: receptor-like serine/threonine kinase, putative;
  misc_feature (589)..(1013): Homolog of NCBI NO: 15231938 NR Description: receptor-like serine/threonine kinase, putative;
  misc_feature (196)..(612): Homolog of NCBI NO: 25403090 NR Description: probable receptor-like serine/threonine kinase
  misc_feature (589)..(968): Homolog of NCBI NO: 25403090 NR Description: probable receptor-like serine/threonine kinase
  misc_feature (539)..(1006): Homolog of NCBI NO: 25405986 NR Description: protein F12M16.30 [imported] - Arabidopsis >gi|7769864|gb|AAF69542.1|AC008007_17 F12M16.30 [Arabidopsis
  misc_feature (589)..(1013): Homolog of NCBI NO: 11994595 NR Description: receptor-like serine/threonine kinase
MAANMMRPAFAYTVVYVKDVAKSVEFYSRAFGHNVRRLDESHRWGELESGQTTIAFTPLHQHETDDLTGKVQATQSARERAPIEVCFCYPDVDAAFKRAVENGAEAVSKPEDKEWGQKEIGKKLGKKDWDFNKDPCSGEGTWIVTTYTTKGFESNITCDCSFLPQNSSCHVIRIVVASLMMVTMKGKTTKFLGEALKSQNLTGIVPPEFSKLRHLKVLDLSRNSLTGSIPKEWASMRLEDLSFMGNRLSGPFPKVLTRLTMLRNLSLEGNQFSGPIPPDIGQLVHLEKLHLPSNAFTGPLTEKLGLLKNLTDMRISDNNFTGPIPDFISNWTRILKLQMHGCGLDGPIPSSISSLTSLTDLRISDLGGKPSSFPPLKNLESIKTLDLSFNLLSGEIPSSFENMKKADFIDVSFNNFTDESSIPSHDCNRVTSHKGSTCFLQRMPCVHPKRYRGEVKVDKEITYQADDEPKGASMYVLGANKRWALSSTGNFMDNDDDADEYTVQNTSRLSVNASSPSFGLYRTARVSPLSLTYYGICLGNGNYTVNLHFAEIIFTDDNTLYSLGKRLFDIYVQDQLVIKNFNIQEAARGSGTTGIPIRGVYGPMISAISVEPNFKPPVYYDTKDIILKVGVPVAAATLLLFIIVGVFWKKRRDKNDIDKELRGLDLQTGTFTLRQIKAATDNFDVTRKIGEGGFGSVYKGELSEGKLIAVKQLSAKSRQGNREFVNEIGMISALQHPNLVKLYGCCVEGNQLILVYEYLENNCLSRALFGKDESSRLKLDWSTRKKIFLGIAKGLTFLHEESRIKIVHRDIKASNVLLDKDLNAKISDFGLAKLNDDGNTHISTRIAGTIGYMAPEYAMRGYLTEKADVYSFGVVALEIVSGKSNTNFRPTEDFVYLLDWAYVLQERGSLLELVDPTLASDYSEEEAMLMLNVALMCTNASPTLRPTMSQVVSLIEGKTAMQELLSDPSFSTVNPKLKALRNHFWQNELSRSLSFSTSGPRTASANSLVDAEEKTGLLD

SEQ ID NO: 72513 - protein, 1015 aa, Arabidopsis thaliana
  peptide (1)..(1015): Ceres Seq. ID no. 4936390
  misc_feature (5)..(114): Pfam Name: Glyoxalase/Bleomycin resistance Pfam Description: Glyoxalase/Bleomycin resistance
  misc_feature (585)..(1015): Homolog of NCBI NO: 25406989 NR Description: hypothetical protein [imported] - Arabidopsis
  misc_feature (488)..(587): Homolog of NCBI NO: 25406989 NR Description: hypothetical protein [imported] - Arabidopsis
  misc_feature (535)..(1002): Homolog of NCBI NO: 15220901 NR Description: leucine-rich repeat transmembrane protein kinase,
  misc_feature (178)..(591): Homolog of NCBI NO: 15220901 NR Description: leucine-rich repeat transmembrane protein kinase,
  misc_feature (106)..(587): Homolog of NCBI NO: 15231938 NR Description: receptor-like serine/threonine kinase, putative;
  misc_feature (585)..(1009): Homolog of NCBI NO: 15231938 NR Description: receptor-like serine/threonine kinase, putative;
  misc_feature (192)..(608): Homolog of NCBI NO: 25403090 NR Description: probable receptor-like serine/threonine kinase
  misc_feature (585)..(964): Homolog of NCBI NO: 25403090 NR Description: probable receptor-like serine/threonine kinase
  misc_feature (535)..(1002): Homolog of NCBI NO: 25405986 NR Description: protein F12M16.30 [imported] - Arabidopsis >gi|7769864|gb|AAF69542.1|AC008007_17 F12M16.30 [Arabidopsis
  misc_feature (585)..(1009): Homolog of NCBI NO: 11994595 NR Description: receptor-like serine/threonine kinase
MMRPAFAYTVVYVKDVAKSVEFYSRAFGHNVRRLDESHRWGELESGQTTIAFTPLHQHETDDLTGKVQATQSARERAPIEVCFCYPDVDAAFKRAVENGAEAVSKPEDKEWGQKEIGKKLGKKDWDFNKDPCSGEGTWIVTTYTTKGFESNITCDCSFLPQNSSCHVIRIVVASLMMVTMKGKTTKFLGEALKSQNLTGIVPPEFSKLRHLKVLDLSRNSLTGSIPKEWASMRLEDLSFMGNRLSGPFPKVLTRLTMLRNLSLEGNQFSGPIPPDIGQLVHLEKLHLPSNAFTGPLTEKLGLLKNLTDMRISDNNFTGPIPDFISNWTRILKLQMHGCGLDGPIPSSISSLTSLTDLRISDLGGKPSSFPPLKNLESIKTLDLSFNLLSGEIPSSFENMKKADFIDVSFNNFTDESSIPSHDCNRVTSHKGSTCFLQRMPCVHPKRYRGEVKVDKEITYQADDEPKGASMYVLGANKRWALSSTGNFMDNDDDADEYTVQNTSRLSVNASSPSFGLYRTARVSPLSLTYYGICLGNGNYTVNLHFAEIIFTDDNTLYSLGKRLFDIYVQDQLVIKNFNIQEAARGSGTTGIPIRGVYGPMISAISVEPNFKPPVYYDTKDIILKVGVPVAAATLLLFIIVGVFWKKRRDKNDIDKELRGLDLQTGTFTLRQIKAATDNFDVTRKIGEGGFGSVYKGELSEGKLIAVKQLSAKSRQGNREFVNEIGMISALQHPNLVKLYGCCVEGNQLILVYEYLENNCLSRALFGKDESSRLKLDWSTRKKIFLGIAKGLTFLHEESRIKIVHRDIKASNVLLDKDLNAKISDFGLAKLNDDGNTHISTRIAGTIGYMAPEYAMRGYLTEKADVYSFGVVALEIVSGKSNTNFRPTEDFVYLLDWAYVLQERGSLLELVDPTLASDYSEEEAMLMLNVALMCTNASPTLRPTMSQVVSLIEGKTAMQELLSDPSFSTVNPKLKALRNHFWQNELSRSLSFSTSGPRTASANSLVDAEEKTGLLD

SEQ ID NO: 72514 - protein, 1014 aa, Arabidopsis thaliana
  peptide (1)..(1014): Ceres Seq. ID no. 4936391
  misc_feature (4)..(113): Pfam Name: Glyoxalase/Bleomycin resistance Pfam Description: Glyoxalase/Bleomycin resistance
  misc_feature (584)..(1014): Homolog of NCBI NO: 25406989 NR Description: hypothetical protein [imported] - Arabidopsis
  misc_feature (487)..(586): Homolog of NCBI NO: 25406989 NR Description: hypothetical protein [imported] - Arabidopsis
  misc_feature (534)..(1001): Homolog of NCBI NO: 15220901 NR Description: leucine-rich repeat transmembrane protein kinase,
  misc_feature (177)..(590): Homolog of NCBI NO: 15220901 NR Description: leucine-rich repeat transmembrane protein kinase,
  misc_feature (105)..(586): Homolog of NCBI NO: 15231938 NR Description: receptor-like serine/threonine kinase, putative;
  misc_feature (584)..(1008): Homolog of NCBI NO: 15231938 NR Description: receptor-like serine/threonine kinase, putative;
  misc_feature (191)..(607): Homolog of NCBI NO: 25403090 NR Description: probable receptor-like serine/threonine kinase
  misc_feature (584)..(963): Homolog of NCBI NO: 25403090 NR Description: probable receptor-like serine/threonine kinase
  misc_feature (534)..(1001): Homolog of NCBI NO: 25405986 NR Description: protein F12M16.30 [imported] - Arabidopsis >gi|7769864|gb|AAF69542.1|AC008007_17 F12M16.30 [Arabidopsis
  misc_feature (584)..(1008): Homolog of NCBI NO: 11994595 NR Description: receptor-like serine/threonine kinase
MRPAFAYTVVYVKDVAKSVEFYSRAFGHNVRRLDESHRWGELESGQTTIAFTPLHQHETDDLTGKVQATQSARERAPIEVCFCYPDVDAAFKRAVENGAEAVSKPEDKEWGQKEIGKKLGKKDWDFNKDPCSGEGTWIVTTYTTKGFESNITCDCSFLPQNSSCHVIRIVVASLMMVTMKGKTTKFLGEALKSQNLTGIVPPEFSKLRHLKVLDLSRNSLTGSIPKEWASMRLEDLSFMGNRLSGPFPKVLTRLTMLRNLSLEGNQFSGPIPPDIGQLVHLEKLHLPSNAFTGPLTEKLGLLKNLTDMRISDNNFTGPIPDFISNWTRILKLQMHGCGLDGPIPSSISSLTSLTDLRISDLGGKPSSFPPLKNLESIKTLDLSFNLLSGEIPSSFENMKKADFIDVSFNNFTDESSIPSHDCNRVTSHKGSTCFLQRMPCVHPKRYRGEVKVDKEITYQADDEPKGASMYVLGANKRWALSSTGNFMDNDDDADEYTVQNTSRLSVNASSPSFGLYRTARVSPLSLTYYGICLGNGNYTVNLHFAEIIFTDDNTLYSLGKRLFDIYVQDQLVIKNFNIQEAARGSGTTGIPIRGVYGPMISAISVEPNFKPPVYYDTKDIILKVGVPVAAATLLLFIIVGVFWKKRRDKNDIDKELRGLDLQTGTFTLRQIKAATDNFDVTRKIGEGGFGSVYKGELSEGKLIAVKQLSAKSRQGNREFVNEIGMISALQHPNLVKLYGCCVEGNQLILVYEYLENNCLSRALFGKDESSRLKLDWSTRKKIFLGIAKGLTFLHEESRIKIVHRDIKASNVLLDKDLNAKISDFGLAKLNDDGNTHISTRIAGTIGYMAPEYAMRGYLTEKADVYSFGVVALEIVSGKSNTNFRPTEDFVYLLDWAYVLQERGSLLELVDPTLASDYSEEEAMLMLNVALMCTNASPTLRPTMSQVVSLIEGKTAMQELLSDPSFSTVNPKLKALRNHFWQNELSRSLSFSTSGPRTASANSLVDAEEKTGLLD

SEQ ID NO: 72515 - DNA, 2571 bp, Arabidopsis thaliana
  misc_feature (1)..(2571): Ceres Seq. ID no. 4936442
  misc_feature: MA Experiment ID: 20000314 Result: Up-regulated in Transcription
  misc_feature: MA Experiment 20000314 PARAMETER Experiment Name: At_14day_Shoots-Roots_Sub_P Parameter: Age (day) Value: 14
  misc_feature: MA Experiment 20000314 PARAMETER Experiment Name: At_14day_Shoots-Roots_Sub_P Parameter: Organism Value: A. thaliana
  misc_feature: MA Experiment 20000314 PARAMETER Experiment Name: At_14day_Shoots-Roots_Sub_P Parameter: Plant Line Value: WS
  misc_feature: MA Experiment 20000314 PARAMETER Experiment Name: At_14day_Shoots-Roots_Sub_P Parameter: Tissue Value: Roots vs. Whole Plant
  misc_feature: Pfam Name: Pkinase Pfam Description: Protein kinase domain
atgaaaaacctccgtggacttctattggccttcctagttttgtctttaggcatttccgattttcttcgagcacaagatcaacaaggattcatcagtttggattgcgggttgcaagccgatgagtctccttataccgaaccattaacaaagttaacattcacatcagacgccgatttcatcaaaagtggaaaaagcggcaagattcaaaatgttccggggatggagtatataaagccatacacggttttgagatattttccagatggagtacgaaactgttatactcttatcgtcatacaaggcacaaactatctgatcgtagccatgtttacttatggaaactacgataatcttaacacacacccaaagttcgacctttatcttggtccaaatatatggaccacggtcgatttgcaaagaaatgtaaacggaacaagggcggaaatcattcacataccaaggtcaacttctttgcagatttgtcttgttaagacgggaacaactacgccgctaatatcagctttagaactacgaccattgagaaataatacttatattcctcaatctggttccctcaagacattgttccgcgtccatttgactgattccaaagaaactgttcggtatccagaagatgtccatgatcgtctttggagtccatttttcatgccggaatggagactgttaagaacaagtctcacggtcaacacttctgatgataacggctatgacataccggaagacgtagtggttacggcagccacacctgcaaatgtgagttcaccattaaccatttcttggaatttggaaacacctgacgacttagtttatgcatacctccacgtcgctgagatccaatccttaagggaaaatgataccagggaattcaacattagcgcaggccaagatgttaactatggacctgttagtcctgacgagtttctagtgggtactctattcaatacatcaccagttaaatgtgaaggagggacatgccatttgcaactaataaaaactccaaaatcaactctccctcccctcctcaatgctattgaggcttttataacagtggagtttccgcagtctgaaactaatgcaaatgacgtccttgctatcaagagcatagaaacaagctatggattaagtagaattagttggcaaggagatccatgtgttcctcaacaattattgtgggatggtcttacctgcgagtacaccaatatgtctacaccaccaagaatccattccttagacttgtcctcaagtgaactaactggaattatagttcctgagatccaaaatcttacggagcttaaaaaattggacttttcaaataataatctaacaggtggagtacctgaatttctagccaaaatgaaatcattgttagtcataaacttaagcggaaacaaccttagtggatcagtccctcaagctcttctcaacaaagtgaaaaatggttcatgcaacaaaaagaaaaatagcatcatgttaccagttgttgcatcacttgcttctttggctgctataatagcaatgatcgctctgctttttgtttgtattaaaagacgctcatcaagcagaaaaggtccatcaccaagccaacaatcaatagaaacaataaagaaaagatatacatatgccgaagttcttgccatgacaaagaaatttgaaagggttttgggtaaaggaggatttggaatggtctatcatggttatataaatggtactgaagaagtagcggtcaagctactctctccatcatcagctcaaggctataaagagttcaaaacagaggtagaacttcttctaagggtttaccacacaaatctggtaagtcttgttggatactgtgatgaaaaagatcatctggccctcatctaccagtacatggtcaatggcgatttgaaaaaacatttttcaggtagctccatcattagctgggttgatagactaaacatagctgttgatgcagcgtcaggtttggagtacttgcatattggttgcaaaccgctgatagttcatagagatgtaaaaagttctaacatactattggacgatcaattacaagctaagcttgcagattttgggctttctagatcttttcccattggggatgaatctcatgtgtctacacttgttgctggaacatttggataccttgatcatgaatactaccaaactaataggttgtctgagaagagtgatgtctacagttttggtgttgtactgctagaaattattacaaacaaaccggtgatcgatcataaccgcgacatgcctcacatagcagaatgggtgaaacttatgcttactagaggagacattagcaatattatggatcctaaacttcaaggggtctatgactctggttctgcatggaaagctcttgaattagcaatgacatgtgtgaatccttcttccttgaaaagacccaacatgtcccatgttgttcatgagctgaaggagtgtctggtatctgaaaacaacaggacaagagacatagacacatcgagatccatggacattaacttaagctttggcacagatgtgaaccccaaggcacgttag

SEQ ID NO: 72516 - protein, 856 aa, Arabidopsis thaliana
  peptide (1)..(856): Ceres Seq. ID no. 4936443
  misc_feature: Pfam Name: Pkinase Pfam Description: Protein kinase domain
  misc_feature (5)..(480): Homolog of NCBI NO: 15225938 NR Description: putative receptor-like protein kinase; protein id:
  misc_feature (400)..(856): Homolog of NCBI NO: 15225938 NR Description: putative receptor-like protein kinase; protein id:
  misc_feature (8)..(483): Homolog of NCBI NO: 9294681 NR Description: receptor-like protein kinase [Arabidopsis
  misc_feature (414)..(856): Homolog of NCBI NO: 9294681 NR Description: receptor-like protein kinase [Arabidopsis
  misc_feature (8)..(480): Homolog of NCBI NO: 15238489 NR Description: serine/threonine-specific protein kinase - like;
  misc_feature (414)..(856): Homolog of NCBI NO: 15238489 NR Description: serine/threonine-specific protein kinase - like;
  misc_feature (9)..(483): Homolog of NCBI NO: 25387119 NR Description: probable protein kinase [imported] - Arabidopsis >gi|9802783|gb|AAF99852.1|AC015448_2 Putative protein kinase
  misc_feature (414)..(856): Homolog of NCBI NO: 25387119 NR Description: probable protein kinase [imported] - Arabidopsis >gi|9802783|gb|AAF99852.1|AC015448_2 Putative protein kinase
  misc_feature (7)..(856): Homolog of NCBI NO: 15225949 NR Description: putative receptor-like protein kinase; protein id:
  misc_feature (11)..(856): Homolog of NCBI NO: 25387103 NR Description: probable receptor protein kinase [imported] - thaliana >gi|12321669|gb|AAG50871.1|AC025294_9 receptor protein
MKNLRGLLLAFLVLSLGISDFLRAQDQQGFISLDCGLQADESPYTEPLTKLTFTSDADFIKSGKSGKIQNVPGMEYIKPYTVLRYFPDGVRNCYTLIVIQGTNYLIVAMFTYGNYDNLNTHPKFDLYLGPNIWTTVDLQRNVNGTRAEIIHIPRSTSLQICLVKTGTTTPLISALELRPLRNNTYIPQSGSLKTLFRVHLTDSKETVRYPEDVHDRLWSPFFMPEWRLLRTSLTVNTSDDNGYDIPEDVVVTAATPANVSSPLTISWNLETPDDLVYAYLHVAEIQSLRENDTREFNISAGQDVNYGPVSPDEFLVGTLFNTSPVKCEGGTCHLQLIKTPKSTLPPLLNAIEAFITVEFPQSETNANDVLAIKSIETSYGLSRISWQGDPCVPQQLLWDGLTCEYTNMSTPPRIHSLDLSSSELTGIIVPEIQNLTELKKLDFSNNNLTGGVPEFLAKMKSLLVINLSGNNLSGSVPQALLNKVKNGSCNKKKNSIMLPVVASLASLAAIIAMIALLFVCIKRRSSSRKGPSPSQQSIETIKKRYTYAEVLAMTKKFERVLGKGGFGMVYHGYINGTEEVAVKLLSPSSAQGYKEFKTEVELLLRVYHTNLVSLVGYCDEKDHLALIYQYMVNGDLKKHFSGSSIISWVDRLNIAVDAASGLEYLHIGCKPLIVHRDVKSSNILLDDQLQAKLADFGLSRSFPIGDESHVSTLVAGTFGYLDHEYYQTNRLSEKSDVYSFGVVLLEIITNKPVIDHNRDMPHIAEWVKLMLTRGDISNIMDPKLQGVYDSGSAWKALELAMTCVNPSSLKRPNMSHVVHELKECLVSENNRTRDIDTSRSMDINLSFGTDVNPKAR

SEQ ID NO: 72517 - protein, 783 aa, Arabidopsis thaliana
  peptide (1)..(783): Ceres Seq. ID no. 4936444
  misc_feature: Pfam Name: Pkinase Pfam Description: Protein kinase domain
  misc_feature (1)..(407): Homolog of NCBI NO: 15225938 NR Description: putative receptor-like protein kinase; protein id:
  misc_feature (327)..(783): Homolog of NCBI NO: 15225938 NR Description: putative receptor-like protein kinase; protein id:
  misc_feature (1)..(410): Homolog of NCBI NO: 9294681 NR Description: receptor-like protein kinase [Arabidopsis
  misc_feature (341)..(783): Homolog of NCBI NO: 9294681 NR Description: receptor-like protein kinase [Arabidopsis
  misc_feature (1)..(407): Homolog of NCBI NO: 15238489 NR Description: serine/threonine-specific protein kinase - like;
  misc_feature (341)..(783): Homolog of NCBI NO: 15238489 NR Description: serine/threonine-specific protein kinase - like;
  misc_feature (1)..(410): Homolog of NCBI NO: 25387119 NR Description: probable protein kinase [imported] - Arabidopsis >gi|9802783|gb|AAF99852.1|AC015448_2 Putative protein kinase
  misc_feature (341)..(783): Homolog of NCBI NO: 25387119 NR Description: probable protein kinase [imported] - Arabidopsis >gi|9802783|gb|AAF99852.1|AC015448_2 Putative protein kinase
  misc_feature (1)..(783): Homolog of NCBI NO: 15225949 NR Description: putative receptor-like protein kinase; protein id:
  misc_feature (1)..(783): Homolog of NCBI NO: 25387103 NR Description: probable receptor protein kinase [imported] - thaliana >gi|12321669|gb|AAG50871.1|AC025294_9 receptor protein
MEYIKPYTVLRYFPDGVRNCYTLIVIQGTNYLIVAMFTYGNYDNLNTHPKFDLYLGPNIWTTVDLQRNVNGTRAEIIHIPRSTSLQICLVKTGTTTPLISALELRPLRNNTYIPQSGSLKTLFRVHLTDSKETVRYPEDVHDRLWSPFFMPEWRLLRTSLTVNTSDDNGYDIPEDVVVTAATPANVSSPLTISWNLETPDDLVYAYLHVAEIQSLRENDTREFNISAGQDVNYGPVSPDEFLVGTLFNTSPVKCEGGTCHLQLIKTPKSTLPPLLNAIEAFITVEFPQSETNANDVLAIKSIETSYGLSRISWQGDPCVPQQLLWDGLTCEYTNMSTPPRIHSLDLSSSELTGIIVPEIQNLTELKKLDFSNNNLTGGVPEFLAKMKSLLVINLSGNNLSGSVPQALLNKVKNGSCNKKKNSIMLPVVASLASLAAIIAMIALLFVCIKRRSSSRKGPSPSQQSIETIKKRYTYAEVLAMTKKFERVLGKGGFGMVYHGYINGTEEVAVKLLSPSSAQGYKEFKTEVELLLRVYHTNLVSLVGYCDEKDHLALIYQYMVNGDLKKHFSGSSIISWVDRLNIAVDAASGLEYLHIGCKPLIVHRDVKSSNILLDDQLQAKLADFGLSRSFPIGDESHVSTLVAGTFGYLDHEYYQTNRLSEKSDVYSFGVVLLEIITNKPVIDHNRDMPHIAEWVKLMLTRGDISNIMDPKLQGVYDSGSAWKALELAMTCVNPSSLKRPNMSHVVHELKECLVSENNRTRDIDTSRSMDINLSFGTDVNPKAR

SEQ ID NO: 72518 - protein, 748 aa, Arabidopsis thaliana
  peptide (1)..(748): Ceres Seq. ID no. 4936445
  misc_feature: Pfam Name: Pkinase Pfam Description: Protein kinase domain
  misc_feature (1)..(372): Homolog of NCBI NO: 15225938 NR Description: putative receptor-like protein kinase; protein id:
  misc_feature (292)..(748): Homolog of NCBI NO: 15225938 NR Description: putative receptor-like protein kinase; protein id:
  misc_feature (1)..(375): Homolog of NCBI NO: 9294681 NR Description: receptor-like protein kinase [Arabidopsis
  misc_feature (306)..(748): Homolog of NCBI NO: 9294681 NR Description: receptor-like protein kinase [Arabidopsis
  misc_feature (1)..(372): Homolog of NCBI NO: 15238489 NR Description: serine/threonine-specific protein kinase - like;
  misc_feature (306)..(748): Homolog of NCBI NO: 15238489 NR Description: serine/threonine-specific protein kinase - like;
  misc_feature (1)..(375): Homolog of NCBI NO: 25387119 NR Description: probable protein kinase [imported] - Arabidopsis >gi|9802783|gb|AAF99852.1|AC015448_2 Putative protein kinase
  misc_feature (306)..(748): Homolog of NCBI NO: 25387119 NR Description: probable protein kinase [imported] - Arabidopsis >gi|9802783|gb|AAF99852.1|AC015448_2 Putative protein kinase
  misc_feature (1)..(748): Homolog of NCBI NO: 15225949 NR Description: putative receptor-like protein kinase; protein id:
  misc_feature (1)..(748): Homolog of NCBI NO: 25387103 NR Description: probable receptor protein kinase [imported] - thaliana >gi|12321669|gb|AAG50871.1|AC025294_9 receptor protein
MFTYGNYDNLNTHPKFDLYLGPNIWTTVDLQRNVNGTRAEIIHIPRSTSLQICLVKTGTTTPLISALELRPLRNNTYIPQSGSLKTLFRVHLTDSKETVRYPEDVHDRLWSPFFMPEWRLLRTSLTVNTSDDNGYDIPEDVVVTAATPANVSSPLTISWNLETPDDLVYAYLHVAEIQSLRENDTREFNISAGQDVNYGPVSPDEFLVGTLFNTSPVKCEGGTCHLQLIKTPKSTLPPLLNAIEAFITVEFPQSETNANDVLAIKSIETSYGLSRISWQGDPCVPQQLLWDGLTCEYTNMSTPPRIHSLDLSSSELTGIIVPEIQNLTELKKLDFSNNNLTGGVPEFLAKMKSLLVINLSGNNLSGSVPQALLNKVKNGSCNKKKNSIMLPVVASLASLAAIIAMIALLFVCIKRRSSSRKGPSPSQQSIETIKKRYTYAEVLAMTKKFERVLGKGGFGMVYHGYINGTEEVAVKLLSPSSAQGYKEFKTEVELLLRVYHTNLVSLVGYCDEKDHLALIYQYMVNGDLKKHFSGSSIISWVDRLNIAVDAASGLEYLHIGCKPLIVHRDVKSSNILLDDQLQAKLADFGLSRSFPIGDESHVSTLVAGTFGYLDHEYYQTNRLSEKSDVYSFGVVLLEIITNKPVIDHNRDMPHIAEWVKLMLTRGDISNIMDPKLQGVYDSGSAWKALELAMTCVNPSSLKRPNMSHVVHELKECLVSENNRTRDIDTSRSMDINLSFGTDVNPKAR

SEQ ID NO: 72519 - DNA, 1350 bp, Arabidopsis thaliana
  misc_feature (1)..(1350): Ceres Seq. ID no. 4936528
  misc_feature: MA Experiment ID: 20000315 Result: Up-regulated in Transcription
  misc_feature: MA Experiment 20000315 PARAMETER Experiment Name: At_14day_Shoots-Roots_Sub_P Parameter: Age (day) Value: 14
  misc_feature: MA Experiment 20000315 PARAMETER Experiment Name: At_14day_Shoots-Roots_Sub_P Parameter: Organism Value: A. thaliana
  misc_feature: MA Experiment 20000315 PARAMETER Experiment Name: At_14day_Shoots-Roots_Sub_P Parameter: Plant Line Value: WS
  misc_feature: MA Experiment 20000315 PARAMETER Experiment Name: At_14day_Shoots-Roots_Sub_P Parameter: Tissue Value: Shoots vs. Whole Plant
  misc_feature: MA Experiment ID: 20000328 Result: Up-regulated in Transcription
  misc_feature: MA Experiment 20000328 PARAMETER Experiment Name: At_42deg_Heat_Sub_P Parameter: Age (day) Value: 14
  misc_feature: MA Experiment 20000328 PARAMETER Experiment Name: At_42deg_Heat_Sub_P Parameter: Organism Value: A. thaliana
  misc_feature: MA Experiment 20000328 PARAMETER Experiment Name: At_42deg_Heat_Sub_P Parameter: Plant Line Value: WS
  misc_feature: MA Experiment 20000328 PARAMETER Experiment Name: At_42deg_Heat_Sub_P Parameter: Temperature (deg C) Value: 42 vs. 22
  misc_feature: MA Experiment 20000328 PARAMETER Experiment Name: At_42deg_Heat_Sub_P Parameter: Timepoint (hr) Value: 6
  misc_feature: MA Experiment 20000328 PARAMETER Experiment Name: At_42deg_Heat_Sub_P Parameter: Tissue Value: Aerial
atgggtaaagagaagtttcacatcaacattgtggtcattggccacgtcgattctggaaagtcgacaaccactggacacttgatctacaagttgggtggtattgacaagcgtgtgatcgagaggttcgagaaggaggctgctgagatgaacaagaggtccttcaagtacgcatgggtgttggacaaacttaaggctgagcgtgagcgtggtatcaccattgacattgctctctggaagttcgagaccaccaagtactactgcactgtcattgatgctcctggtcatcgtgatttcatcaagaacatgatcactggtacctcccaggctgattgtgctgtccttatcattgactccaccactggtggttttgaggctggtatctccaaggatggtcagacccgtgagcacgctctccttgctttcacccttggtgtcaagcagatgatctgctgttgtaacaagatggatgccactacccccaagtactccaaggccaggtacgatgaaatcatcaaggaggtgtcttcctacttgaagaaggttggttacaaccccgacaaaatcccatttgtgcccatctctggatttgagggtgacaacatgattgagaggtccaccaaccttgactggtacaagggaccaactctccttgaggctcttgaccagatcaacgagcccaagaggccgtcagacaagccccttcgtctcccacttcaggatgtctacaagattggtggtattggaacggtgccagtgggacgtgttgagactggtatgatcaagcctggtatggttgtgacctttgctcccacaggattgaccactgaggtcaagtctgttgagatgcaccacgagtctcttcttgaggcacttccaggtgacaacgttgggttcaatgttaagaatgttgccgtgaaggatcttaagagagggtacgtcgcctccaactccaaggatgaccctgccaagggtgctgctaacttcacctcccaggtcatcatcatgaaccaccctggtcagattggtaacggttacgccccagtcttggattgccacacctctcacattgcagtcaagttctctgagatcttgaccaagattgacaggcgttctggtaaggagattgagaaggagcccaaattcttgaagaatggtgatgctggtatggtgaagatgactccaaccaagcccatggttgtggagaccttctctgagtacccaccacttggacgtttcgctgttagggacatgaggcagactgttgcagtcggtgttatcaagagtgttgacaagaaggacccaaccggagccaaggttaccaaggctgcagttaagaagggtgcaaagtga

SEQ ID NO: 72520 - protein, 449 aa, Arabidopsis thaliana; identical to SEQ ID NO: 27284
  peptide (1)..(449): Ceres Seq. ID no. 4936529
  misc_feature (5)..(227): Pfam Name: Elongation factor Tu GTP binding domain Pfam Description: Elongation factor Tu GTP binding domain
  misc_feature (1)..(449): Homolog of NCBI NO: 15239308 NR Description: elongation factor 1-alpha (EF-1-alpha); protein At5g60390.1, supported by cDNA: gi_13430509, supported by cDNA: supported by cDNA: gi_16930464, supported by cDNA: supported by
  misc_feature (1)..(449): Homolog of NCBI NO: 25407012 NR Description: protein T6D22.2 [imported] - Arabidopsis thaliana
  misc_feature (1)..(449): Homolog of NCBI NO: 99688 NR Description: translation elongation factor eEF-1 alpha chain
  misc_feature (1)..(449): Homolog of NCBI NO: 13605682 NR Description: At1g07930/T6D22_3 [Arabidopsis thaliana]
  misc_feature (1)..(449): Homolog of NCBI NO: 13430510 NR Description: putative translation elongation factor eEF-1
  misc_feature (1)..(449): Homolog of NCBI NO: 23397097 NR Description: putative translation elongation factor eEF-1
  misc_feature (1)..(449): Homolog of NCBI NO: 18086389 NR Description: At1g07930/T6D22_3 [Arabidopsis thaliana]
  misc_feature (1)..(447): Homolog of NCBI NO: 25407012 NR Description: protein T6D22.2 [imported] - Arabidopsis thaliana
  misc_feature (1)..(449): Homolog of NCBI NO: 17064954 NR Description: putative elongation factor 1-a [Arabidopsis
  misc_feature (1)..(449): Homolog of NCBI NO: 15081765 NR Description: At1g07930/T6D22_3 [Arabidopsis thaliana]

SEQ ID NO: 72521 - protein, 401 aa, Arabidopsis thaliana; identical to SEQ ID NO: 21437
  peptide (1)..(401): Ceres Seq. ID no. 4936530
  misc_feature (1)..(179): Pfam Name: Elongation factor Tu GTP binding domain Pfam Description: Elongation factor Tu GTP binding domain
  misc_feature (1)..(401): Homolog of NCBI NO: 15239308 NR Description: elongation factor 1-alpha (EF-1-alpha); protein At5g60390.1, supported by cDNA: gi_13430509, supported by cDNA: supported by cDNA: gi_16930464, supported by cDNA: supported by
  misc_feature (1)..(401): Homolog of NCBI NO: 25407012 NR Description: protein T6D22.2 [imported] - Arabidopsis thaliana
  misc_feature (1)..(401): Homolog of NCBI NO: 99688 NR Description: translation elongation factor eEF-1 alpha chain
  misc_feature (1)..(401): Homolog of NCBI NO: 13605682 NR Description: At1g07930/T6D22_3 [Arabidopsis thaliana]
  misc_feature (1)..(401): Homolog of NCBI NO: 13430510 NR Description: putative translation elongation factor eEF-1
  misc_feature (1)..(401): Homolog of NCBI NO: 23397097 NR Description: putative translation elongation factor eEF-1
  misc_feature (1)..(401): Homolog of NCBI NO: 18086389 NR Description: At1g07930/T6D22_3 [Arabidopsis thaliana]
  misc_feature (1)..(399): Homolog of NCBI NO: 25407012 NR Description: protein T6D22.2 [imported] - Arabidopsis thaliana
  misc_feature (1)..(401): Homolog of NCBI NO: 17064954 NR Description: putative elongation factor 1-a [Arabidopsis
  misc_feature (1)..(401): Homolog of NCBI NO: 15081765 NR Description: At1g07930/T6D22_3 [Arabidopsis thaliana]

SEQ ID NO: 72522 - protein, 348 aa, Arabidopsis thaliana; identical to SEQ ID NO: 21438
  peptide (1)..(348): Ceres Seq. ID no. 4936531
  misc_feature (1)..(126): Pfam Name: Elongation factor Tu GTP binding domain Pfam Description: Elongation factor Tu GTP binding domain
  misc_feature (1)..(348): Homolog of NCBI NO: 15239308 NR Description: elongation factor 1-alpha (EF-1-alpha); protein At5g60390.1, supported by cDNA: gi_13430509, supported by cDNA: supported by cDNA: gi_16930464, supported by cDNA: supported by
  misc_feature (1)..(348): Homolog of NCBI NO: 25407012 NR Description: protein T6D22.2 [imported] - Arabidopsis thaliana
  misc_feature (1)..(348): Homolog of NCBI NO: 99688 NR Description: translation elongation factor eEF-1 alpha chain
  misc_feature (1)..(348): Homolog of NCBI NO: 13605682 NR Description: At1g07930/T6D22_3 [Arabidopsis thaliana]
  misc_feature (1)..(348): Homolog of NCBI NO: 13430510 NR Description: putative translation elongation factor eEF-1
  misc_feature (1)..(348): Homolog of NCBI NO: 23397097 NR Description: putative translation elongation factor eEF-1
  misc_feature (1)..(348): Homolog of NCBI NO: 18086389 NR Description: At1g07930/T6D22_3 [Arabidopsis thaliana]
  misc_feature (1)..(346): Homolog of NCBI NO: 25407012 NR Description: protein T6D22.2 [imported] - Arabidopsis thaliana
  misc_feature (1)..(348): Homolog of NCBI NO: 17064954 NR Description: putative elongation factor 1-a [Arabidopsis
  misc_feature (1)..(348): Homolog of NCBI NO: 15081765 NR Description: At1g07930/T6D22_3 [Arabidopsis thaliana]

SEQ ID NO: 72523 - DNA, 1215 bp, Arabidopsis thaliana
  misc_feature (1)..(1215): Ceres Seq. ID no. 4936568
  misc_feature: MA Experiment ID: 108435 Result: Up-regulated in Transcription
  misc_feature: MA Experiment 108435 PARAMETER Experiment Name: At_stm_Mutants_cDNA_P Parameter: Plant Line Value: wt Landsburg vs stm
  misc_feature: MA Experiment 108435 PARAMETER Experiment Name: At_stm_Mutants_cDNA_P Parameter: Tissue Value: Shoot Apical Meristem Region
  misc_feature: MA Experiment ID: 108462 Result: Up-regulated in Transcription
  misc_feature: MA Experiment 108462 PARAMETER Experiment Name: At_Germinating_Seeds_cDNA_P Parameter: Age (day) Value: 2 vs. 0
  misc_feature: MA Experiment 108462 PARAMETER Experiment Name: At_Germinating_Seeds_cDNA_P Parameter: Tissue Value: Germinating Seeds
  misc_feature: MA Experiment ID: 108464 Result: Up-regulated in Transcription
  misc_feature: MA Experiment 108464 PARAMETER Experiment Name: At_Germinating_Seeds_cDNA_P Parameter: Age (day) Value: 4 vs. 0
  misc_feature: MA Experiment 108464 PARAMETER Experiment Name: At_Germinating_Seeds_cDNA_P Parameter: Tissue Value: Germinating Seeds
  misc_feature: MA Experiment ID: 108573 Result: Up-regulated in Transcription
  misc_feature: MA Experiment 108573 PARAMETER Experiment Name: At_Drought_cDNA_P Parameter: Timepoint (hr) Value: 6
  misc_feature: MA Experiment 108573 PARAMETER Experiment Name: At_Drought_cDNA_P Parameter: Tissue Value: Aerial
  misc_feature: MA Experiment 108573 PARAMETER Experiment Name: At_Drought_cDNA_P Parameter: Treatment Value: Drought vs. No Drought
  misc_feature: MA Experiment ID: 108585 Result: Up-regulated in Transcription
  misc_feature: MA Experiment 108585 PARAMETER Experiment Name: At_5mM_NaNP_cDNA_P Parameter: Timepoint (hr) Value: 6
  misc_feature: MA Experiment 108585 PARAMETER Experiment Name: At_5mM_NaNP_cDNA_P Parameter: Tissue Value: Aerial
  misc_feature: MA Experiment 108585 PARAMETER Experiment Name: At_5mM_NaNP_cDNA_P Parameter: Treatment Value: null
  misc_feature: MA Experiment ID: 20000071 Result: Up-regulated in Transcription
  misc_feature: MA Experiment 20000071 PARAMETER Experiment Name: At_100uM_ABA_Mutants_cDNA_P Parameter: Plant Line Value: CS8104
  misc_feature: MA Experiment 20000071 PARAMETER Experiment Name: At_100uM_ABA_Mutants_cDNA_P Parameter: Timepoint (hr) Value: 6
  misc_feature: MA Experiment 20000071 PARAMETER Experiment Name: At_100uM_ABA_Mutants_cDNA_P Parameter: Tissue Value: Aerial
  misc_feature: MA Experiment 20000071 PARAMETER Experiment Name: At_100uM_ABA_Mutants_cDNA_P Parameter: Treatment Value: 100uM ABA vs. No Treatment
  misc_feature: MA Experiment ID: 20000072 Result: Up-regulated in Transcription
  misc_feature: MA Experiment 20000072 PARAMETER Experiment Name: At_100uM_ABA_Mutants_cDNA_P Parameter: Plant Line Value: CS8105
  misc_feature: MA Experiment 20000072 PARAMETER Experiment Name: At_100uM_ABA_Mutants_cDNA_P Parameter: Timepoint (hr) Value: 6
  misc_feature: MA Experiment 20000072 PARAMETER Experiment Name: At_100uM_ABA_Mutants_cDNA_P Parameter: Tissue Value: Aerial
  misc_feature: MA Experiment 20000072 PARAMETER Experiment Name: At_100uM_ABA_Mutants_cDNA_P Parameter: Treatment Value: 100uM ABA vs. No Treatment
  misc_feature: MA Experiment ID: 20000093 Result: Up-regulated in Transcription
  misc_feature: MA Experiment 20000093 PARAMETER Experiment Name: At_42deg_Heat_cDNA_P Parameter: Temperature (deg C) Value: 42 vs. 22
  misc_feature: MA Experiment 20000093 PARAMETER Experiment Name: At_42deg_Heat_cDNA_P Parameter: Timepoint (hr) Value: 0.5
  misc_feature: MA Experiment 20000093 PARAMETER Experiment Name: At_42deg_Heat_cDNA_P Parameter: Tissue Value: Aerial
  misc_feature: MA Experiment ID: 20000112 Result: Up-regulated in Transcription
  misc_feature: MA Experiment 20000112 PARAMETER Experiment Name: At_42deg_Heat_cDNA_P Parameter: Temperature (deg C) Value: 42 vs. 22
  misc_feature: MA Experiment 20000112 PARAMETER Experiment Name: At_42deg_Heat_cDNA_P Parameter: Timepoint (hr) Value: 2
  misc_feature: MA Experiment 20000112 PARAMETER Experiment Name: At_42deg_Heat_cDNA_P Parameter: Tissue Value: Aerial
  misc_feature: MA Experiment ID: 20000113 Result: Up-regulated in Transcription
  misc_feature: MA Experiment 20000113 PARAMETER Experiment Name: At_42deg_Heat_cDNA_P Parameter: Temperature (deg C) Value: 42 vs. 22
  misc_feature: MA Experiment 20000113 PARAMETER Experiment Name: At_42deg_Heat_cDNA_P Parameter: Timepoint (hr) Value: 8
  misc_feature: MA Experiment 20000113 PARAMETER Experiment Name: At_42deg_Heat_cDNA_P Parameter: Tissue Value: Aerial
  misc_feature: MA Experiment ID: 20000117 Result: Up-regulated in Transcription
  misc_feature: MA Experiment 20000117 PARAMETER Experiment Name: At_100uM_ABA_Mutants_cDNA_P Parameter: Plant Line Value: Columbia
  misc_feature: MA Experiment 20000117 PARAMETER Experiment Name: At_100uM_ABA_Mutants_cDNA_P Parameter: Timepoint (hr) Value: 6
  misc_feature: MA Experiment 20000117 PARAMETER Experiment Name: At_100uM_ABA_Mutants_cDNA_P Parameter: Tissue Value: Aerial
  misc_feature: MA Experiment 20000117 PARAMETER Experiment Name: At_100uM_ABA_Mutants_cDNA_P Parameter: Treatment Value: 100uM ABA vs. No Treatment
  misc_feature: MA Experiment ID: 20000144 Result: Up-regulated in Transcription
  misc_feature: MA Experiment 20000144 PARAMETER Experiment Name: At_42deg_Heat_cDNA_P Parameter: Temperature (deg C) Value: 42 vs. 22
  misc_feature: MA Experiment 20000144 PARAMETER Experiment Name: At_42deg_Heat_cDNA_P Parameter: Timepoint (hr) Value: 1
  misc_feature: MA Experiment 20000144 PARAMETER Experiment Name: At_42deg_Heat_cDNA_P Parameter: Tissue Value: Aerial
  misc_feature: MA Experiment ID: 20000169 Result: Up-regulated in Transcription
  misc_feature: MA Experiment 20000169 PARAMETER Experiment Name: At_100uM_ABA_P Parameter: Age (day) Value: 14
  misc_feature: MA Experiment 20000169 PARAMETER Experiment Name: At_100uM_ABA_P Parameter: Organism Value: A. thaliana
  misc_feature: MA Experiment 20000169 PARAMETER Experiment Name: At_100uM_ABA_P Parameter: Plant Line Value: WS
  misc_feature: MA Experiment 20000169 PARAMETER Experiment Name: At_100uM_ABA_P Parameter: Timepoint (hr) Value: 6
  misc_feature: MA Experiment 20000169 PARAMETER Experiment Name: At_100uM_ABA_P Parameter: Tissue Value: Aerial
  misc_feature: MA Experiment 20000169 PARAMETER Experiment Name: At_100uM_ABA_P Parameter: Treatment Value: 100uM ABA vs. No Treatment
  misc_feature: MA Experiment ID: 20000171 Result: Up-regulated in Transcription
  misc_feature: MA Experiment 20000171 PARAMETER Experiment Name: At_42deg_Heat_P Parameter: Age (day) Value: 14
  misc_feature: MA Experiment 20000171 PARAMETER Experiment Name: At_42deg_Heat_P Parameter: Organism Value: A. thaliana
  misc_feature: MA Experiment 20000171 PARAMETER Experiment Name: At_42deg_Heat_P Parameter: Plant Line Value: WS
  misc_feature: MA Experiment 20000171 PARAMETER Experiment Name: At_42deg_Heat_P Parameter: Temperature (deg C) Value: 42 vs. 22
  misc_feature: MA Experiment 20000171 PARAMETER Experiment Name: At_42deg_Heat_P Parameter: Timepoint (hr) Value: 1
  misc_feature: MA Experiment 20000171 PARAMETER Experiment Name: At_42deg_Heat_P Parameter: Tissue Value: Aerial
  misc_feature: MA Experiment ID: 20000179 Result: Up-regulated in Transcription
  misc_feature: MA Experiment 20000179 PARAMETER Experiment Name: At_Germinating_Seeds_P Parameter: Age (hr) Value: 6 vs. 0
  misc_feature: MA Experiment 20000179 PARAMETER Experiment Name: At_Germinating_Seeds_P Parameter: Tissue Value: Germinating Seeds
  misc_feature: MA Experiment ID: 20000180 Result: Up-regulated in Transcription
  misc_feature: MA Experiment 20000180 PARAMETER Experiment Name: At_Germinating_Seeds_P Parameter: Age (hr) Value: 24 vs. 0
  misc_feature: MA Experiment 20000180 PARAMETER Experiment Name: At_Germinating_Seeds_P Parameter: Tissue Value: Germinating Seeds
  misc_feature: MA Experiment ID: 20000460 Result: Down-regulated in Transcription
  misc_feature: MA Experiment 20000460 PARAMETER Experiment Name: At_10percent_PEG_P Parameter: Age (day) Value: 12
  misc_feature: MA Experiment 20000460 PARAMETER Experiment Name: At_10percent_PEG_P Parameter: Organism Value: A. thaliana
  misc_feature: MA Experiment 20000460 PARAMETER Experiment Name: At_10percent_PEG_P Parameter: Plant Line Value: WS
  misc_feature: MA Experiment 20000460 PARAMETER Experiment Name: At_10percent_PEG_P Parameter: Timepoint (day) Value: 12
  misc_feature: MA Experiment 20000460 PARAMETER Experiment Name: At_10percent_PEG_P Parameter: Tissue Value: Whole Plant
  misc_feature: MA Experiment 20000460 PARAMETER Experiment Name: At_10percent_PEG_P Parameter: Treatment Value: 10percent PEG vs. No Treatment
  misc_feature: MA Experiment ID: 20000527 Result: Down-regulated in Transcription
  misc_feature: MA Experiment 20000527 PARAMETER Experiment Name: At_10percent_PEG_P Parameter: Age (day) Value: 20
  misc_feature: MA Experiment 20000527 PARAMETER Experiment Name: At_10percent_PEG_P Parameter: Organism Value: A. thaliana
  misc_feature: MA Experiment 20000527 PARAMETER Experiment Name: At_10percent_PEG_P Parameter: Plant Line Value: WS
  misc_feature: MA Experiment 20000527 PARAMETER Experiment Name: At_10percent_PEG_P Parameter: Timepoint (day) Value: 20
  misc_feature: MA Experiment 20000527 PARAMETER Experiment Name: At_10percent_PEG_P Parameter: Tissue Value: Whole Plant
  misc_feature: MA Experiment 20000527 PARAMETER Experiment Name: At_10percent_PEG_P Parameter: Treatment Value: 10percent PEG vs. No Treatment
  misc_feature: MA Experiment ID: 20000573 Result: Down-regulated in Transcription
  misc_feature: MA Experiment 20000573 PARAMETER Experiment Name: At_100uM_ABA_Mutants__P Parameter: Organism Value: A. thaliana
  misc_feature: MA Experiment 20000573 PARAMETER Experiment Name: At_100uM_ABA_Mutants__P Parameter: Plant Line Value: CS22 vs. Ler wt
  misc_feature: MA Experiment 20000573 PARAMETER Experiment Name: At_100uM_ABA_Mutants__P Parameter: Timepoint (hr) Value: N/A
  misc_feature: MA Experiment 20000573 PARAMETER Experiment Name: At_100uM_ABA_Mutants__P Parameter: Tissue Value: Whole Plant
  misc_feature: MA Experiment 20000573 PARAMETER Experiment Name: At_100uM_ABA_Mutants__P Parameter: Treatment Value: None
  misc_feature: MA Experiment ID: 20000574 Result: Down-regulated in Transcription
  misc_feature: MA Experiment 20000574 PARAMETER Experiment Name: At_100uM_ABA_Mutants__P Parameter: Organism Value: A. thaliana
  misc_feature: MA Experiment 20000574 PARAMETER Experiment Name: At_100uM_ABA_Mutants__P Parameter: Plant Line Value: CS23 vs. Ler wt
  misc_feature: MA Experiment 20000574 PARAMETER Experiment Name: At_100uM_ABA_Mutants__P Parameter: Timepoint (hr) Value: N/A
  misc_feature: MA Experiment 20000574 PARAMETER Experiment Name: At_100uM_ABA_Mutants__P Parameter: Tissue Value: Whole Plant
  misc_feature: MA Experiment 20000574 PARAMETER Experiment Name: At_100uM_ABA_Mutants__P Parameter: Treatment Value: None
  misc_feature: MA Experiment ID: 20001248 Result: Down-regulated in Transcription
  misc_feature: MA Experiment 20001248 PARAMETER Experiment Name: At_Far-red-induction_P Parameter: Age (day) Value: 7
  misc_feature: MA Experiment 20001248 PARAMETER Experiment Name: At_Far-red-induction_P Parameter: Light Value: Far-red vs. White
  misc_feature: MA Experiment 20001248 PARAMETER Experiment Name: At_Far-red-induction_P Parameter: Organism Value: A. thaliana
  misc_feature: MA Experiment 20001248 PARAMETER Experiment Name: At_Far-red-induction_P Parameter: Plant Line Value: Columbia
  misc_feature: MA Experiment 20001248 PARAMETER Experiment Name: At_Far-red-induction_P Parameter: Timepoint (hr) Value: 4
  misc_feature: MA Experiment 20001248 PARAMETER Experiment Name: At_Far-red-induction_P Parameter: Tissue Value: Whole Plant
  misc_feature: MA Experiment ID: 20001450 Result: Down-regulated in Transcription
  misc_feature: MA Experiment 20001450 PARAMETER Experiment Name: At_Far-red-induction_P Parameter: Age (day) Value: 7
  misc_feature: MA Experiment 20001450 PARAMETER Experiment Name: At_Far-red-induction_P Parameter: Light Value: Far-red vs. White
  misc_feature: MA Experiment 20001450 PARAMETER Experiment Name: At_Far-red-induction_P Parameter: Organism Value: A. thaliana
  misc_feature: MA Experiment 20001450 PARAMETER Experiment Name: At_Far-red-induction_P Parameter: Plant Line Value: Columbia
  misc_feature: MA Experiment 20001450 PARAMETER Experiment Name: At_Far-red-induction_P Parameter: Timepoint (hr) Value: 8
  misc_feature: MA Experiment 20001450 PARAMETER Experiment Name: At_Far-red-induction_P Parameter: Tissue Value: Whole Plant
  misc_feature: MA Experiment ID: 20001560 Result: Up-regulated in Transcription
  misc_feature: MA Experiment 20001560 PARAMETER Experiment Name: At_Drought_Soil_Dry_P Parameter: Age (day) Value: 28
  misc_feature: MA Experiment 20001560 PARAMETER Experiment Name: At_Drought_Soil_Dry_P Parameter: Organism Value: A. thaliana
  misc_feature: MA Experiment 20001560 PARAMETER Experiment Name: At_Drought_Soil_Dry_P Parameter: Plant Line Value: WS
  misc_feature: MA Experiment 20001560 PARAMETER Experiment Name: At_Drought_Soil_Dry_P Parameter: Post Timepoint (hr) Value: None
  misc_feature: MA Experiment 20001560 PARAMETER Experiment Name: At_Drought_Soil_Dry_P Parameter: Post-Treatment Value: None
  misc_feature: MA Experiment 20001560 PARAMETER Experiment Name: At_Drought_Soil_Dry_P Parameter: Timepoint (day) Value: 14
  misc_feature: MA Experiment 20001560 PARAMETER Experiment Name: At_Drought_Soil_Dry_P Parameter: Treatment Value: Drought vs. No Drought
ataaaaagtagtactcgtgtcttactcgtgccagccactcgcatttctccagattttattatccttcctcgaaacaagtagatccacgattcgttgctgcgatcggcgttattatcgtcagctctctcgtttctgttctgtggttcgatattgctgagtttctaggctaatcttacgaatctgtgaaagtttttgagagatttggcttctgtagctcactcctgcttgatttagagcttagctaagatgacgaagaactacccaaccgtgagcgaagattacaagaaggctgttgagaagtgcaggaggaagctcagaggtttgatcgctgagaagaactgtgcacccatcatggtccgactcgcatggcactctgctggaactttcgattgtcaatcaaggactggaggtccattcggaacaatgaggtttgacgctgagcaagctcatggagccaacagtggtatccacattgctcttaggttgttggaccccatcagggagcaattccctaccatctcttttgctgatttccatcagcttgctggtgttgtggccgttgaagttactggtggccctgacattcctttccaccctggaagagaggacaagccccaaccacctccagagggtcgtcttcctgatgctaccaagggttgtgaccatttgagagatgtctttgctaagcagatgggcttatctgacaaagacattgtcgctttatctggtgcccacactctgggacgatgccacaaggataggtctggcttcgaaggtgcatggacatcaaaccctctaatcttcgacaactcttacttcaaggaactcttgagcggagagaaggaaggccttcttcagcttgtctctgacaaagcactattggacgaccctgttttccgtcctttggtcgagaaatacgctgctgatgaagatgcctttttcgctgattacgctgaggcccacatgaagctttctgagcttgggtttgctgatgcttaagctgtgacgtatgctctgtgtgtgtgtgtgtgtctccccgagagtcatggctgtttttggttgggggctggaggggtcgcattgcatttgaactttgtcatatgattgcttaatgtactctcggatttacgtatctgtttttttcggtgggttgcgatttgaacacatccgttgcgcttttgctgcttagacacattaataaaattaatttctctc

SEQ ID NO: 72524 - protein, 250 aa, Arabidopsis thaliana; identical to SEQ ID NO: 22608
  peptide (1)..(250): Ceres Seq. ID no. 4936569
  misc_feature (19)..(227): Pfam Name: Peroxidase Pfam Description: Peroxidase
  misc_feature (1)..(250): Homolog of NCBI NO: 99735 NR Description: L-ascorbate peroxidase (EC 1.11.1.11) precursor -
  misc_feature (1)..(250): Homolog of NCBI NO: 15223049 NR Description: ascorbate peroxidase, putative (APX); protein id:
  misc_feature (1)..(250): Homolog of NCBI NO: 24421233 NR Description: ascorbate peroxidase [Brassica juncea]
  misc_feature (1)..(250): Homolog of NCBI NO: 24421231 NR Description: ascorbate peroxidase [Brassica juncea]
  misc_feature (1)..(250): Homolog of NCBI NO: 18265381 NR Description: ascorbate peroxidase [Brassica oleracea]
  misc_feature (1)..(250): Homolog of NCBI NO: 18265379 NR Description: ascorbate peroxidase [Brassica oleracea]
  misc_feature (1)..(250): Homolog of NCBI NO: 541927 NR Description: L-ascorbate peroxidase (EC 1.11.1.11) - radish
  misc_feature (1)..(250): Homolog of NCBI NO: 1890354 NR Description: L-ascorbate peroxidase [Brassica napus]
  misc_feature (1)..(250): Homolog of NCBI NO: 7488439 NR Description: L-ascorbate peroxidase (EC 1.11.1.11) - leaf
  misc_feature (1)..(250): Homolog of NCBI NO: 24636598 NR Description: ascorbate peroxidase [Solanum tuberosum]

SEQ ID NO: 72525 - protein, 215 aa, Arabidopsis thaliana; identical to SEQ ID NO: 22609
  peptide (1)..(215): Ceres Seq. ID no. 4936570
  misc_feature (1)..(192): Pfam Name: Peroxidase Pfam Description: Peroxidase
  misc_feature (1)..(215): Homolog of NCBI NO: 99735 NR Description: L-ascorbate peroxidase (EC 1.11.1.11) precursor -
  misc_feature (1)..(215): Homolog of NCBI NO: 15223049 NR Description: ascorbate peroxidase, putative (APX); protein id:
  misc_feature (1)..(215): Homolog of NCBI NO: 24421233 NR Description: ascorbate peroxidase [Brassica juncea]
  misc_feature (1)..(215): Homolog of NCBI NO: 24421231 NR Description: ascorbate peroxidase [Brassica juncea]
  misc_feature (1)..(215): Homolog of NCBI NO: 18265381 NR Description: ascorbate peroxidase [Brassica oleracea]
  misc_feature (1)..(215): Homolog of NCBI NO: 18265379 NR Description: ascorbate peroxidase [Brassica oleracea]
  misc_feature (1)..(215): Homolog of NCBI NO: 541927 NR Description: L-ascorbate peroxidase (EC 1.11.1.11) - radish
  misc_feature (1)..(215): Homolog of NCBI NO: 1890354 NR Description: L-ascorbate peroxidase [Brassica napus]
  misc_feature (1)..(215): Homolog of NCBI NO: 7488439 NR Description: L-ascorbate peroxidase (EC 1.11.1.11) - leaf
  misc_feature (1)..(215): Homolog of NCBI NO: 24636598 NR Description: ascorbate peroxidase [Solanum tuberosum]

SEQ ID NO: 72526 - protein, 191 aa, Arabidopsis thaliana; identical to SEQ ID NO: 22610
  peptide (1)..(191): Ceres Seq. ID no. 4936571
  misc_feature (1)..(168): Pfam Name: Peroxidase Pfam Description: Peroxidase
  misc_feature (1)..(191): Homolog of NCBI NO: 99735 NR Description: L-ascorbate peroxidase (EC 1.11.1.11) precursor -
  misc_feature (1)..(191): Homolog of NCBI NO: 15223049 NR Description: ascorbate peroxidase, putative (APX); protein id:
  misc_feature (1)..(191): Homolog of NCBI NO: 24421233 NR Description: ascorbate peroxidase [Brassica juncea]
  misc_feature (1)..(191): Homolog of NCBI NO: 24421231 NR Description: ascorbate peroxidase [Brassica juncea]
  misc_feature (1)..(191): Homolog of NCBI NO: 18265381 NR Description: ascorbate peroxidase [Brassica oleracea]
  misc_feature (1)..(191): Homolog of NCBI NO: 18265379 NR Description: ascorbate peroxidase [Brassica oleracea]
  misc_feature (1)..(191): Homolog of NCBI NO: 541927 NR Description: L-ascorbate peroxidase (EC 1.11.1.11) - radish
  misc_feature (1)..(191): Homolog of NCBI NO: 1890354 NR Description: L-ascorbate peroxidase [Brassica napus]
  misc_feature (1)..(191): Homolog of NCBI NO: 7488439 NR Description: L-ascorbate peroxidase (EC 1.11.1.11) - leaf
  misc_feature (1)..(191): Homolog of NCBI NO: 24636598 NR Description: ascorbate peroxidase [Solanum tuberosum]

SEQ ID NO: 72527 - DNA, 1124 bp, Arabidopsis thaliana
  misc_feature (1)..(1124): Ceres Seq. ID no. 4936572
  misc_feature: MA Experiment ID: 108435 Result: Up-regulated in Transcription
  misc_feature: MA Experiment 108435 PARAMETER Experiment Name: At_stm_Mutants_cDNA_P Parameter: Plant Line Value: wt Landsburg vs stm
  misc_feature: MA Experiment 108435 PARAMETER Experiment Name: At_stm_Mutants_cDNA_P Parameter: Tissue Value: Shoot Apical Meristem Region
  misc_feature: MA Experiment ID: 108462 Result: Up-regulated in Transcription
  misc_feature: MA Experiment 108462 PARAMETER Experiment Name: At_Germinating_Seeds_cDNA_P Parameter: Age (day) Value: 2 vs. 0
  misc_feature: MA Experiment 108462 PARAMETER Experiment Name: At_Germinating_Seeds_cDNA_P Parameter: Tissue Value: Germinating Seeds
  misc_feature: MA Experiment ID: 108463 Result: Up-regulated in Transcription
  misc_feature: MA Experiment 108463 PARAMETER Experiment Name: At_Germinating_Seeds_cDNA_P Parameter: Age (day) Value: 3 vs. 0
  misc_feature: MA Experiment 108463 PARAMETER Experiment Name: At_Germinating_Seeds_cDNA_P Parameter: Tissue Value: Germinating Seeds
  misc_feature: MA Experiment ID: 108464 Result: Up-regulated in Transcription
  misc_feature: MA Experiment 108464 PARAMETER Experiment Name: At_Germinating_Seeds_cDNA_P Parameter: Age (day) Value: 4 vs. 0
  misc_feature: MA Experiment 108464 PARAMETER Experiment Name: At_Germinating_Seeds_cDNA_P Parameter: Tissue Value: Germinating Seeds
  misc_feature: MA Experiment ID: 108569 Result: Up-regulated in Transcription
  misc_feature: MA Experiment 108569 PARAMETER Experiment Name: At_0.001%_MeJA__cDNA_P Parameter: Timepoint (hr) Value: 6
  misc_feature: MA Experiment 108569 PARAMETER Experiment Name: At_0.001%_MeJA__cDNA_P Parameter: Tissue Value: Aerial
  misc_feature: MA Experiment 108569 PARAMETER Experiment Name: At_0.001%_MeJA__cDNA_P Parameter: Treatment Value: 0.001% MeJA vs. No Treatment
  misc_feature: MA Experiment ID: 108573 Result: Up-regulated in Transcription
  misc_feature: MA Experiment 108573 PARAMETER Experiment Name: At_Drought_cDNA_P Parameter: Timepoint (hr) Value: 6
  misc_feature: MA Experiment 108573 PARAMETER Experiment Name: At_Drought_cDNA_P Parameter: Tissue Value: Aerial
  misc_feature: MA Experiment 108573 PARAMETER Experiment Name: At_Drought_cDNA_P Parameter: Treatment Value: Drought vs. No Drought
  misc_feature: MA Experiment ID: 108579 Result: Up-regulated in Transcription
  misc_feature: MA Experiment 108579 PARAMETER Experiment Name: At_4deg_Cold_cDNA_P Parameter: Temperature (deg C) Value: 4 vs. 22
  misc_feature: MA Experiment 108579 PARAMETER Experiment Name: At_4deg_Cold_cDNA_P Parameter: Timepoint (hr) Value: 6
  misc_feature: MA Experiment 108579 PARAMETER Experiment Name: At_4deg_Cold_cDNA_P Parameter: Tissue Value: Aerial
  misc_feature: MA Experiment ID: 108585 Result: Up-regulated in Transcription
  misc_feature: MA Experiment 108585 PARAMETER Experiment Name: At_5mM_NaNP_cDNA_P Parameter: Timepoint (hr) Value: 6
  misc_feature: MA Experiment 108585 PARAMETER Experiment Name: At_5mM_NaNP_cDNA_P Parameter: Tissue Value: Aerial
  misc_feature: MA Experiment 108585 PARAMETER Experiment Name: At_5mM_NaNP_cDNA_P Parameter: Treatment Value: null
  misc_feature: MA Experiment ID: 108607 Result: Up-regulated in Transcription
  misc_feature: MA Experiment 108607 PARAMETER Experiment Name: At_100uM_ABA_cDNA_P Parameter: Timepoint (hr) Value: 4
  misc_feature: MA Experiment 108607 PARAMETER Experiment Name: At_100uM_ABA_cDNA_P Parameter: Tissue Value: Aerial
  misc_feature: MA Experiment 108607 PARAMETER Experiment Name: At_100uM_ABA_cDNA_P Parameter: Treatment Value: 100uM ABA vs. No Treatment
  misc_feature: MA Experiment ID: 20000087 Result: Up-regulated in Transcription
  misc_feature: MA Experiment 20000087 PARAMETER Experiment Name: At_100uM_ABA_Mutants_cDNA_P Parameter: Plant Line Value: WS
  misc_feature: MA Experiment 20000087 PARAMETER Experiment Name: At_100uM_ABA_Mutants_cDNA_P Parameter: Timepoint (hr) Value: 6
  misc_feature: MA Experiment 20000087 PARAMETER Experiment Name: At_100uM_ABA_Mutants_cDNA_P Parameter: Tissue Value: Aerial
  misc_feature: MA Experiment 20000087 PARAMETER Experiment Name: At_100uM_ABA_Mutants_cDNA_P Parameter: Treatment Value: 100uM ABA vs. No Treatment
  misc_feature: MA Experiment ID: 20000093 Result: Up-regulated in Transcription
  misc_feature: MA Experiment 20000093 PARAMETER Experiment Name: At_42deg_Heat_cDNA_P Parameter: Temperature (deg C) Value: 42 vs. 22
  misc_feature: MA Experiment 20000093 PARAMETER Experiment Name: At_42deg_Heat_cDNA_P Parameter: Timepoint (hr) Value: 0.5
  misc_feature: MA Experiment 20000093 PARAMETER Experiment Name: At_42deg_Heat_cDNA_P Parameter: Tissue Value: Aerial
  misc_feature: MA Experiment ID: 20000112 Result: Up-regulated in Transcription
  misc_feature: MA Experiment 20000112 PARAMETER Experiment Name: At_42deg_Heat_cDNA_P Parameter: Temperature (deg C) Value: 42 vs. 22
  misc_feature: MA Experiment 20000112 PARAMETER Experiment Name: At_42deg_Heat_cDNA_P Parameter: Timepoint (hr) Value: 2
  misc_feature: MA Experiment 20000112 PARAMETER Experiment Name: At_42deg_Heat_cDNA_P Parameter: Tissue Value: Aerial
  misc_feature: MA Experiment ID: 20000113 Result: Up-regulated in Transcription
  misc_feature: MA Experiment 20000113 PARAMETER Experiment Name: At_42deg_Heat_cDNA_P Parameter: Temperature (deg C) Value: 42 vs. 22
  misc_feature: MA Experiment 20000113 PARAMETER Experiment Name: At_42deg_Heat_cDNA_P Parameter: Timepoint (hr) Value: 8
  misc_feature: MA Experiment 20000113 PARAMETER Experiment Name: At_42deg_Heat_cDNA_P Parameter: Tissue Value: Aerial
  misc_feature: MA Experiment ID: 20000117 Result: Up-regulated in Transcription
  misc_feature: MA Experiment 20000117 PARAMETER Experiment Name: At_100uM_ABA_Mutants_cDNA_P Parameter: Plant Line Value: Columbia
  misc_feature: MA Experiment 20000117 PARAMETER Experiment Name: At_100uM_ABA_Mutants_cDNA_P Parameter: Timepoint (hr) Value: 6
  misc_feature: MA Experiment 20000117 PARAMETER Experiment Name: At_100uM_ABA_Mutants_cDNA_P Parameter: Tissue Value: Aerial
  misc_feature: MA Experiment 20000117 PARAMETER Experiment Name: At_100uM_ABA_Mutants_cDNA_P Parameter: Treatment Value: 100uM ABA vs. No Treatment
  misc_feature: MA Experiment ID: 20000144 Result: Up-regulated in Transcription
  misc_feature: MA Experiment 20000144 PARAMETER Experiment Name: At_42deg_Heat_cDNA_P Parameter: Temperature (deg C) Value: 42 vs. 22
  misc_feature: MA Experiment 20000144 PARAMETER Experiment Name: At_42deg_Heat_cDNA_P Parameter: Timepoint (hr) Value: 1
  misc_feature: MA Experiment 20000144 PARAMETER Experiment Name: At_42deg_Heat_cDNA_P Parameter: Tissue Value: Aerial
  misc_feature: MA Experiment ID: 20000169 Result: Up-regulated in Transcription
  misc_feature: MA Experiment 20000169 PARAMETER Experiment Name: At_100uM_ABA_P Parameter: Age (day) Value: 14
  misc_feature: MA Experiment 20000169 PARAMETER Experiment Name: At_100uM_ABA_P Parameter: Organism Value: A. thaliana
  misc_feature: MA Experiment 20000169 PARAMETER Experiment Name: At_100uM_ABA_P Parameter: Plant Line Value: WS
  misc_feature: MA Experiment 20000169 PARAMETER Experiment Name: At_100uM_ABA_P Parameter: Timepoint (hr) Value: 6
  misc_feature: MA Experiment 20000169 PARAMETER Experiment Name: At_100uM_ABA_P Parameter: Tissue Value: Aerial
  misc_feature: MA Experiment 20000169 PARAMETER Experiment Name: At_100uM_ABA_P Parameter: Treatment Value: 100uM ABA vs. No Treatment
  misc_feature: MA Experiment ID: 20000171 Result: Up-regulated in Transcription
  misc_feature: MA Experiment 20000171 PARAMETER Experiment Name: At_42deg_Heat_P Parameter: Age (day) Value: 14
  misc_feature: MA Experiment 20000171 PARAMETER Experiment Name: At_42deg_Heat_P Parameter: Organism Value: A. thaliana
  misc_feature: MA Experiment 20000171 PARAMETER Experiment Name: At_42deg_Heat_P Parameter: Plant Line Value: WS
  misc_feature: MA Experiment 20000171 PARAMETER Experiment Name: At_42deg_Heat_P Parameter: Temperature (deg C) Value: 42 vs. 22
  misc_feature: MA Experiment 20000171 PARAMETER Experiment Name: At_42deg_Heat_P Parameter: Timepoint (hr) Value: 1
  misc_feature: MA Experiment 20000171 PARAMETER Experiment Name: At_42deg_Heat_P Parameter: Tissue Value: Aerial
  misc_feature: MA Experiment ID: 20000179 Result: Up-regulated in Transcription
  misc_feature: MA Experiment 20000179 PARAMETER Experiment Name: At_Germinating_Seeds_P Parameter: Age (hr) Value: 6 vs. 0
  misc_feature: MA Experiment 20000179 PARAMETER Experiment Name: At_Germinating_Seeds_P Parameter: Tissue Value: Germinating Seeds
  misc_feature: MA Experiment ID: 20000180 Result: Up-regulated in Transcription
  misc_feature: MA Experiment 20000180 PARAMETER Experiment Name: At_Germinating_Seeds_P Parameter: Age (hr) Value: 24 vs. 0
  misc_feature: MA Experiment 20000180 PARAMETER Experiment Name: At_Germinating_Seeds_P Parameter: Tissue Value: Germinating Seeds
  misc_feature: MA Experiment ID: 20000460 Result: Down-regulated in Transcription
  misc_feature: MA Experiment 20000460 PARAMETER Experiment Name: At_10percent_PEG_P Parameter: Age (day) Value: 12
  misc_feature: MA Experiment 20000460 PARAMETER Experiment Name: At_10percent_PEG_P Parameter: Organism Value: A. thaliana
  misc_feature: MA Experiment 20000460 PARAMETER Experiment Name: At_10percent_PEG_P Parameter: Plant Line Value: WS
  misc_feature: MA Experiment 20000460 PARAMETER Experiment Name: At_10percent_PEG_P Parameter: Timepoint (day) Value: 12
  misc_feature: MA Experiment 20000460 PARAMETER Experiment Name: At_10percent_PEG_P Parameter: Tissue Value: Whole Plant
  misc_feature: MA Experiment 20000460 PARAMETER Experiment Name: At_10percent_PEG_P Parameter: Treatment Value: 10percent PEG vs. No Treatment
  misc_feature: MA Experiment ID: 20000527 Result: Down-regulated in Transcription
  misc_feature: MA Experiment 20000527 PARAMETER Experiment Name: At_10percent_PEG_P Parameter: Age (day) Value: 20
  misc_feature: MA Experiment 20000527 PARAMETER Experiment Name: At_10percent_PEG_P Parameter: Organism Value: A. thaliana
  misc_feature: MA Experiment 20000527 PARAMETER Experiment Name: At_10percent_PEG_P Parameter: Plant Line Value: WS
  misc_feature: MA Experiment 20000527 PARAMETER Experiment Name: At_10percent_PEG_P Parameter: Timepoint (day) Value: 20
  misc_feature: MA Experiment 20000527 PARAMETER Experiment Name: At_10percent_PEG_P Parameter: Tissue Value: Whole Plant
  misc_feature: MA Experiment 20000527 PARAMETER Experiment Name: At_10percent_PEG_P Parameter: Treatment Value: 10percent PEG vs. No Treatment
  misc_feature: MA Experiment ID: 20000573 Result: Down-regulated in Transcription
  misc_feature: MA Experiment 20000573 PARAMETER Experiment Name: At_100uM_ABA_Mutants__P Parameter: Organism Value: A. thaliana
  misc_feature: MA Experiment 20000573 PARAMETER Experiment Name: At_100uM_ABA_Mutants__P Parameter: Plant Line Value: CS22 vs. Ler wt
  misc_feature: MA Experiment 20000573 PARAMETER Experiment Name: At_100uM_ABA_Mutants__P Parameter: Timepoint (hr) Value: N/A
  misc_feature: MA Experiment 20000573 PARAMETER Experiment Name: At_100uM_ABA_Mutants__P Parameter: Tissue Value: Whole Plant
  misc_feature: MA Experiment 20000573 PARAMETER Experiment Name: At_100uM_ABA_Mutants__P Parameter: Treatment Value: None
  misc_feature: MA Experiment ID: 20000574 Result: Down-regulated in Transcription
  misc_feature: MA Experiment 20000574 PARAMETER Experiment Name: At_100uM_ABA_Mutants__P Parameter: Organism Value: A. thaliana
  misc_feature: MA Experiment 20000574 PARAMETER Experiment Name: At_100uM_ABA_Mutants__P Parameter: Plant Line Value: CS23 vs. Ler wt
  misc_feature: MA Experiment 20000574 PARAMETER Experiment Name: At_100uM_ABA_Mutants__P Parameter: Timepoint (hr) Value: N/A
  misc_feature: MA Experiment 20000574 PARAMETER Experiment Name: At_100uM_ABA_Mutants__P Parameter: Tissue Value: Whole Plant
  misc_feature: MA Experiment 20000574 PARAMETER Experiment Name: At_100uM_ABA_Mutants__P Parameter: Treatment Value: None
  misc_feature: MA Experiment ID: 20001248 Result: Down-regulated in Transcription
  misc_feature: MA Experiment 20001248 PARAMETER Experiment Name: At_Far-red-induction_P Parameter: Age (day) Value: 7
  misc_feature: MA Experiment 20001248 PARAMETER Experiment Name: At_Far-red-induction_P Parameter: Light Value: Far-red vs. White
  misc_feature: MA Experiment 20001248 PARAMETER Experiment Name: At_Far-red-induction_P Parameter: Organism Value: A. thaliana
  misc_feature: MA Experiment 20001248 PARAMETER Experiment Name: At_Far-red-induction_P Parameter: Plant Line Value: Columbia
  misc_feature: MA Experiment 20001248 PARAMETER Experiment Name: At_Far-red-induction_P Parameter: Timepoint (hr) Value: 4
  misc_feature: MA Experiment 20001248 PARAMETER Experiment Name: At_Far-red-induction_P Parameter: Tissue Value: Whole Plant
  misc_feature: MA Experiment ID: 20001450 Result: Down-regulated in Transcription
  misc_feature: MA Experiment 20001450 PARAMETER Experiment Name: At_Far-red-induction_P Parameter: Age (day) Value: 7
  misc_feature: MA Experiment 20001450 PARAMETER Experiment Name: At_Far-red-induction_P Parameter: Light Value: Far-red vs. White
  misc_feature: MA Experiment 20001450 PARAMETER Experiment Name: At_Far-red-induction_P Parameter: Organism Value: A. thaliana
  misc_feature: MA Experiment 20001450 PARAMETER Experiment Name: At_Far-red-induction_P Parameter: Plant Line Value: Columbia
  misc_feature: MA Experiment 20001450 PARAMETER Experiment Name: At_Far-red-induction_P Parameter: Timepoint (hr) Value: 8
  misc_feature: MA Experiment 20001450 PARAMETER Experiment Name: At_Far-red-induction_P Parameter: Tissue Value: Whole Plant
  misc_feature: MA Experiment ID: 20001560 Result: Up-regulated in Transcription
  misc_feature: MA Experiment 20001560 PARAMETER Experiment Name: At_Drought_Soil_Dry_P Parameter: Age (day) Value: 28
  misc_feature: MA Experiment 20001560 PARAMETER Experiment Name: At_Drought_Soil_Dry_P Parameter: Organism Value: A. thaliana
  misc_feature: MA Experiment 20001560 PARAMETER Experiment Name: At_Drought_Soil_Dry_P Parameter: Plant Line Value: WS
  misc_feature: MA Experiment 20001560 PARAMETER Experiment Name: At_Drought_Soil_Dry_P Parameter: Post Timepoint (hr) Value: None
  misc_feature: MA Experiment 20001560 PARAMETER Experiment Name: At_Drought_Soil_Dry_P Parameter: Post-Treatment Value: None
  misc_feature: MA Experiment 20001560 PARAMETER Experiment Name: At_Drought_Soil_Dry_P Parameter: Timepoint (day) Value: 14
  misc_feature: MA Experiment 20001560 PARAMETER Experiment Name: At_Drought_Soil_Dry_P Parameter: Treatment Value: Drought vs. No Drought
ataaaaagtagtactcgtgtcttactcgtgccagccactcgcatttctccagattttattatccttcctcgaaacaagtagatccacgattcgttgctgcgatcggcgttattatcgtcagctctctcgtttctgttctgtgagcttagctaagatgacgaagaactacccaaccgtgagcgaagattacaagaaggctgttgagaagtgcaggaggaagctcagaggtttgatcgctgagaagaactgtgcacccatcatggtccgactcgcatggcactctgctggaactttcgattgtcaatcaaggactggaggtccattcggaacaatgaggtttgacgctgagcaagctcatggagccaacagtggtatccacattgctcttaggttgttggaccccatcagggagcaattccctaccatctcttttgctgatttccatcagcttgctggtgttgtggccgttgaagttactggtggccctgacattcctttccaccctggaagagaggacaagccccaaccacctccagagggtcgtcttcctgatgctaccaagggttgtgaccatttgagagatgtctttgctaagcagatgggcttatctgacaaagacattgtcgctttatctggtgcccacactctgggacgatgccacaaggataggtctggcttcgaaggtgcatggacatcaaaccctctaatcttcgacaactcttacttcaaggaactcttgagcggagagaaggaaggccttcttcagcttgtctctgacaaagcactattggacgaccctgttttccgtcctttggtcgagaaatacgctgctgatgaagatgcctttttcgctgattacgctgaggcccacatgaagctttctgagcttgggtttgctgatgcttaagctgtgacgtatgctctgtgtgtgtgtgtgtgtctccccgagagtcatggctgtttttggttgggggctggaggggtcgcattgcatttgaactttgtcatatgattgcttaatgtactctcggatttacgtatctgtttttttcggtgggttgcgatttgaacacatccgttgcgcttttgctgcttagacacattaataaaattaatttctctcg

SEQ ID NO: 72528 - protein, 250 aa, Arabidopsis thaliana; identical to SEQ ID NO: 22608
  peptide (1)..(250): Ceres Seq. ID no. 4936573
  misc_feature (19)..(227): Pfam Name: Peroxidase Pfam Description: Peroxidase
  misc_feature (1)..(250): Homolog of NCBI NO: 99735 NR Description: L-ascorbate peroxidase (EC 1.11.1.11) precursor -
  misc_feature (1)..(250): Homolog of NCBI NO: 15223049 NR Description: ascorbate peroxidase, putative (APX); protein id:
  misc_feature (1)..(250): Homolog of NCBI NO: 24421233 NR Description: ascorbate peroxidase [Brassica juncea]
  misc_feature (1)..(250): Homolog of NCBI NO: 24421231 NR Description: ascorbate peroxidase [Brassica juncea]
  misc_feature (1)..(250): Homolog of NCBI NO: 18265381 NR Description: ascorbate peroxidase [Brassica oleracea]
  misc_feature (1)..(250): Homolog of NCBI NO: 18265379 NR Description: ascorbate peroxidase [Brassica oleracea]
  misc_feature (1)..(250): Homolog of NCBI NO: 541927 NR Description: L-ascorbate peroxidase (EC 1.11.1.11) - radish
  misc_feature (1)..(250): Homolog of NCBI NO: 1890354 NR Description: L-ascorbate peroxidase [Brassica napus]
  misc_feature (1)..(250): Homolog of NCBI NO: 7488439 NR Description: L-ascorbate peroxidase (EC 1.11.1.11) - leaf
  misc_feature (1)..(250): Homolog of NCBI NO: 24636598 NR Description: ascorbate peroxidase [Solanum tuberosum]

SEQ ID NO: 72529 - protein, 215 aa, Arabidopsis thaliana; identical to SEQ ID NO: 22609
  peptide (1)..(215): Ceres Seq. ID no. 4936574
  misc_feature (1)..(192): Pfam Name: Peroxidase Pfam Description: Peroxidase
  misc_feature (1)..(215): Homolog of NCBI NO: 99735 NR Description: L-ascorbate peroxidase (EC 1.11.1.11) precursor -
  misc_feature (1)..(215): Homolog of NCBI NO: 15223049 NR Description: ascorbate peroxidase, putative (APX); protein id:
  misc_feature (1)..(215): Homolog of NCBI NO: 24421233 NR Description: ascorbate peroxidase [Brassica juncea]
  misc_feature (1)..(215): Homolog of NCBI NO: 24421231 NR Description: ascorbate peroxidase [Brassica juncea]
  misc_feature (1)..(215): Homolog of NCBI NO: 18265381 NR Description: ascorbate peroxidase [Brassica oleracea]
  misc_feature (1)..(215): Homolog of NCBI NO: 18265379 NR Description: ascorbate peroxidase [Brassica oleracea]
  misc_feature (1)..(215): Homolog of NCBI NO: 541927 NR Description: L-ascorbate peroxidase (EC 1.11.1.11) - radish
  misc_feature (1)..(215): Homolog of NCBI NO: 1890354 NR Description: L-ascorbate peroxidase [Brassica napus]
  misc_feature (1)..(215): Homolog of NCBI NO: 7488439 NR Description: L-ascorbate peroxidase (EC 1.11.1.11) - leaf
  misc_feature (1)..(215): Homolog of NCBI NO: 24636598 NR Description: ascorbate peroxidase [Solanum tuberosum]

SEQ ID NO: 72530 - protein, 191 aa, Arabidopsis thaliana; identical to SEQ ID NO: 22610
  peptide (1)..(191): Ceres Seq. ID no. 4936575
  misc_feature (1)..(168): Pfam Name: Peroxidase Pfam Description: Peroxidase
  misc_feature (1)..(191): Homolog of NCBI NO: 99735 NR Description: L-ascorbate peroxidase (EC 1.11.1.11) precursor -
  misc_feature (1)..(191): Homolog of NCBI NO: 15223049 NR Description: ascorbate peroxidase, putative (APX); protein id:
  misc_feature (1)..(191): Homolog of NCBI NO: 24421233 NR Description: ascorbate peroxidase [Brassica juncea]
  misc_feature (1)..(191): Homolog of NCBI NO: 24421231 NR Description: ascorbate peroxidase [Brassica juncea]
  misc_feature (1)..(191): Homolog of NCBI NO: 18265381 NR Description: ascorbate peroxidase [Brassica oleracea]
  misc_feature (1)..(191): Homolog of NCBI NO: 18265379 NR Description: ascorbate peroxidase [Brassica oleracea]
  misc_feature (1)..(191): Homolog of NCBI NO: 541927 NR Description: L-ascorbate peroxidase (EC 1.11.1.11) - radish
  misc_feature (1)..(191): Homolog of NCBI NO: 1890354 NR Description: L-ascorbate peroxidase [Brassica napus]
  misc_feature (1)..(191): Homolog of NCBI NO: 7488439 NR Description: L-ascorbate peroxidase (EC 1.11.1.11) - leaf
  misc_feature (1)..(191): Homolog of NCBI NO: 24636598 NR Description: ascorbate peroxidase [Solanum tuberosum]

SEQ ID NO: 72531 - DNA, 2649 bp, Arabidopsis thaliana
  misc_feature (1)..(2649): Ceres Seq. ID no. 4936600
  misc_feature: MA Experiment ID: 20000166 Result: Up-regulated in Transcription
  misc_feature: MA Experiment 20000166 PARAMETER Experiment Name: At_100uM_ABA_P Parameter: Age (day) Value: 14
  misc_feature: MA Experiment 20000166 PARAMETER Experiment Name: At_100uM_ABA_P Parameter: Organism Value: A. thaliana
  misc_feature: MA Experiment 20000166 PARAMETER Experiment Name: At_100uM_ABA_P Parameter: Plant Line Value: WS
  misc_feature: MA Experiment 20000166 PARAMETER Experiment Name: At_100uM_ABA_P Parameter: Timepoint (hr) Value: 1
  misc_feature: MA Experiment 20000166 PARAMETER Experiment Name: At_100uM_ABA_P Parameter: Tissue Value: Aerial
  misc_feature: MA Experiment 20000166 PARAMETER Experiment Name: At_100uM_ABA_P Parameter: Treatment Value: 100uM ABA vs. No Treatment
  misc_feature: MA Experiment ID: 20000169 Result: Up-regulated in Transcription
  misc_feature: MA Experiment 20000169 PARAMETER Experiment Name: At_100uM_ABA_P Parameter: Age (day) Value: 14
  misc_feature: MA Experiment 20000169 PARAMETER Experiment Name: At_100uM_ABA_P Parameter: Organism Value: A. thaliana
  misc_feature: MA Experiment 20000169 PARAMETER Experiment Name: At_100uM_ABA_P Parameter: Plant Line Value: WS
  misc_feature: MA Experiment 20000169 PARAMETER Experiment Name: At_100uM_ABA_P Parameter: Timepoint (hr) Value: 6
  misc_feature: MA Experiment 20000169 PARAMETER Experiment Name: At_100uM_ABA_P Parameter: Tissue Value: Aerial
  misc_feature: MA Experiment 20000169 PARAMETER Experiment Name: At_100uM_ABA_P Parameter: Treatment Value: 100uM ABA vs. No Treatment
  misc_feature: MA Experiment ID: 20000182 Result: Up-regulated in Transcription
  misc_feature: MA Experiment 20000182 PARAMETER Experiment Name: At_2mM_SA_P Parameter: Age (day) Value: 14
  misc_feature: MA Experiment 20000182 PARAMETER Experiment Name: At_2mM_SA_P Parameter: Organism Value: A. thaliana
  misc_feature: MA Experiment 20000182 PARAMETER Experiment Name: At_2mM_SA_P Parameter: Plant Line Value: WS
  misc_feature: MA Experiment 20000182 PARAMETER Experiment Name: At_2mM_SA_P Parameter: Timepoint (hr) Value: 6
  misc_feature: MA Experiment 20000182 PARAMETER Experiment Name: At_2mM_SA_P Parameter: Tissue Value: Aerial
  misc_feature: MA Experiment 20000182 PARAMETER Experiment Name: At_2mM_SA_P Parameter: Treatment Value: 2mM SA vs. No Treatment
  misc_feature: MA Experiment ID: 20000184 Result: Up-regulated in Transcription
  misc_feature: MA Experiment 20000184 PARAMETER Experiment Name: At_Shoots__P Parameter: Age (day) Value: 7
  misc_feature: MA Experiment 20000184 PARAMETER Experiment Name: At_Shoots__P Parameter: Tissue Value: Shoots vs. Whole Plant
  misc_feature: MA Experiment ID: 20000227 Result: Up-regulated in Transcription
  misc_feature: MA Experiment 20000227 PARAMETER Experiment Name: At_Root-Tips-vs-Tops_P Parameter: Tissue Value: Root Tips vs. Root Tops
  misc_feature: MA Experiment ID: 20000267 Result: Up-regulated in Transcription
  misc_feature: MA Experiment 20000267 PARAMETER Experiment Name: At_Drought_P Parameter: Age (day) Value: 7
  misc_feature: MA Experiment 20000267 PARAMETER Experiment Name: At_Drought_P Parameter: Organism Value: A. thaliana
  misc_feature: MA Experiment 20000267 PARAMETER Experiment Name: At_Drought_P Parameter: Plant Line Value: WS
  misc_feature: MA Experiment 20000267 PARAMETER Experiment Name: At_Drought_P Parameter: Timepoint (hr) Value: 6
  misc_feature: MA Experiment 20000267 PARAMETER Experiment Name: At_Drought_P Parameter: Tissue Value: Whole Plant
  misc_feature: MA Experiment 20000267 PARAMETER Experiment Name: At_Drought_P Parameter: Treatment Value: Drought vs. No Drought
  misc_feature: MA Experiment ID: 20000268 Result: Up-regulated in Transcription
  misc_feature: MA Experiment 20000268 PARAMETER Experiment Name: At_100mM_NaCl__P Parameter: Age (day) Value: 14
  misc_feature: MA Experiment 20000268 PARAMETER Experiment Name: At_100mM_NaCl__P Parameter: Organism Value: A. thaliana
  misc_feature: MA Experiment 20000268 PARAMETER Experiment Name: At_100mM_NaCl__P Parameter: Plant Line Value: WS
  misc_feature: MA Experiment 20000268 PARAMETER Experiment Name: At_100mM_NaCl__P Parameter: Timepoint (hr) Value: 6
  misc_feature: MA Experiment 20000268 PARAMETER Experiment Name: At_100mM_NaCl__P Parameter: Tissue Value: Whole Plant
  misc_feature: MA Experiment 20000268 PARAMETER Experiment Name: At_100mM_NaCl__P Parameter: Treatment Value: 100mM NaCl vs. No Treatment
  misc_feature: MA Experiment ID: 20000436 Result: Up-regulated in Transcription
  misc_feature: MA Experiment 20000436 PARAMETER Experiment Name: At_Drought_P Parameter: Age (day) Value: 7
  misc_feature: MA Experiment 20000436 PARAMETER Experiment Name: At_Drought_P Parameter: Organism Value: A. thaliana
  misc_feature: MA Experiment 20000436 PARAMETER Experiment Name: At_Drought_P Parameter: Plant Line Value: WS
  misc_feature: MA Experiment 20000436 PARAMETER Experiment Name: At_Drought_P Parameter: Timepoint (hr) Value: 12
  misc_feature: MA Experiment 20000436 PARAMETER Experiment Name: At_Drought_P Parameter: Tissue Value: Whole Plant
  misc_feature: MA Experiment 20000436 PARAMETER Experiment Name: At_Drought_P Parameter: Treatment Value: Drought vs. No Drought
  misc_feature: MA Experiment ID: 20000437 Result: Up-regulated in Transcription
  misc_feature: MA Experiment 20000437 PARAMETER Experiment Name: At_Drought_P Parameter: Age (day) Value: 8
  misc_feature: MA Experiment 20000437 PARAMETER Experiment Name: At_Drought_P Parameter: Organism Value: A. thaliana
  misc_feature: MA Experiment 20000437 PARAMETER Experiment Name: At_Drought_P Parameter: Plant Line Value: WS
  misc_feature: MA Experiment 20000437 PARAMETER Experiment Name: At_Drought_P Parameter: Timepoint (hr) Value: 24
  misc_feature: MA Experiment 20000437 PARAMETER Experiment Name: At_Drought_P Parameter: Tissue Value: Whole Plant
  misc_feature: MA Experiment 20000437 PARAMETER Experiment Name: At_Drought_P Parameter: Treatment Value: Drought vs. No Drought
  misc_feature: MA Experiment ID: 20000438 Result: Up-regulated in Transcription
  misc_feature: MA Experiment 20000438 PARAMETER Experiment Name: At_Shoots__P Parameter: Age (day) Value: 14
  misc_feature: MA Experiment 20000438 PARAMETER Experiment Name: At_Shoots__P Parameter: Tissue Value: Shoots vs. Whole Plant
  misc_feature: MA Experiment ID: 20000439 Result: Up-regulated in Transcription
  misc_feature: MA Experiment 20000439 PARAMETER Experiment Name: At_Roots__P Parameter: Age (day) Value: 14 vs. 21
  misc_feature: MA Experiment 20000439 PARAMETER Experiment Name: At_Roots__P Parameter: Organism Value: A. thaliana
  misc_feature: MA Experiment 20000439 PARAMETER Experiment Name: At_Roots__P Parameter: Tissue Value: Roots vs. Whole Plant
  misc_feature: MA Experiment ID: 20000453 Result: Up-regulated in Transcription
  misc_feature: MA Experiment 20000453 PARAMETER Experiment Name: At_100uM_ABA_P Parameter: Age (day) Value: 15
  misc_feature: MA Experiment 20000453 PARAMETER Experiment Name: At_100uM_ABA_P Parameter: Organism Value: A. thaliana
  misc_feature: MA Experiment 20000453 PARAMETER Experiment Name: At_100uM_ABA_P Parameter: Plant Line Value: WS
  misc_feature: MA Experiment 20000453 PARAMETER Experiment Name: At_100uM_ABA_P Parameter: Timepoint (hr) Value: 24
  misc_feature: MA Experiment 20000453 PARAMETER Experiment Name: At_100uM_ABA_P Parameter: Tissue Value: Aerial
  misc_feature: MA Experiment 20000453 PARAMETER Experiment Name: At_100uM_ABA_P Parameter: Treatment Value: 100uM ABA vs. No Treatment
  misc_feature: MA Experiment ID: 20000460 Result: Up-regulated in Transcription
  misc_feature: MA Experiment 20000460 PARAMETER Experiment Name: At_10percent_PEG_P Parameter: Age (day) Value: 12
  misc_feature: MA Experiment 20000460 PARAMETER Experiment Name: At_10percent_PEG_P Parameter: Organism Value: A. thaliana
  misc_feature: MA Experiment 20000460 PARAMETER Experiment Name: At_10percent_PEG_P Parameter: Plant Line Value: WS
  misc_feature: MA Experiment 20000460 PARAMETER Experiment Name: At_10percent_PEG_P Parameter: Timepoint (day) Value: 12
  misc_feature: MA Experiment 20000460 PARAMETER Experiment Name: At_10percent_PEG_P Parameter: Tissue Value: Whole Plant
  misc_feature: MA Experiment 20000460 PARAMETER Experiment Name: At_10percent_PEG_P Parameter: Treatment Value: 10percent PEG vs. No Treatment
  misc_feature: MA Experiment ID: 20000527 Result: Up-regulated in Transcription
  misc_feature: MA Experiment 20000527 PARAMETER Experiment Name: At_10percent_PEG_P Parameter: Age (day) Value: 20
  misc_feature: MA Experiment 20000527 PARAMETER Experiment Name: At_10percent_PEG_P Parameter: Organism Value: A. thaliana
  misc_feature: MA Experiment 20000527 PARAMETER Experiment Name: At_10percent_PEG_P Parameter: Plant Line Value: WS
  misc_feature: MA Experiment 20000527 PARAMETER Experiment Name: At_10percent_PEG_P Parameter: Timepoint (day) Value: 20
  misc_feature: MA Experiment 20000527 PARAMETER Experiment Name: At_10percent_PEG_P Parameter: Tissue Value: Whole Plant
  misc_feature: MA Experiment 20000527 PARAMETER Experiment Name: At_10percent_PEG_P Parameter: Treatment Value: 10percent PEG vs. No Treatment
  misc_feature: MA Experiment ID: 20001247 Result: Up-regulated in Transcription
  misc_feature: MA Experiment 20001247 PARAMETER Experiment Name: At_Far-red-induction_P Parameter: Age (day) Value: 7
  misc_feature: MA Experiment 20001247 PARAMETER Experiment Name: At_Far-red-induction_P Parameter: Light Value: Far-red vs. White
  misc_feature: MA Experiment 20001247 PARAMETER Experiment Name: At_Far-red-induction_P Parameter: Organism Value: A. thaliana
  misc_feature: MA Experiment 20001247 PARAMETER Experiment Name: At_Far-red-induction_P Parameter: Plant Line Value: Columbia
  misc_feature: MA Experiment 20001247 PARAMETER Experiment Name: At_Far-red-induction_P Parameter: Timepoint (hr) Value: 1
  misc_feature: MA Experiment 20001247 PARAMETER Experiment Name: At_Far-red-induction_P Parameter: Tissue Value: Whole Plant
  misc_feature: MA Experiment ID: 20001248 Result: Up-regulated in Transcription
  misc_feature: MA Experiment 20001248 PARAMETER Experiment Name: At_Far-red-induction_P Parameter: Age (day) Value: 7
  misc_feature: MA Experiment 20001248 PARAMETER Experiment Name: At_Far-red-induction_P Parameter: Light Value: Far-red vs. White
  misc_feature: MA Experiment 20001248 PARAMETER Experiment Name: At_Far-red-induction_P Parameter: Organism Value: A. thaliana
  misc_feature: MA Experiment 20001248 PARAMETER Experiment Name: At_Far-red-induction_P Parameter: Plant Line Value: Columbia
  misc_feature: MA Experiment 20001248 PARAMETER Experiment Name: At_Far-red-induction_P Parameter: Timepoint (hr) Value: 4
  misc_feature: MA Experiment 20001248 PARAMETER Experiment Name: At_Far-red-induction_P Parameter: Tissue Value: Whole Plant
  misc_feature: MA Experiment ID: 20001450 Result: Up-regulated in Transcription
  misc_feature: MA Experiment 20001450 PARAMETER Experiment Name: At_Far-red-induction_P Parameter: Age (day) Value: 7
  misc_feature: MA Experiment 20001450 PARAMETER Experiment Name: At_Far-red-induction_P Parameter: Light Value: Far-red vs. White
  misc_feature: MA Experiment 20001450 PARAMETER Experiment Name: At_Far-red-induction_P Parameter: Organism Value: A. thaliana
  misc_feature: MA Experiment 20001450 PARAMETER Experiment Name: At_Far-red-induction_P Parameter: Plant Line Value: Columbia
  misc_feature: MA Experiment 20001450 PARAMETER Experiment Name: At_Far-red-induction_P Parameter: Timepoint (hr) Value: 8
  misc_feature: MA Experiment 20001450 PARAMETER Experiment Name: At_Far-red-induction_P Parameter: Tissue Value: Whole Plant
  misc_feature: MA Experiment ID: 20001451 Result: Up-regulated in Transcription
  misc_feature: MA Experiment 20001451 PARAMETER Experiment Name: At_Far-red-induction_P Parameter: Age (day) Value: 7
  misc_feature: MA Experiment 20001451 PARAMETER Experiment Name: At_Far-red-induction_P Parameter: Light Value: Far-red vs. White
  misc_feature: MA Experiment 20001451 PARAMETER Experiment Name: At_Far-red-induction_P Parameter: Organism Value: A. thaliana
  misc_feature: MA Experiment 20001451 PARAMETER Experiment Name: At_Far-red-induction_P Parameter: Plant Line Value: Columbia
  misc_feature: MA Experiment 20001451 PARAMETER Experiment Name: At_Far-red-induction_P Parameter: Timepoint (hr) Value: 24
  misc_feature: MA Experiment 20001451 PARAMETER Experiment Name: At_Far-red-induction_P Parameter: Tissue Value: Whole Plant
  misc_feature: MA Experiment ID: 20001554 Result: Up-regulated in Transcription
  misc_feature: MA Experiment 20001554 PARAMETER Experiment Name: At_Drought_Soil_Dry_P Parameter: Age (day) Value: 21
  misc_feature: MA Experiment 20001554 PARAMETER Experiment Name: At_Drought_Soil_Dry_P Parameter: Organism Value: A. thaliana
  misc_feature: MA Experiment 20001554 PARAMETER Experiment Name: At_Drought_Soil_Dry_P Parameter: Plant Line Value: WS
  misc_feature: MA Experiment 20001554 PARAMETER Experiment Name: At_Drought_Soil_Dry_P Parameter: Post Timepoint (hr) Value: None
  misc_feature: MA Experiment 20001554 PARAMETER Experiment Name: At_Drought_Soil_Dry_P Parameter: Post-Treatment Value: None
  misc_feature: MA Experiment 20001554 PARAMETER Experiment Name: At_Drought_Soil_Dry_P Parameter: Timepoint (day) Value: 7
  misc_feature: MA Experiment 20001554 PARAMETER Experiment Name: At_Drought_Soil_Dry_P Parameter: Treatment Value: Drought vs. No Drought
  misc_feature: MA Experiment ID: 20001555 Result: Up-regulated in Transcription
  misc_feature: MA Experiment 20001555 PARAMETER Experiment Name: At_Drought_Soil_Dry_P Parameter: Age (day) Value: 24
  misc_feature: MA Experiment 20001555 PARAMETER Experiment Name: At_Drought_Soil_Dry_P Parameter: Organism Value: A. thaliana
  misc_feature: MA Experiment 20001555 PARAMETER Experiment Name: At_Drought_Soil_Dry_P Parameter: Plant Line Value: WS
  misc_feature: MA Experiment 20001555 PARAMETER Experiment Name: At_Drought_Soil_Dry_P Parameter: Post Timepoint (hr) Value: None
  misc_feature: MA Experiment 20001555 PARAMETER Experiment Name: At_Drought_Soil_Dry_P Parameter: Post-Treatment Value: None
  misc_feature: MA Experiment 20001555 PARAMETER Experiment Name: At_Drought_Soil_Dry_P Parameter: Timepoint (day) Value: 10
  misc_feature: MA Experiment 20001555 PARAMETER Experiment Name: At_Drought_Soil_Dry_P Parameter: Treatment Value: Drought vs. No Drought
  misc_feature: MA Experiment ID: 20001556 Result: Up-regulated in Transcription
  misc_feature: MA Experiment 20001556 PARAMETER Experiment Name: At_Drought_Soil_Dry_P Parameter: Age (day) Value: 26
  misc_feature: MA Experiment 20001556 PARAMETER Experiment Name: At_Drought_Soil_Dry_P Parameter: Organism Value: A. thaliana
  misc_feature: MA Experiment 20001556 PARAMETER Experiment Name: At_Drought_Soil_Dry_P Parameter: Plant Line Value: WS
  misc_feature: MA Experiment 20001556 PARAMETER Experiment Name: At_Drought_Soil_Dry_P Parameter: Post Timepoint (hr) Value: None
  misc_feature: MA Experiment 20001556 PARAMETER Experiment Name: At_Drought_Soil_Dry_P Parameter: Post-Treatment Value: None
  misc_feature: MA Experiment 20001556 PARAMETER Experiment Name: At_Drought_Soil_Dry_P Parameter: Timepoint (day) Value: 12
  misc_feature: MA Experiment 20001556 PARAMETER Experiment Name: At_Drought_Soil_Dry_P Parameter: Treatment Value: Drought vs. No Drought
  misc_feature: MA Experiment ID: 20001557 Result: Up-regulated in Transcription
  misc_feature: MA Experiment 20001557 PARAMETER Experiment Name: At_Drought_Soil_Dry_P Parameter: Age (day) Value: 27
  misc_feature: MA Experiment 20001557 PARAMETER Experiment Name: At_Drought_Soil_Dry_P Parameter: Organism Value: A. thaliana
  misc_feature: MA Experiment 20001557 PARAMETER Experiment Name: At_Drought_Soil_Dry_P Parameter: Plant Line Value: WS
  misc_feature: MA Experiment 20001557 PARAMETER Experiment Name: At_Drought_Soil_Dry_P Parameter: Post Timepoint (hr) Value: 3
  misc_feature: MA Experiment 20001557 PARAMETER Experiment Name: At_Drought_Soil_Dry_P Parameter: Post-Treatment Value: Re-Water vs. No Drought
  misc_feature: MA Experiment 20001557 PARAMETER Experiment Name: At_Drought_Soil_Dry_P Parameter: Timepoint (day) Value: 13
  misc_feature: MA Experiment 20001557 PARAMETER Experiment Name: At_Drought_Soil_Dry_P Parameter: Treatment Value: Drought vs. No Drought
  misc_feature: MA Experiment ID: 20001560 Result: Up-regulated in Transcription
  misc_feature: MA Experiment 20001560 PARAMETER Experiment Name: At_Drought_Soil_Dry_P Parameter: Age (day) Value: 28
  misc_feature: MA Experiment 20001560 PARAMETER Experiment Name: At_Drought_Soil_Dry_P Parameter: Organism Value: A. thaliana
  misc_feature: MA Experiment 20001560 PARAMETER Experiment Name: At_Drought_Soil_Dry_P Parameter: Plant Line Value: WS
  misc_feature: MA Experiment 20001560 PARAMETER Experiment Name: At_Drought_Soil_Dry_P Parameter: Post Timepoint (hr) Value: None
  misc_feature: MA Experiment 20001560 PARAMETER Experiment Name: At_Drought_Soil_Dry_P Parameter: Post-Treatment Value: None
  misc_feature: MA Experiment 20001560 PARAMETER Experiment Name: At_Drought_Soil_Dry_P Parameter: Timepoint (day) Value: 14
  misc_feature: MA Experiment 20001560 PARAMETER Experiment Name: At_Drought_Soil_Dry_P Parameter: Treatment Value: Drought vs. No Drought
  misc_feature: MA Experiment ID: 20001904 Result: Up-regulated in Transcription
  misc_feature: MA Experiment 20001904 PARAMETER Experiment Name: At_Drought_Reproduction_P Parameter: Age (day) Value: 37
  misc_feature: MA Experiment 20001904 PARAMETER Experiment Name: At_Drought_Reproduction_P Parameter: Organism Value: A. thaliana
  misc_feature: MA Experiment 20001904 PARAMETER Experiment Name: At_Drought_Reproduction_P Parameter: Plant Line Value: WS
  misc_feature: MA Experiment 20001904 PARAMETER Experiment Name: At_Drought_Reproduction_P Parameter: Timepoint (day) Value: 7
  misc_feature: MA Experiment 20001904 PARAMETER Experiment Name: At_Drought_Reproduction_P Parameter: Tissue Value: Rosettes
  misc_feature: MA Experiment 20001904 PARAMETER Experiment Name: At_Drought_Reproduction_P Parameter: Treatment Value: Drought vs. No Drought
  misc_feature: MA Experiment ID: 20001905 Result: Up-regulated in Transcription
  misc_feature: MA Experiment 20001905 PARAMETER Experiment Name: At_Drought_Reproduction_P Parameter: Age (day) Value: 40
  misc_feature: MA Experiment 20001905 PARAMETER Experiment Name: At_Drought_Reproduction_P Parameter: Organism Value: A. thaliana
  misc_feature: MA Experiment 20001905 PARAMETER Experiment Name: At_Drought_Reproduction_P Parameter: Plant Line Value: WS
  misc_feature: MA Experiment 20001905 PARAMETER Experiment Name: At_Drought_Reproduction_P Parameter: Timepoint (day) Value: 10
  misc_feature: MA Experiment 20001905 PARAMETER Experiment Name: At_Drought_Reproduction_P Parameter: Tissue Value: Rosettes
  misc_feature: MA Experiment 20001905 PARAMETER Experiment Name: At_Drought_Reproduction_P Parameter: Treatment Value: Drought vs. No Drought
  misc_feature: MA Experiment ID: 20001909 Result: Up-regulated in Transcription
  misc_feature: MA Experiment 20001909 PARAMETER Experiment Name: At_Drought_Reproduction_P Parameter: Age (day) Value: 35
  misc_feature: MA Experiment 20001909 PARAMETER Experiment Name: At_Drought_Reproduction_P Parameter: Organism Value: A. thaliana
  misc_feature: MA Experiment 20001909 PARAMETER Experiment Name: At_Drought_Reproduction_P Parameter: Plant Line Value: WS
  misc_feature: MA Experiment 20001909 PARAMETER Experiment Name: At_Drought_Reproduction_P Parameter: Timepoint (day) Value: 5
  misc_feature: MA Experiment 20001909 PARAMETER Experiment Name: At_Drought_Reproduction_P Parameter: Tissue Value: Flowers
  misc_feature: MA Experiment 20001909 PARAMETER Experiment Name: At_Drought_Reproduction_P Parameter: Treatment Value: Drought vs. No Drought
  misc_feature: MA Experiment ID: 20001910 Result: Up-regulated in Transcription
  misc_feature: MA Experiment 20001910 PARAMETER Experiment Name: At_Drought_Reproduction_P Parameter: Age (day) Value: 37
  misc_feature: MA Experiment 20001910 PARAMETER Experiment Name: At_Drought_Reproduction_P Parameter: Organism Value: A. thaliana
  misc_feature: MA Experiment 20001910 PARAMETER Experiment Name: At_Drought_Reproduction_P Parameter: Plant Line Value: WS
  misc_feature: MA Experiment 20001910 PARAMETER Experiment Name: At_Drought_Reproduction_P Parameter: Timepoint (day) Value: 7
  misc_feature: MA Experiment 20001910 PARAMETER Experiment Name: At_Drought_Reproduction_P Parameter: Tissue Value: Flowers
  misc_feature: MA Experiment 20001910 PARAMETER Experiment Name: At_Drought_Reproduction_P Parameter: Treatment Value: Drought vs. No Drought
  misc_feature: MA Experiment ID: 20001911 Result: Up-regulated in Transcription
  misc_feature: MA Experiment 20001911 PARAMETER Experiment Name: At_Drought_Reproduction_P Parameter: Age (day) Value: 40
  misc_feature: MA Experiment 20001911 PARAMETER Experiment Name: At_Drought_Reproduction_P Parameter: Organism Value: A. thaliana
  misc_feature: MA Experiment 20001911 PARAMETER Experiment Name: At_Drought_Reproduction_P Parameter: Plant Line Value: WS
  misc_feature: MA Experiment 20001911 PARAMETER Experiment Name: At_Drought_Reproduction_P Parameter: Timepoint (day) Value: 10
  misc_feature: MA Experiment 20001911 PARAMETER Experiment Name: At_Drought_Reproduction_P Parameter: Tissue Value: Flowers
  misc_feature: MA Experiment 20001911 PARAMETER Experiment Name: At_Drought_Reproduction_P Parameter: Treatment Value: Drought vs. No Drought
atggctgttgtagaagaaccgatactttcaagattggatcgtattgatttcatggtgaggaagttagaggagatgaaaggaagctcgcctagaagctcgagcccatcgactccatctagtgggactcagccatcgtcaatggatctgtcgtcaccgaggagcatagggaaggtacactgccgttcgatggaacaagtcagggaggagactgagcggaaaggaactttgctagagagacttaataatgtagaggagcaagtgcttaagctgtgttcacagtttgaggaagaagttgaagaagagaggaagagagaagataagacggataaggaaaagaagaccccgaagaagaagaagggattgaggaagctggtggagataatattagacaaagaaaatttcacgttggaagagcttcttgatgaggaagagattattcaagaatgcaaggctttgaatagcaggctcattaactttctaagggataaagctcaagtggagcaattattgcggtacattgttgaagaacctccacaggatgctgatagtaaacgtgctttcaagtttccattcatctcttgtgaaatatttacatgtgaaattgatgttattctaaaaactttggtcgaggatgaagaggttgtcatttgccttatgatcagaaaaactgcagcgcttatgaattatgtaaaagggcatcaaaatgttttctgccagttagttgatttgattgggataacatccatcatggaggttttggttcgcttggttggggctgatgaccaagtctatcccaactttctggatgtgatgcaatggttggctgatagcaatttacttgaaatgatcgtggacaaacttaaaccatctgcaaatgcagcagaaacattatgtgcaatttctcggaatgcaccgtcagctttagctacgcagctctctagccctggctacgttgcaaagatatttggtcatgctcttgaagactcgcattcaaaatccggtctagttcattcactttcagtatgcacctctcttctggatccgaggagatctgctgtttcatcttctatgttcaattcttacagaggtcaacatatgttcgagtctcctgtcccagtttccccagaaactattggtgccatgctgcccaaactcaatgacttgcttatgcttctcactgtagcatctgatagcacagtattgcctacaacatatggtgaactgaggcctcctctcggaaagcatcgtctaaagattgtggagttcattgcagttttgttgaaaactagaagtgaagctgcacaaaaggaattagtcagttcaggaacaatcaaaaggacccttgatctgtttttcgagtacccgtacaataatgctctgcatcatcaagtggagagtataatactttcttgtttggaaaacaagagcgatttgatggttaaccatattcttcgagactgcgatctgattggcaaattcctcttgtcggacagggactcaaacctcttaggtgatagccagcccactgtagctgcctccgggaaaaaaaaacctcgtgtcgggtatgtcgggcatatcacaagaatatcaaataaaattggtcagttgagtaacagcaatggccagataaaggcataccttcaggaaaacagcgaatggaatgagtggcaaggtagtgttctgcaggaccgcaacacggttgaaaatgtcaacagatggggatgtgggcgcccaactaccctacaagataggacaagagatagcgatgaggaagacagggattacgatgttgcagctctggccaataacttaagccaagcatttagatacaaaatatatggaaacgatgacaatgaagaggaccacaatgcccttgatagagacgatgatgatgtttacttcgacgatgaatctgctgaagtagtaatttcatccttaagacttggggatgaccaaggaagcttgtttacaaattcgaattggttcacattccaagacgatagattcggcagcacaccctctgacacagcgggttcgaacacgatagacgtggaattgaataaaacctataatgccaacactagcagtagtgacgatgatgaagttgtggttggagaagaagacgatgatctaactggaaacccaaaagacaacgcgttgaacacaactgaaaccaactttcaaatggagagtccactggatttcttcgacttcaacacctcacagaaagctgaagaagcttttgctgaacagccacccgaatgggtcgggtggggagaaccatctgatatgcaagcgagtggcaccggtctgaacccatttatcgatgatgatgatgatgatgacagcaagcacataatgaacctcgacataccaatggctgaggtcaaatctgaatccatgattccaaacgggtcagaaagatcgttatttgagaaggacgtggaatttgtgggagtggaaccagaaggggcagagaaagcgatggagcaagcgatgaaagaagggatagtaggagaagctggagtgatgaagaagaacaaggagatggctgaggactcaaagccggaggaaagttcaggaggagtgaaagagttcaacgataacaactactggaaagtggatcaagaagttggagtgttggaatga

SEQ ID NO: 72532 - protein, 882 aa, Arabidopsis thaliana
  peptide (1)..(882): Ceres Seq. ID no. 4936601
  misc_feature (215)..(570): Pfam Name: SIT4 phosphatase-associated protein Pfam Description: SIT4 phosphatase-associated protein
  misc_feature (213)..(752): Homolog of NCBI NO: 15226390 NR Description: hypothetical protein; protein id: At2g28360.1
  misc_feature (125)..(215): Homolog of NCBI NO: 15226390 NR Description: hypothetical protein; protein id: At2g28360.1
  misc_feature (156)..(576): Homolog of NCBI NO: 15230633 NR Description: putative protein; protein id: At3g45190.1
  misc_feature (575)..(882): Homolog of NCBI NO: 15230633 NR Description: putative protein; protein id: At3g45190.1
  misc_feature (125)..(865): Homolog of NCBI NO: 25370579 NR Description: F26G16.7 protein - Arabidopsis thaliana Contains similarity to gb|D21822 ORF from Lilium longiflorum. gb|T03978, gb|R89954, gb|AI995107, gb|T20998, gb|R65384 come from
  misc_feature (125)..(865): Homolog of NCBI NO: 30691736 NR Description: SIT4 phosphatase-associated protein family
  misc_feature (125)..(830): Homolog of NCBI NO: 34912146 NR Description: P0712E02.15 [Oryza sativa (japonica
  misc_feature (366)..(752): Homolog of NCBI NO: 22531158 NR Description: unknown protein [Arabidopsis thaliana]
  misc_feature (808)..(882): Homolog of NCBI NO: 22531158 NR Description: unknown protein [Arabidopsis thaliana]
  misc_feature (213)..(771): Homolog of NCBI NO: 38344337 NR Description: OSJNBa0058K23.19 [Oryza sativa (japonica
MAVVEEPILSRLDRIDFMVRKLEEMKGSSPRSSSPSTPSSGTQPSSMDLSSPRSIGKVHCRSMEQVREETERKGTLLERLNNVEEQVLKLCSQFEEEVEEERKREDKTDKEKKTPKKKKGLRKLVEIILDKENFTLEELLDEEEIIQECKALNSRLINFLRDKAQVEQLLRYIVEEPPQDADSKRAFKFPFISCEIFTCEIDVILKTLVEDEEVVICLMIRKTAALMNYVKGHQNVFCQLVDLIGITSIMEVLVRLVGADDQVYPNFLDVMQWLADSNLLEMIVDKLKPSANAAETLCAISRNAPSALATQLSSPGYVAKIFGHALEDSHSKSGLVHSLSVCTSLLDPRRSAVSSSMFNSYRGQHMFESPVPVSPETIGAMLPKLNDLLMLLTVASDSTVLPTTYGELRPPLGKHRLKIVEFIAVLLKTRSEAAQKELVSSGTIKRTLDLFFEYPYNNALHHQVESIILSCLENKSDLMVNHILRDCDLIGKFLLSDRDSNLLGDSQPTVAASGKKKPRVGYVGHITRISNKIGQLSNSNGQIKAYLQENSEWNEWQGSVLQDRNTVENVNRWGCGRPTTLQDRTRDSDEEDRDYDVAALANNLSQAFRYKIYGNDDNEEDHNALDRDDDDVYFDDESAEVVISSLRLGDDQGSLFTNSNWFTFQDDRFGSTPSDTAGSNTIDVELNKTYNANTSSSDDDEVVVGEEDDDLTGNPKDNALNTTETNFQMESPLDFFDFNTSQKAEEAFAEQPPEWVGWGEPSDMQASGTGLNPFIDDDDDDDSKHIMNLDIPMAEVKSESMIPNGSERSLFEKDVEFVGVEPEGAEKAMEQAMKEGIVGEAGVMKKNKEMAEDSKPEESSGGVKEFNDNNYWKVDQEVGVLE

SEQ ID NO: 72533 - protein, 865 aa, Arabidopsis thaliana
  peptide (1)..(865): Ceres Seq. ID no. 4936602
  misc_feature (198)..(553): Pfam Name: SIT4 phosphatase-associated protein Pfam Description: SIT4 phosphatase-associated protein
  misc_feature (196)..(735): Homolog of NCBI NO: 15226390 NR Description: hypothetical protein; protein id: At2g28360.1
  misc_feature (108)..(198): Homolog of NCBI NO: 15226390 NR Description: hypothetical protein; protein id: At2g28360.1
  misc_feature (139)..(559): Homolog of NCBI NO: 15230633 NR Description: putative protein; protein id: At3g45190.1
  misc_feature (558)..(865): Homolog of NCBI NO: 15230633 NR Description: putative protein; protein id: At3g45190.1
  misc_feature (108)..(848): Homolog of NCBI NO: 25370579 NR Description: F26G16.7 protein - Arabidopsis thaliana Contains similarity to gb|D21822 ORF from Lilium longiflorum. gb|T03978, gb|R89954, gb|AI995107, gb|T20998, gb|R65384 come from
  misc_feature (108)..(848): Homolog of NCBI NO: 30691736 NR Description: SIT4 phosphatase-associated protein family
  misc_feature (108)..(813): Homolog of NCBI NO: 34912146 NR Description: P0712E02.15 [Oryza sativa (japonica
  misc_feature (349)..(735): Homolog of NCBI NO: 22531158 NR Description: unknown protein [Arabidopsis thaliana]
  misc_feature (791)..(865): Homolog of NCBI NO: 22531158 NR Description: unknown protein [Arabidopsis thaliana]
  misc_feature (196)..(754): Homolog of NCBI NO: 38344337 NR Description: OSJNBa0058K23.19 [Oryza sativa (japonica
MVRKLEEMKGSSPRSSSPSTPSSGTQPSSMDLSSPRSIGKVHCRSMEQVREETERKGTLLERLNNVEEQVLKLCSQFEEEVEEERKREDKTDKEKKTPKKKKGLRKLVEIILDKENFTLEELLDEEEIIQECKALNSRLINFLRDKAQVEQLLRYIVEEPPQDADSKRAFKFPFISCEIFTCEIDVILKTLVEDEEVVICLMIRKTAALMNYVKGHQNVFCQLVDLIGITSIMEVLVRLVGADDQVYPNFLDVMQWLADSNLLEMIVDKLKPSANAAETLCAISRNAPSALATQLSSPGYVAKIFGHALEDSHSKSGLVHSLSVCTSLLDPRRSAVSSSMFNSYRGQHMFESPVPVSPETIGAMLPKLNDLLMLLTVASDSTVLPTTYGELRPPLGKHRLKIVEFIAVLLKTRSEAAQKELVSSGTIKRTLDLFFEYPYNNALHHQVESIILSCLENKSDLMVNHILRDCDLIGKFLLSDRDSNLLGDSQPTVAASGKKKPRVGYVGHITRISNKIGQLSNSNGQIKAYLQENSEWNEWQGSVLQDRNTVENVNRWGCGRPTTLQDRTRDSDEEDRDYDVAALANNLSQAFRYKIYGNDDNEEDHNALDRDDDDVYFDDESAEVVISSLRLGDDQGSLFTNSNWFTFQDDRFGSTPSDTAGSNTIDVELNKTYNANTSSSDDDEVVVGEEDDDLTGNPKDNALNTTETNFQMESPLDFFDFNTSQKAEEAFAEQPPEWVGWGEPSDMQASGTGLNPFIDDDDDDDSKHIMNLDIPMAEVKSESMIPNGSERSLFEKDVEFVGVEPEGAEKAMEQAMKEGIVGEAGVMKKNKEMAEDSKPEESSGGVKEFNDNNYWKVDQEVGVLE

SEQ ID NO: 72534 - protein, 858 aa, Arabidopsis thaliana
  peptide (1)..(858): Ceres Seq. ID no. 4936603
  misc_feature (191)..(546): Pfam Name: SIT4 phosphatase-associated protein Pfam Description: SIT4 phosphatase-associated protein
  misc_feature (189)..(728): Homolog of NCBI NO: 15226390 NR Description: hypothetical protein; protein id: At2g28360.1
  misc_feature (101)..(191): Homolog of NCBI NO: 15226390 NR Description: hypothetical protein; protein id: At2g28360.1
  misc_feature (132)..(552): Homolog of NCBI NO: 15230633 NR Description: putative protein; protein id: At3g45190.1
  misc_feature (551)..(858): Homolog of NCBI NO: 15230633 NR Description: putative protein; protein id: At3g45190.1
  misc_feature (101)..(841): Homolog of NCBI NO: 25370579 NR Description: F26G16.7 protein - Arabidopsis thaliana Contains similarity to gb|D21822 ORF from Lilium longiflorum. gb|T03978, gb|R89954, gb|AI995107, gb|T20998, gb|R65384 come from
  misc_feature (101)..(841): Homolog of NCBI NO: 30691736 NR Description: SIT4 phosphatase-associated protein family
  misc_feature (101)..(806): Homolog of NCBI NO: 34912146 NR Description: P0712E02.15 [Oryza sativa (japonica
  misc_feature (342)..(728): Homolog of NCBI NO: 22531158 NR Description: unknown protein [Arabidopsis thaliana]
  misc_feature (784)..(858): Homolog of NCBI NO: 22531158 NR Description: unknown protein [Arabidopsis thaliana]
  misc_feature (189)..(747): Homolog of NCBI NO: 38344337 NR Description: OSJNBa0058K23.19 [Oryza sativa (japonica
MKGSSPRSSSPSTPSSGTQPSSMDLSSPRSIGKVHCRSMEQVREETERKGTLLERLNNVEEQVLKLCSQFEEEVEEERKREDKTDKEKKTPKKKKGLRKLVEIILDKENFTLEELLDEEEIIQECKALNSRLINFLRDKAQVEQLLRYIVEEPPQDADSKRAFKFPFISCEIFTCEIDVILKTLVEDEEVVICLMIRKTAALMNYVKGHQNVFCQLVDLIGITSIMEVLVRLVGADDQVYPNFLDVMQWLADSNLLEMIVDKLKPSANAAETLCAISRNAPSALATQLSSPGYVAKIFGHALEDSHSKSGLVHSLSVCTSLLDPRRSAVSSSMFNSYRGQHMFESPVPVSPETIGAMLPKLNDLLMLLTVASDSTVLPTTYGELRPPLGKHRLKIVEFIAVLLKTRSEAAQKELVSSGTIKRTLDLFFEYPYNNALHHQVESIILSCLENKSDLMVNHILRDCDLIGKFLLSDRDSNLLGDSQPTVAASGKKKPRVGYVGHITRISNKIGQLSNSNGQIKAYLQENSEWNEWQGSVLQDRNTVENVNRWGCGRPTTLQDRTRDSDEEDRDYDVAALANNLSQAFRYKIYGNDDNEEDHNALDRDDDDVYFDDESAEVVISSLRLGDDQGSLFTNSNWFTFQDDRFGSTPSDTAGSNTIDVELNKTYNANTSSSDDDEVVVGEEDDDLTGNPKDNALNTTETNFQMESPLDFFDFNTSQKAEEAFAEQPPEWVGWGEPSDMQASGTGLNPFIDDDDDDDSKHIMNLDIPMAEVKSESMIPNGSERSLFEKDVEFVGVEPEGAEKAMEQAMKEGIVGEAGVMKKNKEMAEDSKPEESSGGVKEFNDNNYWKVDQEVGVLE

SEQ ID NO: 72535 - DNA, 2517 bp, Arabidopsis thaliana
  misc_feature (1)..(2517): Ceres Seq. ID no. 4936655
  misc_feature: MA Experiment ID: 20000267 Result: Down-regulated in Transcription
  misc_feature: MA Experiment 20000267 PARAMETER Experiment Name: At_Drought_P Parameter: Age (day) Value: 7
  misc_feature: MA Experiment 20000267 PARAMETER Experiment Name: At_Drought_P Parameter: Organism Value: A. thaliana
  misc_feature: MA Experiment 20000267 PARAMETER Experiment Name: At_Drought_P Parameter: Plant Line Value: WS
  misc_feature: MA Experiment 20000267 PARAMETER Experiment Name: At_Drought_P Parameter: Timepoint (hr) Value: 6
  misc_feature: MA Experiment 20000267 PARAMETER Experiment Name: At_Drought_P Parameter: Tissue Value: Whole Plant
  misc_feature: MA Experiment 20000267 PARAMETER Experiment Name: At_Drought_P Parameter: Treatment Value: Drought vs. No Drought
  misc_feature: MA Experiment ID: 20000527 Result: Down-regulated in Transcription
  misc_feature: MA Experiment 20000527 PARAMETER Experiment Name: At_10percent_PEG_P Parameter: Age (day) Value: 20
  misc_feature: MA Experiment 20000527 PARAMETER Experiment Name: At_10percent_PEG_P Parameter: Organism Value: A. thaliana
  misc_feature: MA Experiment 20000527 PARAMETER Experiment Name: At_10percent_PEG_P Parameter: Plant Line Value: WS
  misc_feature: MA Experiment 20000527 PARAMETER Experiment Name: At_10percent_PEG_P Parameter: Timepoint (day) Value: 20
  misc_feature: MA Experiment 20000527 PARAMETER Experiment Name: At_10percent_PEG_P Parameter: Tissue Value: Whole Plant
  misc_feature: MA Experiment 20000527 PARAMETER Experiment Name: At_10percent_PEG_P Parameter: Treatment Value: 10percent PEG vs. No Treatment
atggaatcttcgtcagaaggtgagacaaacaagatttcccgatgcaaagccactggttcagacaatcctgatgaggactacgtcgagatcacactcgaagtgcgagacgaaaccatcaacacaatgaaggccaaggcgacacttcgttcggttctttccgggaggctgaaaacgatggttaagtcgctatcgtttgcttcacgccggctcgaccgtagtaagtcgttcggtgctatgtttgctcttcgagggttgaggttcattgccaaaaacgacgccgttggtagaggctgggatgaggttgcaatgaggtttgataagttggccgttgaagggaaactccctaaatccaaatttggacattgcataggaatggttgaatctagcgaatttgtgaacgagctttttgaggcgttggtccgaaggagagggactacgtcatcgtcaatcaccaaaactgaattgtttgaattctgggagcagatcacaggcaatagttttgatgataggctgcaaatcttttttgatatggtggacaaaaatttggacggacgtattacaggagatgaggttaaggagataattgctttaagtgcttcggctaacaagctatcaaagattaaagaaaatgtagatgaatatgctgccttgatcatggaagaactagatcgcgacaacctcggatatattgagttacataacttggaaacattgcttctccaagttcctagccaatcaaataacagtccatcttccgcgaacaaacgtgcactcaacaagatgttgagccagaagctcataccaacaaaagatcgaaacccggtgaaaagatttgctatgaatatatcatacttcttcttggaaaattggaaaaggatttgggtgttaacattgtggatatccatttgcatcactctcttcacttggaaatttctccagtataaacgcaaaaccgtgttcgaggtgatgggctactgtgttaccgtggccaaaggcagtgcagagaccttgaaattcaacatggctctcattctcttgcccgtttgtaggaacactatcacttggctaaggaccaagtccaagcttattgggtctgttgttccatttgatgacaatatcaatttccacaaggttgttgcatttgggatcgcggttggaataggcttgcacgctatatctcacctggcatgtgatttcccgcgtttgctgcatgcaaaaaatgtagagtttgagccaatgaaaaagtttttcggagacgagaggcctgaaaattatggatggttcatgaaagggacagacgggtggaccggtgttaccatggtggttcttatgttagtggcctacgtcttggcgcagtcgtggttcagacgaaaccgggcaaacctaccaaaatcgttgaaacgattgactggtttcaacgcattttggtactcacaccatttgtttgtcatcgtttatgttcttctcatcgtgcatggctattttgtttatctctcaaaggaatggtaccacaagacgacgtggatgtatctggcagttcccgtactactatatgcatttgaacgattgattcgtgcatttagaccaggtgccaaggctgtcaaggttttgaaggtggcagtatatccaggaaatgtactttcactttacatgtcgaagcctaaaggtttcaagtacacaagtggacagtacatatatattaactgttctgacgtctcaccattacaatggcatccgttttcaattacttcggcttccggggatgattacctcagcgttcatatccgcacactcggagactggacatcgcaactcaaatccttatattccaaggtttgtcaacttccctcaacaagtcaaagtgggctcttcatagctgacataggtcaagccaacaatataaccaggtttccgaggctgttaatcgatggtccatatggtgcacccgcacaagattaccggaactacgatgtattgcttctagtaggtctagggatcggagcgacgccattaatcagcataatcagggacgtccttaacaacatcaagaaccagaattccatcgaacgaggcactaaccaacacataaaaaactatgttgccacaaaacgagcttatttttattgggtaacaagagagcaaggatcattggaatggttcagtgaggtcatgaacgaggtagctgagtatgatagtgaggggatgattgaactacataattactgcactagcgtgtatgaggaaggagatgcgaggtcagcactaatcaccatgttgcagtcattgcaccacgccaagagcggcattgacatcgtatcgggcactcgggtccgaacccatttcgctcgacccaattggcgtagtgtcttcaagcacgtcgcagtcaaccacgtcaatcaacgagttggggttttctactgtggtaatacatgcatcataggagagttaaagagactggctcaagatttctctaggaaaactacgaccaagtttgagttccacaaggaaaatttctag

SEQ ID NO: 72536 - protein, 838 aa, Arabidopsis thaliana
  peptide (1)..(838): Ceres Seq. ID no. 4936656
  misc_feature (323)..(837): Pfam Name: Ferric reductase like transmembrane component Pfam Description: Ferric reductase like transmembrane component
  misc_feature (16)..(696): Homolog of NCBI NO: 20805911 NR Description: NADPH oxidase [Nicotiana tabacum]
  misc_feature (681)..(838): Homolog of NCBI NO: 20805911 NR Description: NADPH oxidase [Nicotiana tabacum]
  misc_feature (16)..(696): Homolog of NCBI NO: 28268680 NR Description: respiratory burst oxidase homolog [Nicotiana
  misc_feature (681)..(838): Homolog of NCBI NO: 28268680 NR Description: respiratory burst oxidase homolog [Nicotiana
  misc_feature (10)..(838): Homolog of NCBI NO: 11358758 NR Description: respiratory burst oxidase protein D [imported] - thaliana >gi|3242789|gb|AAC39479.1| respiratory burst oxidase
  misc_feature (10)..(838): Homolog of NCBI NO: 15238842 NR Description: respiratory burst oxidase protein; protein id: supported by cDNA: gi_15983500, supported by cDNA: gi_3242788 thaliana] >gi|10177927|dbj|BAB11338.1| respiratory burst oxidase
  misc_feature (16)..(696): Homolog of NCBI NO: 19715905 NR Description: NADPH oxidase [Nicotiana tabacum]
  misc_feature (681)..(838): Homolog of NCBI NO: 19715905 NR Description: NADPH oxidase [Nicotiana tabacum]
  misc_feature (44)..(691): Homolog of NCBI NO: 8131846 NR Description: whitefly-induced gp91-phox [Lycopersicon
  misc_feature (697)..(838): Homolog of NCBI NO: 8131846 NR Description: whitefly-induced gp91-phox [Lycopersicon
MESSSEGETNKISRCKATGSDNPDEDYVEITLEVRDETINTMKAKATLRSVLSGRLKTMVKSLSFASRRLDRSKSFGAMFALRGLRFIAKNDAVGRGWDEVAMRFDKLAVEGKLPKSKFGHCIGMVESSEFVNELFEALVRRRGTTSSSITKTELFEFWEQITGNSFDDRLQIFFDMVDKNLDGRITGDEVKEIIALSASANKLSKIKENVDEYAALIMEELDRDNLGYIELHNLETLLLQVPSQSNNSPSSANKRALNKMLSQKLIPTKDRNPVKRFAMNISYFFLENWKRIWVLTLWISICITLFTWKFLQYKRKTVFEVMGYCVTVAKGSAETLKFNMALILLPVCRNTITWLRTKSKLIGSVVPFDDNINFHKVVAFGIAVGIGLHAISHLACDFPRLLHAKNVEFEPMKKFFGDERPENYGWFMKGTDGWTGVTMVVLMLVAYVLAQSWFRRNRANLPKSLKRLTGFNAFWYSHHLFVIVYVLLIVHGYFVYLSKEWYHKTTWMYLAVPVLLYAFERLIRAFRPGAKAVKVLKVAVYPGNVLSLYMSKPKGFKYTSGQYIYINCSDVSPLQWHPFSITSASGDDYLSVHIRTLGDWTSQLKSLYSKVCQLPSTSQSGLFIADIGQANNITRFPRLLIDGPYGAPAQDYRNYDVLLLVGLGIGATPLISIIRDVLNNIKNQNSIERGTNQHIKNYVATKRAYFYWVTREQGSLEWFSEVMNEVAEYDSEGMIELHNYCTSVYEEGDARSALITMLQSLHHAKSGIDIVSGTRVRTHFARPNWRSVFKHVAVNHVNQRVGVFYCGNTCIIGELKRLAQDFSRKTTTKFEFHKENF

SEQ ID NO: 72537 - protein, 797 aa, Arabidopsis thaliana
  peptide (1)..(797): Ceres Seq. ID no. 4936657
  misc_feature (282)..(796): Pfam Name: Ferric reductase like transmembrane component Pfam Description: Ferric reductase like transmembrane component
  misc_feature (1)..(655): Homolog of NCBI NO: 20805911 NR Description: NADPH oxidase [Nicotiana tabacum]
  misc_feature (640)..(797): Homolog of NCBI NO: 20805911 NR Description: NADPH oxidase [Nicotiana tabacum]
  misc_feature (1)..(655): Homolog of NCBI NO: 28268680 NR Description: respiratory burst oxidase homolog [Nicotiana
  misc_feature (640)..(797): Homolog of NCBI NO: 28268680 NR Description: respiratory burst oxidase homolog [Nicotiana
  misc_feature (1)..(797): Homolog of NCBI NO: 11358758 NR Description: respiratory burst oxidase protein D [imported] - thaliana >gi|3242789|gb|AAC39479.1| respiratory burst oxidase
  misc_feature (1)..(797): Homolog of NCBI NO: 15238842 NR Description: respiratory burst oxidase protein; protein id: supported by cDNA: gi_15983500, supported by cDNA: gi_3242788 thaliana] >gi|10177927|dbj|BAB11338.1| respiratory burst oxidase
  misc_feature (1)..(655): Homolog of NCBI NO: 19715905 NR Description: NADPH oxidase [Nicotiana tabacum]
  misc_feature (640)..(797): Homolog of NCBI NO: 19715905 NR Description: NADPH oxidase [Nicotiana tabacum]
  misc_feature (3)..(650): Homolog of NCBI NO: 8131846 NR Description: whitefly-induced gp91-phox [Lycopersicon
  misc_feature (656)..(797): Homolog of NCBI NO: 8131846 NR Description: whitefly-induced gp91-phox [Lycopersicon
MKAKATLRSVLSGRLKTMVKSLSFASRRLDRSKSFGAMFALRGLRFIAKNDAVGRGWDEVAMRFDKLAVEGKLPKSKFGHCIGMVESSEFVNELFEALVRRRGTTSSSITKTELFEFWEQITGNSFDDRLQIFFDMVDKNLDGRITGDEVKEIIALSASANKLSKIKENVDEYAALIMEELDRDNLGYIELHNLETLLLQVPSQSNNSPSSANKRALNKMLSQKLIPTKDRNPVKRFAMNISYFFLENWKRIWVLTLWISICITLFTWKFLQYKRKTVFEVMGYCVTVAKGSAETLKFNMALILLPVCRNTITWLRTKSKLIGSVVPFDDNINFHKVVAFGIAVGIGLHAISHLACDFPRLLHAKNVEFEPMKKFFGDERPENYGWFMKGTDGWTGVTMVVLMLVAYVLAQSWFRRNRANLPKSLKRLTGFNAFWYSHHLFVIVYVLLIVHGYFVYLSKEWYHKTTWMYLAVPVLLYAFERLIRAFRPGAKAVKVLKVAVYPGNVLSLYMSKPKGFKYTSGQYIYINCSDVSPLQWHPFSITSASGDDYLSVHIRTLGDWTSQLKSLYSKVCQLPSTSQSGLFIADIGQANNITRFPRLLIDGPYGAPAQDYRNYDVLLLVGLGIGATPLISIIRDVLNNIKNQNSIERGTNQHIKNYVATKRAYFYWVTREQGSLEWFSEVMNEVAEYDSEGMIELHNYCTSVYEEGDARSALITMLQSLHHAKSGIDIVSGTRVRTHFARPNWRSVFKHVAVNHVNQRVGVFYCGNTCIIGELKRLAQDFSRKTTTKFEFHKENF

SEQ ID NO: 72538 - protein, 780 aa, Arabidopsis thaliana
  peptide (1)..(780): Ceres Seq. ID no. 4936658
  misc_feature (265)..(779): Pfam Name: Ferric reductase like transmembrane component Pfam Description: Ferric reductase like transmembrane component
  misc_feature (1)..(638): Homolog of NCBI NO: 20805911 NR Description: NADPH oxidase [Nicotiana tabacum]
  misc_feature (623)..(780): Homolog of NCBI NO: 20805911 NR Description: NADPH oxidase [Nicotiana tabacum]
  misc_feature (1)..(638): Homolog of NCBI NO: 28268680 NR Description: respiratory burst oxidase homolog [Nicotiana
  misc_feature (623)..(780): Homolog of NCBI NO: 28268680 NR Description: respiratory burst oxidase homolog [Nicotiana
  misc_feature (1)..(780): Homolog of NCBI NO: 11358758 NR Description: respiratory burst oxidase protein D [imported] - thaliana >gi|3242789|gb|AAC39479.1| respiratory burst oxidase
  misc_feature (1)..(780): Homolog of NCBI NO: 15238842 NR Description: respiratory burst oxidase protein; protein id: supported by cDNA: gi_15983500, supported by cDNA: gi_3242788 thaliana] >gi|10177927|dbj|BAB11338.1| respiratory burst oxidase
  misc_feature (1)..(638): Homolog of NCBI NO: 19715905 NR Description: NADPH oxidase [Nicotiana tabacum]
  misc_feature (623)..(780): Homolog of NCBI NO: 19715905 NR Description: NADPH oxidase [Nicotiana tabacum]
  misc_feature (1)..(633): Homolog of NCBI NO: 8131846 NR Description: whitefly-induced gp91-phox [Lycopersicon
  misc_feature (639)..(780): Homolog of NCBI NO: 8131846 NR Description: whitefly-induced gp91-phox [Lycopersicon
MVKSLSFASRRLDRSKSFGAMFALRGLRFIAKNDAVGRGWDEVAMRFDKLAVEGKLPKSKFGHCIGMVESSEFVNELFEALVRRRGTTSSSITKTELFEFWEQITGNSFDDRLQIFFDMVDKNLDGRITGDEVKEIIALSASANKLSKIKENVDEYAALIMEELDRDNLGYIELHNLETLLLQVPSQSNNSPSSANKRALNKMLSQKLIPTKDRNPVKRFAMNISYFFLENWKRIWVLTLWISICITLFTWKFLQYKRKTVFEVMGYCVTVAKGSAETLKFNMALILLPVCRNTITWLRTKSKLIGSVVPFDDNINFHKVVAFGIAVGIGLHAISHLACDFPRLLHAKNVEFEPMKKFFGDERPENYGWFMKGTDGWTGVTMVVLMLVAYVLAQSWFRRNRANLPKSLKRLTGFNAFWYSHHLFVIVYVLLIVHGYFVYLSKEWYHKTTWMYLAVPVLLYAFERLIRAFRPGAKAVKVLKVAVYPGNVLSLYMSKPKGFKYTSGQYIYINCSDVSPLQWHPFSITSASGDDYLSVHIRTLGDWTSQLKSLYSKVCQLPSTSQSGLFIADIGQANNITRFPRLLIDGPYGAPAQDYRNYDVLLLVGLGIGATPLISIIRDVLNNIKNQNSIERGTNQHIKNYVATKRAYFYWVTREQGSLEWFSEVMNEVAEYDSEGMIELHNYCTSVYEEGDARSALITMLQSLHHAKSGIDIVSGTRVRTHFARPNWRSVFKHVAVNHVNQRVGVFYCGNTCIIGELKRLAQDFSRKTTTKFEFHKENF

SEQ ID NO: 72539 - DNA, 741 bp, Arabidopsis thaliana
  misc_feature (1)..(741): Ceres Seq. ID no. 4936734
  misc_feature: MA Experiment ID: 108434 Result: Down-regulated in Transcription
  misc_feature: MA Experiment 108434 PARAMETER Experiment Name: At_Root_Tips_cDNA_P Parameter: Tissue Value: Root Tips
  misc_feature: MA Experiment ID: 108462 Result: Up-regulated in Transcription
  misc_feature: MA Experiment 108462 PARAMETER Experiment Name: At_Germinating_Seeds_cDNA_P Parameter: Age (day) Value: 2 vs. 0
  misc_feature: MA Experiment 108462 PARAMETER Experiment Name: At_Germinating_Seeds_cDNA_P Parameter: Tissue Value: Germinating Seeds
  misc_feature: MA Experiment ID: 108464 Result: Up-regulated in Transcription
  misc_feature: MA Experiment 108464 PARAMETER Experiment Name: At_Germinating_Seeds_cDNA_P Parameter: Age (day) Value: 4 vs. 0
  misc_feature: MA Experiment 108464 PARAMETER Experiment Name: At_Germinating_Seeds_cDNA_P Parameter: Tissue Value: Germinating Seeds
  misc_feature: MA Experiment ID: 108595 Result: Up-regulated in Transcription
  misc_feature: MA Experiment 108595 PARAMETER Experiment Name: At_Ler-pi_Ovule_cDNA_P Parameter: Plant Line Value: null
  misc_feature: MA Experiment ID: 108607 Result: Up-regulated in Transcription
  misc_feature: MA Experiment 108607 PARAMETER Experiment Name: At_100uM_ABA_cDNA_P Parameter: Timepoint (hr) Value: 4
  misc_feature: MA Experiment 108607 PARAMETER Experiment Name: At_100uM_ABA_cDNA_P Parameter: Tissue Value: Aerial
  misc_feature: MA Experiment 108607 PARAMETER Experiment Name: At_100uM_ABA_cDNA_P Parameter: Treatment Value: 100uM ABA vs. No Treatment
  misc_feature: MA Experiment ID: 20000068 Result: Down-regulated in Transcription
  misc_feature: MA Experiment ID: 20000224 Result: Up-regulated in Transcription
  misc_feature: MA Experiment ID: 20000269 Result: Up-regulated in Transcription
  misc_feature: MA Experiment 20000269 PARAMETER Experiment Name: At_1mM_KNO3_L-vs-H_Roots_P Parameter: Age (day) Value: 7,10,12
  misc_feature: MA Experiment 20000269 PARAMETER Experiment Name: At_1mM_KNO3_L-vs-H_Roots_P Parameter: Organism Value: A. thaliana
  misc_feature: MA Experiment 20000269 PARAMETER Experiment Name: At_1mM_KNO3_L-vs-H_Roots_P Parameter: Plant Line Value: WS
  misc_feature: MA Experiment 20000269 PARAMETER Experiment Name: At_1mM_KNO3_L-vs-H_Roots_P Parameter: Timepoint (day) Value: 7,10,12
  misc_feature: MA Experiment 20000269 PARAMETER Experiment Name: At_1mM_KNO3_L-vs-H_Roots_P Parameter: Tissue Value: Roots
  misc_feature: MA Experiment 20000269 PARAMETER Experiment Name: At_1mM_KNO3_L-vs-H_Roots_P Parameter: Treatment Value: 1mM KNO3 vs. 50mM KNO3
  misc_feature: MA Experiment ID: 20000286 Result: Down-regulated in Transcription
  misc_feature: MA Experiment 20000286 PARAMETER Experiment Name: At_Open_Flower_P Parameter: Age (day) Value: 21
  misc_feature: MA Experiment 20000286 PARAMETER Experiment Name: At_Open_Flower_P Parameter: Plant Line Value: WS
  misc_feature: MA Experiment 20000286 PARAMETER Experiment Name: At_Open_Flower_P Parameter: Tissue Value: Half Open vs. Whole Plant
  misc_feature: MA Experiment ID: 20000445 Result: Down-regulated in Transcription
  misc_feature: MA Experiment 20000445 PARAMETER Experiment Name: At_100uM_NAA__P Parameter: Age (day) Value: 14
  misc_feature: MA Experiment 20000445 PARAMETER Experiment Name: At_100uM_NAA__P Parameter: Organism Value: A. thaliana
  misc_feature: MA Experiment 20000445 PARAMETER Experiment Name: At_100uM_NAA__P Parameter: Plant Line Value: WS
  misc_feature: MA Experiment 20000445 PARAMETER Experiment Name: At_100uM_NAA__P Parameter: Timepoint (hr) Value: 6
  misc_feature: MA Experiment 20000445 PARAMETER Experiment Name: At_100uM_NAA__P Parameter: Tissue Value: Aerial
  misc_feature: MA Experiment 20000445 PARAMETER Experiment Name: At_100uM_NAA__P Parameter: Treatment Value: 100uM NAA vs. No Treatment
  misc_feature: MA Experiment ID: 20000573 Result: Up-regulated in Transcription
  misc_feature: MA Experiment 20000573 PARAMETER Experiment Name: At_100uM_ABA_Mutants__P Parameter: Organism Value: A. thaliana
  misc_feature: MA Experiment 20000573 PARAMETER Experiment Name: At_100uM_ABA_Mutants__P Parameter: Plant Line Value: CS22 vs. Ler wt
  misc_feature: MA Experiment 20000573 PARAMETER Experiment Name: At_100uM_ABA_Mutants__P Parameter: Timepoint (hr) Value: N/A
  misc_feature: MA Experiment 20000573 PARAMETER Experiment Name: At_100uM_ABA_Mutants__P Parameter: Tissue Value: Whole Plant
  misc_feature: MA Experiment 20000573 PARAMETER Experiment Name: At_100uM_ABA_Mutants__P Parameter: Treatment Value: None
  misc_feature: MA Experiment ID: 20000574 Result: Up-regulated in Transcription
  misc_feature: MA Experiment 20000574 PARAMETER Experiment Name: At_100uM_ABA_Mutants__P Parameter: Organism Value: A. thaliana
  misc_feature: MA Experiment 20000574 PARAMETER Experiment Name: At_100uM_ABA_Mutants__P Parameter: Plant Line Value: CS23 vs. Ler wt
  misc_feature: MA Experiment 20000574 PARAMETER Experiment Name: At_100uM_ABA_Mutants__P Parameter: Timepoint (hr) Value: N/A
  misc_feature: MA Experiment 20000574 PARAMETER Experiment Name: At_100uM_ABA_Mutants__P Parameter: Tissue Value: Whole Plant
  misc_feature: MA Experiment 20000574 PARAMETER Experiment Name: At_100uM_ABA_Mutants__P Parameter: Treatment Value: None
aaaaacattcagagagaaaattcagcatttttgatagctcaagcacttgattctttccaaaggggtttcctgaggccaagtaacaatggcgaaaggagttgcagttttgaacagcagtgagggtgttacggggactatctttttcacccaggaaggcgatggtgtgaccactgtgagtggaacagtttctggccttaagcctggtcttcatggtttccatgtccatgctcttggtgacaccactaacggttgcatgtctactggtccacatttcaaccccgatggtaaaacacacggtgcccctgaggatgctaatcgacatgctggtgatctaggaaacatcactgttggagatgatggaactgccaccttcacaatcactgattgccagattcctcttactggaccaaactctattgttggtagggctgttgttgtccatgcagaccctgatgacctcggaaagggaggccatgaactcagcctggctactggaaacgcaggcggccgtgttgcttgcggcatcattggtctccagggctaaagctgctacgtttccaaagaagagattgatgtaataaggaggtccaaccttagacctgggtttggtagttgtgtgtatcttctggtgtgtggctaaaaacctatgagcttagtgtggctcaaagcatttttaattcagacagaaaacagagaaaattccgtacttttattatttcatgaataaaaaagagttgattt

SEQ ID NO: 72540 - protein, 152 aa, Arabidopsis thaliana; identical to SEQ ID NO: 22423
  peptide (1)..(152): Ceres Seq. ID no. 4936735
  misc_feature (2)..(152): Pfam Name: Copper/zinc superoxide dismutase (SODC) Pfam Description: Copper/zinc superoxide dismutase (SODC)
  misc_feature (1)..(152): Homolog of NCBI NO: 15223944 NR Description: copper/zinc superoxidase dismutase (CSD1); id: At1g08830.1, supported by cDNA: 33493., supported by cDNA:
  misc_feature (1)..(146): Homolog of NCBI NO: 9802567 NR Description: F22O13.32 [Arabidopsis thaliana]
  misc_feature (1)..(152): Homolog of NCBI NO: 2305111 NR Description: Cu/Zn superoxide dismutase [Raphanus sativus]
  misc_feature (1)..(152): Homolog of NCBI NO: 3288850 NR Description: cytosolic Cu/Zn superoxide dismutase [Brassica
  misc_feature (1)..(152): Homolog of NCBI NO: 24421235 NR Description: superoxide dismutase [Brassica juncea]
  misc_feature (1)..(152): Homolog of NCBI NO: 12230586 NR Description: Superoxide dismutase [Cu-Zn] 1
  misc_feature (2)..(152): Homolog of NCBI NO: 134602 NR Description: SUPEROXIDE DISMUTASE [CU-ZN] >gi|66373|pir||DSRPZC
  misc_feature (1)..(152): Homolog of NCBI NO: 12230587 NR Description: Superoxide dismutase [Cu-Zn] 2
  misc_feature (1)..(152): Homolog of NCBI NO: 4102861 NR Description: copper/zinc-superoxide dismutase [Populus
  misc_feature (1)..(152): Homolog of NCBI NO: 4102859 NR Description: cytoplasmic superoxide dismutase 1 [Populus

SEQ ID NO: 72541 - protein, 96 aa, Arabidopsis thaliana; identical to SEQ ID NO: 22424
  peptide (1)..(96): Ceres Seq. ID no. 4936736
  misc_feature (1)..(96): Pfam Name: Copper/zinc superoxide dismutase (SODC) Pfam Description: Copper/zinc superoxide dismutase (SODC)
  misc_feature (1)..(96): Homolog of NCBI NO: 15223944 NR Description: copper/zinc superoxidase dismutase (CSD1); id: At1g08830.1, supported by cDNA: 33493., supported by cDNA:
  misc_feature (1)..(90): Homolog of NCBI NO: 9802567 NR Description: F22O13.32 [Arabidopsis thaliana]
  misc_feature (1)..(96): Homolog of NCBI NO: 2305111 NR Description: Cu/Zn superoxide dismutase [Raphanus sativus]
  misc_feature (1)..(96): Homolog of NCBI NO: 3288850 NR Description: cytosolic Cu/Zn superoxide dismutase [Brassica
  misc_feature (1)..(96): Homolog of NCBI NO: 24421235 NR Description: superoxide dismutase [Brassica juncea]
  misc_feature (1)..(96): Homolog of NCBI NO: 12230586 NR Description: Superoxide dismutase [Cu-Zn] 1
  misc_feature (1)..(96): Homolog of NCBI NO: 134602 NR Description: SUPEROXIDE DISMUTASE [CU-ZN] >gi|66373|pir||DSRPZC
  misc_feature (1)..(96): Homolog of NCBI NO: 12230587 NR Description: Superoxide dismutase [Cu-Zn] 2
  misc_feature (1)..(96): Homolog of NCBI NO: 4102861 NR Description: copper/zinc-superoxide dismutase [Populus
  misc_feature (1)..(96): Homolog of NCBI NO: 4102859 NR Description: cytoplasmic superoxide dismutase 1 [Populus

SEQ ID NO: 72542 - DNA, 510 bp, Arabidopsis thaliana
  misc_feature (1)..(510): Ceres Seq. ID no. 4936965
  misc_feature: MA Experiment ID: 20000180 Result: Up-regulated in Transcription
  misc_feature: MA Experiment 20000180 PARAMETER Experiment Name: At_Germinating_Seeds_P Parameter: Age (hr) Value: 24 vs. 0
  misc_feature: MA Experiment 20000180 PARAMETER Experiment Name: At_Germinating_Seeds_P Parameter: Tissue Value: Germinating Seeds
  misc_feature: MA Experiment ID: 20000185 Result: Down-regulated in Transcription
  misc_feature: MA Experiment 20000185 PARAMETER Experiment Name: At_Roots__P Parameter: Age (day) Value: 7 vs. 21
  misc_feature: MA Experiment 20000185 PARAMETER Experiment Name: At_Roots__P Parameter: Organism Value: A. thaliana
  misc_feature: MA Experiment 20000185 PARAMETER Experiment Name: At_Roots__P Parameter: Tissue Value: Roots vs. Whole Plant
  misc_feature: MA Experiment ID: 20000438 Result: Down-regulated in Transcription
  misc_feature: MA Experiment 20000438 PARAMETER Experiment Name: At_Shoots__P Parameter: Age (day) Value: 14
  misc_feature: MA Experiment 20000438 PARAMETER Experiment Name: At_Shoots__P Parameter: Tissue Value: Shoots vs. Whole Plant
  misc_feature: MA Experiment ID: 20000495 Result: Up-regulated in Transcription
  misc_feature: MA Experiment 20000495 PARAMETER Experiment Name: At_Guard_Cells_P Parameter: Harvest Date Value: 8/2/2002
  misc_feature: MA Experiment 20000495 PARAMETER Experiment Name: At_Guard_Cells_P Parameter: Organism Value: A. thaliana
  misc_feature: MA Experiment 20000495 PARAMETER Experiment Name: At_Guard_Cells_P Parameter: Tissue Value: Guard Cells vs. Leaves
  misc_feature: MA Experiment ID: 20001773 Result: Up-regulated in Transcription
  misc_feature: MA Experiment 20001773 PARAMETER Experiment Name: At_Far-red-enriched-adult_P Parameter: Age (day) Value: 30
  misc_feature: MA Experiment 20001773 PARAMETER Experiment Name: At_Far-red-enriched-adult_P Parameter: Light Value: Far-red enriched vs. White
  misc_feature: MA Experiment 20001773 PARAMETER Experiment Name: At_Far-red-enriched-adult_P Parameter: Organism Value: A. thaliana
  misc_feature: MA Experiment 20001773 PARAMETER Experiment Name: At_Far-red-enriched-adult_P Parameter: Plant Line Value: Columbia
  misc_feature: MA Experiment 20001773 PARAMETER Experiment Name: At_Far-red-enriched-adult_P Parameter: Timepoint (hr) Value: 48
  misc_feature: MA Experiment 20001773 PARAMETER Experiment Name: At_Far-red-enriched-adult_P Parameter: Tissue Value: Aerial
  misc_feature: MA Experiment ID: 20001905 Result: Down-regulated in Transcription
  misc_feature: MA Experiment 20001905 PARAMETER Experiment Name: At_Drought_Reproduction_P Parameter: Age (day) Value: 40
  misc_feature: MA Experiment 20001905 PARAMETER Experiment Name: At_Drought_Reproduction_P Parameter: Organism Value: A. thaliana
  misc_feature: MA Experiment 20001905 PARAMETER Experiment Name: At_Drought_Reproduction_P Parameter: Plant Line Value: WS
  misc_feature: MA Experiment 20001905 PARAMETER Experiment Name: At_Drought_Reproduction_P Parameter: Timepoint (day) Value: 10
  misc_feature: MA Experiment 20001905 PARAMETER Experiment Name: At_Drought_Reproduction_P Parameter: Tissue Value: Rosettes
  misc_feature: MA Experiment 20001905 PARAMETER Experiment Name: At_Drought_Reproduction_P Parameter: Treatment Value: Drought vs. No Drought
  misc_feature: MA Experiment ID: 20001906 Result: Down-regulated in Transcription
  misc_feature: MA Experiment 20001906 PARAMETER Experiment Name: At_Drought_Reproduction_P Parameter: Age (day) Value: 35
  misc_feature: MA Experiment 20001906 PARAMETER Experiment Name: At_Drought_Reproduction_P Parameter: Organism Value: A. thaliana
  misc_feature: MA Experiment 20001906 PARAMETER Experiment Name: At_Drought_Reproduction_P Parameter: Plant Line Value: WS
  misc_feature: MA Experiment 20001906 PARAMETER Experiment Name: At_Drought_Reproduction_P Parameter: Timepoint (day) Value: 5
  misc_feature: MA Experiment 20001906 PARAMETER Experiment Name: At_Drought_Reproduction_P Parameter: Tissue Value: Siliques
  misc_feature: MA Experiment 20001906 PARAMETER Experiment Name: At_Drought_Reproduction_P Parameter: Treatment Value: Drought vs. No Drought
  misc_feature: MA Experiment ID: 20001908 Result: Down-regulated in Transcription
  misc_feature: MA Experiment 20001908 PARAMETER Experiment Name: At_Drought_Reproduction_P Parameter: Age (day) Value: 40
  misc_feature: MA Experiment 20001908 PARAMETER Experiment Name: At_Drought_Reproduction_P Parameter: Organism Value: A. thaliana
  misc_feature: MA Experiment 20001908 PARAMETER Experiment Name: At_Drought_Reproduction_P Parameter: Plant Line Value: WS
  misc_feature: MA Experiment 20001908 PARAMETER Experiment Name: At_Drought_Reproduction_P Parameter: Timepoint (day) Value: 10
  misc_feature: MA Experiment 20001908 PARAMETER Experiment Name: At_Drought_Reproduction_P Parameter: Tissue Value: Siliques
  misc_feature: MA Experiment 20001908 PARAMETER Experiment Name: At_Drought_Reproduction_P Parameter: Treatment Value: Drought vs. No Drought
  misc_feature: MA Experiment ID: 20001911 Result: Down-regulated in Transcription
  misc_feature: MA Experiment 20001911 PARAMETER Experiment Name: At_Drought_Reproduction_P Parameter: Age (day) Value: 40
  misc_feature: MA Experiment 20001911 PARAMETER Experiment Name: At_Drought_Reproduction_P Parameter: Organism Value: A. thaliana
  misc_feature: MA Experiment 20001911 PARAMETER Experiment Name: At_Drought_Reproduction_P Parameter: Plant Line Value: WS
  misc_feature: MA Experiment 20001911 PARAMETER Experiment Name: At_Drought_Reproduction_P Parameter: Timepoint (day) Value: 10
  misc_feature: MA Experiment 20001911 PARAMETER Experiment Name: At_Drought_Reproduction_P Parameter: Tissue Value: Flowers
  misc_feature: MA Experiment 20001911 PARAMETER Experiment Name: At_Drought_Reproduction_P Parameter: Treatment Value: Drought vs. No Drought
atggatgttcttatcttcaactcgtggcactggtggactcacacctccggacttcagccctgggattatatgagggaaggaaaccaattgtacaaagacatgaacaggcttgtggcttattacaaaggacttaacacatgggctcgttggattaacaataacattgtcccttcacgtactcaagtcttctttcaaggtgtttctcctgtccactatgacggaagagagtggaacgaaccattgaagtcgtgcaatggtcaaactcagccgttcatgggacaaagatatccaggaggattgcccttaggttgggttgtggttaacaaagtgttgagccgaattagaaaaccggtccatcttctcgatctcactactctctcggagtatcgcaaagacgcacatccaagtctctacaatggtatctcaaaggatctagactgtagccattggtgcctccctggactccctgatacttggaacttacttctctactcatctcttacttcctag

SEQ ID NO: 72543 - protein, 169 aa, Arabidopsis thaliana
  peptide (1)..(169): Ceres Seq. ID no. 4936966
  misc_feature (1)..(169): Homolog of NCBI NO: 15224614 NR Description: hypothetical protein; protein id: At2g31110.1
  misc_feature (1)..(169): Homolog of NCBI NO: 21593142 NR Description: unknown [Arabidopsis thaliana]
  misc_feature (1)..(169): Homolog of NCBI NO: 28393769 NR Description: unknown protein [Arabidopsis thaliana]
  misc_feature (1)..(169): Homolog of NCBI NO: 18406003 NR Description: expressed protein; protein id: At2g42570.1, by cDNA: 17752., supported by cDNA: gi_14334589, supported by
  misc_feature (1)..(168): Homolog of NCBI NO: 18396930 NR Description: expressed protein; protein id: At1g29050.1, by cDNA: 30068., supported by cDNA: gi_18377637, supported by gi_20465654 [Arabidopsis thaliana] >gi|18377638|gb|AAL66969.1|
  misc_feature (1)..(168): Homolog of NCBI NO: 25366741 NR Description: F28N24.24 protein - Arabidopsis thaliana
  misc_feature (1)..(168): Homolog of NCBI NO: 18403435 NR Description: expressed protein; protein id: At2g34070.1, by cDNA: 25519. [Arabidopsis thaliana] expressed protein [Arabidopsis thaliana]
  misc_feature (2)..(167): Homolog of NCBI NO: 34911864 NR Description: OSJNBb0032K15.9 [Oryza sativa (japonica
  misc_feature (2)..(169): Homolog of NCBI NO: 15219157 NR Description: hypothetical protein; protein id: At1g78710.1
  misc_feature (2)..(168): Homolog of NCBI NO: 34904010 NR Description: unnamed protein product [Oryza sativa (japonica group)] >gi|7523484|dbj|BAA94212.1| unnamed protein product
MDVLIFNSWHWWTHTSGLQPWDYMREGNQLYKDMNRLVAYYKGLNTWARWINNNIVPSRTQVFFQGVSPVHYDGREWNEPLKSCNGQTQPFMGQRYPGGLPLGWVVVNKVLSRIRKPVHLLDLTTLSEYRKDAHPSLYNGISKDLDCSHWCLPGLPDTWNLLLYSSLTS

SEQ ID NO: 72544 - protein, 146 aa, Arabidopsis thaliana
  peptide (1)..(146): Ceres Seq. ID no. 4936967
  misc_feature (1)..(146): Homolog of NCBI NO: 15224614 NR Description: hypothetical protein; protein id: At2g31110.1
  misc_feature (1)..(146): Homolog of NCBI NO: 28393769 NR Description: unknown protein [Arabidopsis thaliana]
  misc_feature (1)..(146): Homolog of NCBI NO: 21593142 NR Description: unknown [Arabidopsis thaliana]
  misc_feature (1)..(146): Homolog of NCBI NO: 18406003 NR Description: expressed protein; protein id: At2g42570.1, by cDNA: 17752., supported by cDNA: gi_14334589, supported by
  misc_feature (1)..(145): Homolog of NCBI NO: 18396930 NR Description: expressed protein; protein id: At1g29050.1, by cDNA: 30068., supported by cDNA: gi_18377637, supported by gi_20465654 [Arabidopsis thaliana] >gi|18377638|gb|AAL66969.1|
  misc_feature (1)..(145): Homolog of NCBI NO: 25366741 NR Description: F28N24.24 protein - Arabidopsis thaliana
  misc_feature (1)..(145): Homolog of NCBI NO: 18403435 NR Description: expressed protein; protein id: At2g34070.1, by cDNA: 25519. [Arabidopsis thaliana] expressed protein [Arabidopsis thaliana]
  misc_feature (1)..(144): Homolog of NCBI NO: 34911864 NR Description: OSJNBb0032K15.9 [Oryza sativa (japonica
  misc_feature (1)..(146): Homolog of NCBI NO: 15219157 NR Description: hypothetical protein; protein id: At1g78710.1
  misc_feature (1)..(145): Homolog of NCBI NO: 34904010 NR Description: unnamed protein product [Oryza sativa (japonica group)] >gi|7523484|dbj|BAA94212.1| unnamed protein product
MREGNQLYKDMNRLVAYYKGLNTWARWINNNIVPSRTQVFFQGVSPVHYDGREWNEPLKSCNGQTQPFMGQRYPGGLPLGWVVVNKVLSRIRKPVHLLDLTTLSEYRKDAHPSLYNGISKDLDCSHWCLPGLPDTWNLLLYSSLTS

SEQ ID NO: 72545 - protein, 136 aa, Arabidopsis thaliana
  peptide (1)..(136): Ceres Seq. ID no. 4936968
  misc_feature (1)..(136): Homolog of NCBI NO: 15224614 NR Description: hypothetical protein; protein id: At2g31110.1
  misc_feature (1)..(136): Homolog of NCBI NO: 28393769 NR Description: unknown protein [Arabidopsis thaliana]
  misc_feature (1)..(136): Homolog of NCBI NO: 21593142 NR Description: unknown [Arabidopsis thaliana]
  misc_feature (1)..(136): Homolog of NCBI NO: 18406003 NR Description: expressed protein; protein id: At2g42570.1, by cDNA: 17752., supported by cDNA: gi_14334589, supported by
  misc_feature (1)..(135): Homolog of NCBI NO: 18396930 NR Description: expressed protein; protein id: At1g29050.1, by cDNA: 30068., supported by cDNA: gi_18377637, supported by gi_20465654 [Arabidopsis thaliana] >gi|18377638|gb|AAL66969.1|
  misc_feature (1)..(135): Homolog of NCBI NO: 25366741 NR Description: F28N24.24 protein - Arabidopsis thaliana
  misc_feature (1)..(135): Homolog of NCBI NO: 18403435 NR Description: expressed protein; protein id: At2g34070.1, by cDNA: 25519. [Arabidopsis thaliana] expressed protein [Arabidopsis thaliana]
  misc_feature (1)..(134): Homolog of NCBI NO: 34911864 NR Description: OSJNBb0032K15.9 [Oryza sativa (japonica
  misc_feature (1)..(136): Homolog of NCBI NO: 15219157 NR Description: hypothetical protein; protein id: At1g78710.1
  misc_feature (1)..(135): Homolog of NCBI NO: 34904010 NR Description: unnamed protein product [Oryza sativa (japonica group)] >gi|7523484|dbj|BAA94212.1| unnamed protein product
MNRLVAYYKGLNTWARWINNNIVPSRTQVFFQGVSPVHYDGREWNEPLKSCNGQTQPFMGQRYPGGLPLGWVVVNKVLSRIRKPVHLLDLTTLSEYRKDAHPSLYNGISKDLDCSHWCLPGLPDTWNLLLYSSLTS

SEQ ID NO: 72546 - DNA, 1587 bp, Arabidopsis thaliana
  misc_feature (1)..(1587): Ceres Seq. ID no. 4937167
  misc_feature: MA Experiment ID: 20000184 Result: Down-regulated in Transcription
  misc_feature: MA Experiment 20000184 PARAMETER Experiment Name: At_Shoots__P Parameter: Age (day) Value: 7
  misc_feature: MA Experiment 20000184 PARAMETER Experiment Name: At_Shoots__P Parameter: Tissue Value: Shoots vs. Whole Plant
  misc_feature: MA Experiment ID: 20000286 Result: Down-regulated in Transcription
  misc_feature: MA Experiment 20000286 PARAMETER Experiment Name: At_Open_Flower_P Parameter: Age (day) Value: 21
  misc_feature: MA Experiment 20000286 PARAMETER Experiment Name: At_Open_Flower_P Parameter: Plant Line Value: WS
  misc_feature: MA Experiment 20000286 PARAMETER Experiment Name: At_Open_Flower_P Parameter: Tissue Value: Half Open vs. Whole Plant
atggtttcgccgtcagagatgacggagacggcaccggcaattatgacaacggaaagcgaaaggatagagagttcgagggaactcgtggataatgaagaggaggagaaaatacgccgtcagaagaagctcgaagaagctctcgaagccaaatctcttcgccgcattatcagtgcttacctcaattacccagaggcttcggaagaggatttgaaaagatgggaaagatcatatcggaagctgtctcctgcacacaaggcattggtaccccattaccctatgaagtttcagagattaagaaggtgtatatcggcgaattcatatttcatatttaatatgcttcaggcttttgagcctcctatagacttgagtcaggaacttgatggttgtgaagactcaaatcttgactgcgctccacatgagagatacactctagatgaaaggcacgactcttcttgtcagccggccttgaccaatagttgtacatataaggaagaaagcaaacacattcgtgacccaataacaggagtgtctatcgaggagcttcagaggaaagaagctcatgatcattctcccaaggatgactctgcagacacaagaatcaacgataagacatgtgattgtcatgaaggccagttaaatcatgaccatggcagtgtatcattttcatcccatgattggttggattcatcgttacagacacatgttcctctggttgatgtagataagcgtgagacaaagatcattatgtgtcatgttagaacttattctcaatctctattagttccattaggcagtttggttcgttgtattataaggaatattgttcgagactgggcagcagagggtcagagagaacgagatcaatgctacaagcctatccttgaagagcttgattccttgtttcctgaccgtttgaaggagagcacccctcctgcctgtttagtccctggtgctggacttggacgtctggcccttgaaatttcttgtctaggtttcataagccaaggaaatgaattttcatactacatgatgatatgctcaagttttattctgaattatacacaagtccctggtgagtggacaatatacccctggatacacagcaactgcaattcgctctcggacaatgatcagctacgccctattgcgattcctgatattcatcctgcaagtgcaggaataacagaaggtttctctatgtgtggtggtgattttgttgaagtatacaatgaatcaagtcatgcaggaatgtgggatgcagttgttacttgctttttcatcgacactgctcataatgtcatcgagtacattcaaaccatatccaagatcctaaaagatggaggagtttggataaatttaggacctctgttgtatcattttgcggacacatatggccatgaaaatgaaatgtctatcgagctaagtttggaggatgtaaagagggttgcttcacattttgggtttgtgatcgagaaagaaagaacaattgaaacaacttacactacaaatccccgggctatgatgcagaaccgatactatactgccttctggacaatgaggaagaaatgtgctataacaacaacttaa

SEQ ID NO: 72547 - protein, 528 aa, Arabidopsis thaliana
  peptide (1)..(528): Ceres Seq. ID no. 4937168
  misc_feature (251)..(528): Homolog of NCBI NO: 30685200 NR Description: expressed protein [Arabidopsis thaliana]
  misc_feature (1)..(169): Homolog of NCBI NO: 30685200 NR Description: expressed protein [Arabidopsis thaliana]
  misc_feature (261)..(528): Homolog of NCBI NO: 25349707 NR Description: hypothetical protein At2g32160 [imported] - thaliana >gi|4263703|gb|AAD15389.1| hypothetical protein
  misc_feature (219)..(242): Homolog of NCBI NO: 25349707 NR Description: hypothetical protein At2g32160 [imported] - thaliana >gi|4263703|gb|AAD15389.1| hypothetical protein
  misc_feature (251)..(494): Homolog of NCBI NO: 30685195 NR Description: expressed protein [Arabidopsis thaliana]
  misc_feature (1)..(169): Homolog of NCBI NO: 30685195 NR Description: expressed protein [Arabidopsis thaliana]
  misc_feature (214)..(528): Homolog of NCBI NO: 30685202 NR Description: expressed protein [Arabidopsis thaliana] unknown protein [Arabidopsis thaliana]
  misc_feature (166)..(242): Homolog of NCBI NO: 30685200 NR Description: expressed protein [Arabidopsis thaliana]
  misc_feature (1)..(242): Homolog of NCBI NO: 30685202 NR Description: expressed protein [Arabidopsis thaliana] unknown protein [Arabidopsis thaliana]
  misc_feature (166)..(242): Homolog of NCBI NO: 30685195 NR Description: expressed protein [Arabidopsis thaliana]
MVSPSEMTETAPAIMTTESERIESSRELVDNEEEEKIRRQKKLEEALEAKSLRRIISAYLNYPEASEEDLKRWERSYRKLSPAHKALVPHYPMKFQRLRRCISANSYFIFNMLQAFEPPIDLSQELDGCEDSNLDCAPHERYTLDERHDSSCQPALTNSCTYKEESKHIRDPITGVSIEELQRKEAHDHSPKDDSADTRINDKTCDCHEGQLNHDHGSVSFSSHDWLDSSLQTHVPLVDVDKRETKIIMCHVRTYSQSLLVPLGSLVRCIIRNIVRDWAAEGQRERDQCYKPILEELDSLFPDRLKESTPPACLVPGAGLGRLALEISCLGFISQGNEFSYYMMICSSFILNYTQVPGEWTIYPWIHSNCNSLSDNDQLRPIAIPDIHPASAGITEGFSMCGGDFVEVYNESSHAGMWDAVVTCFFIDTAHNVIEYIQTISKILKDGGVWINLGPLLYHFADTYGHENEMSIELSLEDVKRVASHFGFVIEKERTIETTYTTNPRAMMQNRYYTAFWTMRKKCAITTT

SEQ ID NO: 72548 - protein, 522 aa, Arabidopsis thaliana
  peptide (1)..(522): Ceres Seq. ID no. 4937169
  misc_feature (245)..(522): Homolog of NCBI NO: 30685200 NR Description: expressed protein [Arabidopsis thaliana]
  misc_feature (1)..(163): Homolog of NCBI NO: 30685200 NR Description: expressed protein [Arabidopsis thaliana]
  misc_feature (255)..(522): Homolog of NCBI NO: 25349707 NR Description: hypothetical protein At2g32160 [imported] - thaliana >gi|4263703|gb|AAD15389.1| hypothetical protein
  misc_feature (213)..(236): Homolog of NCBI NO: 25349707 NR Description: hypothetical protein At2g32160 [imported] - thaliana >gi|4263703|gb|AAD15389.1| hypothetical protein
  misc_feature (245)..(488): Homolog of NCBI NO: 30685195 NR Description: expressed protein [Arabidopsis thaliana]
  misc_feature (1)..(163): Homolog of NCBI NO: 30685195 NR Description: expressed protein [Arabidopsis thaliana]
  misc_feature (208)..(522): Homolog of NCBI NO: 30685202 NR Description: expressed protein [Arabidopsis thaliana] unknown protein [Arabidopsis thaliana]
  misc_feature (160)..(236): Homolog of NCBI NO: 30685200 NR Description: expressed protein [Arabidopsis thaliana]
  misc_feature (1)..(236): Homolog of NCBI NO: 30685202 NR Description: expressed protein [Arabidopsis thaliana] unknown protein [Arabidopsis thaliana]
  misc_feature (160)..(236): Homolog of NCBI NO: 30685195 NR Description: expressed protein [Arabidopsis thaliana]
MTETAPAIMTTESERIESSRELVDNEEEEKIRRQKKLEEALEAKSLRRIISAYLNYPEASEEDLKRWERSYRKLSPAHKALVPHYPMKFQRLRRCISANSYFIFNMLQAFEPPIDLSQELDGCEDSNLDCAPHERYTLDERHDSSCQPALTNSCTYKEESKHIRDPITGVSIEELQRKEAHDHSPKDDSADTRINDKTCDCHEGQLNHDHGSVSFSSHDWLDSSLQTHVPLVDVDKRETKIIMCHVRTYSQSLLVPLGSLVRCIIRNIVRDWAAEGQRERDQCYKPILEELDSLFPDRLKESTPPACLVPGAGLGRLALEISCLGFISQGNEFSYYMMICSSFILNYTQVPGEWTIYPWIHSNCNSLSDNDQLRPIAIPDIHPASAGITEGFSMCGGDFVEVYNESSHAGMWDAVVTCFFIDTAHNVIEYIQTISKILKDGGVWINLGPLLYHFADTYGHENEMSIELSLEDVKRVASHFGFVIEKERTIETTYTTNPRAMMQNRYYTAFWTMRKKCAITTT

SEQ ID NO: 72549 - protein, 514 aa, Arabidopsis thaliana
  peptide (1)..(514): Ceres Seq. ID no. 4937170
  misc_feature (237)..(514): Homolog of NCBI NO: 30685200 NR Description: expressed protein [Arabidopsis thaliana]
  misc_feature (1)..(155): Homolog of NCBI NO: 30685200 NR Description: expressed protein [Arabidopsis thaliana]
  misc_feature (247)..(514): Homolog of NCBI NO: 25349707 NR Description: hypothetical protein At2g32160 [imported] - thaliana >gi|4263703|gb|AAD15389.1| hypothetical protein
  misc_feature (205)..(228): Homolog of NCBI NO: 25349707 NR Description: hypothetical protein At2g32160 [imported] - thaliana >gi|4263703|gb|AAD15389.1| hypothetical protein
  misc_feature (237)..(480): Homolog of NCBI NO: 30685195 NR Description: expressed protein [Arabidopsis thaliana]
  misc_feature (1)..(155): Homolog of NCBI NO: 30685195 NR Description: expressed protein [Arabidopsis thaliana]
  misc_feature (200)..(514): Homolog of NCBI NO: 30685202 NR Description: expressed protein [Arabidopsis thaliana] unknown protein [Arabidopsis thaliana]
  misc_feature (152)..(228): Homolog of NCBI NO: 30685200 NR Description: expressed protein [Arabidopsis thaliana]
  misc_feature (1)..(228): Homolog of NCBI NO: 30685202 NR Description: expressed protein [Arabidopsis thaliana] unknown protein [Arabidopsis thaliana]
  misc_feature (152)..(228): Homolog of NCBI NO: 30685195 NR Description: expressed protein [Arabidopsis thaliana]
MTTESERIESSRELVDNEEEEKIRRQKKLEEALEAKSLRRIISAYLNYPEASEEDLKRWERSYRKLSPAHKALVPHYPMKFQRLRRCISANSYFIFNMLQAFEPPIDLSQELDGCEDSNLDCAPHERYTLDERHDSSCQPALTNSCTYKEESKHIRDPITGVSIEELQRKEAHDHSPKDDSADTRINDKTCDCHEGQLNHDHGSVSFSSHDWLDSSLQTHVPLVDVDKRETKIIMCHVRTYSQSLLVPLGSLVRCIIRNIVRDWAAEGQRERDQCYKPILEELDSLFPDRLKESTPPACLVPGAGLGRLALEISCLGFISQGNEFSYYMMICSSFILNYTQVPGEWTIYPWIHSNCNSLSDNDQLRPIAIPDIHPASAGITEGFSMCGGDFVEVYNESSHAGMWDAVVTCFFIDTAHNVIEYIQTISKILKDGGVWINLGPLLYHFADTYGHENEMSIELSLEDVKRVASHFGFVIEKERTIETTYTTNPRAMMQNRYYTAFWTMRKKCAITTT

SEQ ID NO: 72550 - DNA, 513 bp, Arabidopsis thaliana
  misc_feature (1)..(513): Ceres Seq. ID no. 4937246
  misc_feature: MA Experiment ID: 20000179 Result: Up-regulated in Transcription
  misc_feature: MA Experiment 20000179 PARAMETER Experiment Name: At_Germinating_Seeds_P Parameter: Age (hr) Value: 6 vs. 0
  misc_feature: MA Experiment 20000179 PARAMETER Experiment Name: At_Germinating_Seeds_P Parameter: Tissue Value: Germinating Seeds
  misc_feature: MA Experiment ID: 20000180 Result: Up-regulated in Transcription
  misc_feature: MA Experiment 20000180 PARAMETER Experiment Name: At_Germinating_Seeds_P Parameter: Age (hr) Value: 24 vs. 0
  misc_feature: MA Experiment 20000180 PARAMETER Experiment Name: At_Germinating_Seeds_P Parameter: Tissue Value: Germinating Seeds
  misc_feature: MA Experiment ID: 20000184 Result: Down-regulated in Transcription
  misc_feature: MA Experiment 20000184 PARAMETER Experiment Name: At_Shoots__P Parameter: Age (day) Value: 7
  misc_feature: MA Experiment 20000184 PARAMETER Experiment Name: At_Shoots__P Parameter: Tissue Value: Shoots vs. Whole Plant
  misc_feature: MA Experiment ID: 20000185 Result: Down-regulated in Transcription
  misc_feature: MA Experiment 20000185 PARAMETER Experiment Name: At_Roots__P Parameter: Age (day) Value: 7 vs. 21
  misc_feature: MA Experiment 20000185 PARAMETER Experiment Name: At_Roots__P Parameter: Organism Value: A. thaliana
  misc_feature: MA Experiment 20000185 PARAMETER Experiment Name: At_Roots__P Parameter: Tissue Value: Roots vs. Whole Plant
  misc_feature: MA Experiment ID: 20000439 Result: Down-regulated in Transcription
  misc_feature: MA Experiment 20000439 PARAMETER Experiment Name: At_Roots__P Parameter: Age (day) Value: 14 vs. 21
  misc_feature: MA Experiment 20000439 PARAMETER Experiment Name: At_Roots__P Parameter: Organism Value: A. thaliana
  misc_feature: MA Experiment 20000439 PARAMETER Experiment Name: At_Roots__P Parameter: Tissue Value: Roots vs. Whole Plant
  misc_feature: MA Experiment ID: 20001451 Result: Down-regulated in Transcription
  misc_feature: MA Experiment 20001451 PARAMETER Experiment Name: At_Far-red-induction_P Parameter: Age (day) Value: 7
  misc_feature: MA Experiment 20001451 PARAMETER Experiment Name: At_Far-red-induction_P Parameter: Light Value: Far-red vs. White
  misc_feature: MA Experiment 20001451 PARAMETER Experiment Name: At_Far-red-induction_P Parameter: Organism Value: A. thaliana
  misc_feature: MA Experiment 20001451 PARAMETER Experiment Name: At_Far-red-induction_P Parameter: Plant Line Value: Columbia
  misc_feature: MA Experiment 20001451 PARAMETER Experiment Name: At_Far-red-induction_P Parameter: Timepoint (hr) Value: 24
  misc_feature: MA Experiment 20001451 PARAMETER Experiment Name: At_Far-red-induction_P Parameter: Tissue Value: Whole Plant
  misc_feature: MA Experiment ID: 20001557 Result: Down-regulated in Transcription
  misc_feature: MA Experiment 20001557 PARAMETER Experiment Name: At_Drought_Soil_Dry_P Parameter: Age (day) Value: 27
  misc_feature: MA Experiment 20001557 PARAMETER Experiment Name: At_Drought_Soil_Dry_P Parameter: Organism Value: A. thaliana
  misc_feature: MA Experiment 20001557 PARAMETER Experiment Name: At_Drought_Soil_Dry_P Parameter: Plant Line Value: WS
  misc_feature: MA Experiment 20001557 PARAMETER Experiment Name: At_Drought_Soil_Dry_P Parameter: Post Timepoint (hr) Value: 3
  misc_feature: MA Experiment 20001557 PARAMETER Experiment Name: At_Drought_Soil_Dry_P Parameter: Post-Treatment Value: Re-Water vs. No Drought
  misc_feature: MA Experiment 20001557 PARAMETER Experiment Name: At_Drought_Soil_Dry_P Parameter: Timepoint (day) Value: 13
  misc_feature: MA Experiment 20001557 PARAMETER Experiment Name: At_Drought_Soil_Dry_P Parameter: Treatment Value: Drought vs. No Drought
  misc_feature: MA Experiment ID: 20001905 Result: Down-regulated in Transcription
  misc_feature: MA Experiment 20001905 PARAMETER Experiment Name: At_Drought_Reproduction_P Parameter: Age (day) Value: 40
  misc_feature: MA Experiment 20001905 PARAMETER Experiment Name: At_Drought_Reproduction_P Parameter: Organism Value: A. thaliana
  misc_feature: MA Experiment 20001905 PARAMETER Experiment Name: At_Drought_Reproduction_P Parameter: Plant Line Value: WS
  misc_feature: MA Experiment 20001905 PARAMETER Experiment Name: At_Drought_Reproduction_P Parameter: Timepoint (day) Value: 10
  misc_feature: MA Experiment 20001905 PARAMETER Experiment Name: At_Drought_Reproduction_P Parameter: Tissue Value: Rosettes
  misc_feature: MA Experiment 20001905 PARAMETER Experiment Name: At_Drought_Reproduction_P Parameter: Treatment Value: Drought vs. No Drought
atgacaaatgctgttggtaaagccttgttctctaaagcaggggagctttgtgtgcctgttggcttcatgtgcatgaagggtctagatcttcacattgcagaaattgaggaactttgcacagaatttccaaagacaactgttttactagatcacgctggattctgcaaagtaccagaaagtggtgaggcaaagcttgcttattctcaactcatgaagctgtctagatttccacaggtatatgtgaaattcagtgctctattcaggatctcaagaaccggcttcccgtatcaggacctatcgcctctcctatctcaacttgtgtcccattttggggcaaatcgtgtcatgtggggcagtgacttcccatttgttgttcttgaatgtggatataaagaagctaaagaagctgtgactatcattgcaaaagaagcatccttgtcaagttctgagatggactggattctgggaaagactctgatgcagctcttccctggacaatgggttcttccttga

SEQ ID NO: 72551 - protein, 170 aa, Arabidopsis thaliana
  peptide (1)..(170): Ceres Seq. ID no. 4937247
  misc_feature (31)..(132): Pfam Name: Amidohydrolase Pfam Description: Amidohydrolase
  misc_feature (1)..(170): Homolog of NCBI NO: 25370785 NR Description: hypothetical protein At2g35440 [imported] - thaliana >gi|3608144|gb|AAC36177.1| unknown protein [Arabidopsis
  misc_feature (1)..(170): Homolog of NCBI NO: 30686415 NR Description: expressed protein [Arabidopsis thaliana]
  misc_feature (1)..(170): Homolog of NCBI NO: 34146876 NR Description: At2g35450 [Arabidopsis thaliana]
  misc_feature (31)..(132): Homolog of NCBI NO: 21233488 NR Description: conserved hypothetical protein [Xanthomonas pv. campestris str. ATCC 33913] >gi|21115337|gb|AAM43287.1| hypothetical protein [Xanthomonas campestris pv. campestris str.
  misc_feature (30)..(143): Homolog of NCBI NO: 21244902 NR Description: conserved hypothetical protein [Xanthomonas pv. citri str. 306] >gi|21110614|gb|AAM39020.1| conserved
  misc_feature (27)..(124): Homolog of NCBI NO: 27377369 NR Description: blr2258 [Bradyrhizobium japonicum]
  misc_feature (41)..(158): Homolog of NCBI NO: 21225440 NR Description: conserved hypothetical protein [Streptomyces A3(2)] >gi|9716980|emb|CAC01649.1| conserved hypothetical protein
  misc_feature (31)..(156): Homolog of NCBI NO: 22986649 NR Description: hypothetical protein [Burkholderia fungorum]
  misc_feature (41)..(158): Homolog of NCBI NO: 29827946 NR Description: hypothetical protein [Streptomyces avermitilis
MTNAVGKALFSKAGELCVPVGFMCMKGLDLHIAEIEELCTEFPKTTVLLDHAGFCKVPESGEAKLAYSQLMKLSRFPQVYVKFSALFRISRTGFPYQDLSPLLSQLVSHFGANRVMWGSDFPFVVLECGYKEAKEAVTIIAKEASLSSSEMDWILGKTLMQLFPGQWVLP

SEQ ID NO: 72552 - protein, 148 aa, Arabidopsis thaliana
  peptide (1)..(148): Ceres Seq. ID no. 4937248
  misc_feature (9)..(110): Pfam Name: Amidohydrolase Pfam Description: Amidohydrolase
  misc_feature (1)..(148): Homolog of NCBI NO: 25370785 NR Description: hypothetical protein At2g35440 [imported] - thaliana >gi|3608144|gb|AAC36177.1| unknown protein [Arabidopsis
  misc_feature (1)..(148): Homolog of NCBI NO: 30686415 NR Description: expressed protein [Arabidopsis thaliana]
  misc_feature (1)..(148): Homolog of NCBI NO: 34146876 NR Description: At2g35450 [Arabidopsis thaliana]
  misc_feature (9)..(110): Homolog of NCBI NO: 21233488 NR Description: conserved hypothetical protein [Xanthomonas pv. campestris str. ATCC 33913] >gi|21115337|gb|AAM43287.1| hypothetical protein [Xanthomonas campestris pv. campestris str.
  misc_feature (8)..(121): Homolog of NCBI NO: 21244902 NR Description: conserved hypothetical protein [Xanthomonas pv. citri str. 306] >gi|21110614|gb|AAM39020.1| conserved
  misc_feature (5)..(102): Homolog of NCBI NO: 27377369 NR Description: blr2258 [Bradyrhizobium japonicum]
  misc_feature (19)..(136): Homolog of NCBI NO: 21225440 NR Description: conserved hypothetical protein [Streptomyces A3(2)] >gi|9716980|emb|CAC01649.1| conserved hypothetical protein
  misc_feature (9)..(134): Homolog of NCBI NO: 22986649 NR Description: hypothetical protein [Burkholderia fungorum]
  misc_feature (19)..(136): Homolog of NCBI NO: 29827946 NR Description: hypothetical protein [Streptomyces avermitilis
MCMKGLDLHIAEIEELCTEFPKTTVLLDHAGFCKVPESGEAKLAYSQLMKLSRFPQVYVKFSALFRISRTGFPYQDLSPLLSQLVSHFGANRVMWGSDFPFVVLECGYKEAKEAVTIIAKEASLSSSEMDWILGKTLMQLFPGQWVLP

SEQ ID NO: 72553 - protein, 146 aa, Arabidopsis thaliana
  peptide (1)..(146): Ceres Seq. ID no. 4937249
  misc_feature (7)..(108): Pfam Name: Amidohydrolase Pfam Description: Amidohydrolase
  misc_feature (1)..(146): Homolog of NCBI NO: 25370785 NR Description: hypothetical protein At2g35440 [imported] - thaliana >gi|3608144|gb|AAC36177.1| unknown protein [Arabidopsis
  misc_feature (1)..(146): Homolog of NCBI NO: 30686415 NR Description: expressed protein [Arabidopsis thaliana]
  misc_feature (1)..(146): Homolog of NCBI NO: 34146876 NR Description: At2g35450 [Arabidopsis thaliana]
  misc_feature (7)..(108): Homolog of NCBI NO: 21233488 NR Description: conserved hypothetical protein [Xanthomonas pv. campestris str. ATCC 33913] >gi|21115337|gb|AAM43287.1| hypothetical protein [Xanthomonas campestris pv. campestris str.
  misc_feature (6)..(119): Homolog of NCBI NO: 21244902 NR Description: conserved hypothetical protein [Xanthomonas pv. citri str. 306] >gi|21110614|gb|AAM39020.1| conserved
  misc_feature (3)..(100): Homolog of NCBI NO: 27377369 NR Description: blr2258 [Bradyrhizobium japonicum]
  misc_feature (17)..(134): Homolog of NCBI NO: 21225440 NR Description: conserved hypothetical protein [Streptomyces A3(2)] >gi|9716980|emb|CAC01649.1| conserved hypothetical protein
  misc_feature (7)..(132): Homolog of NCBI NO: 22986649 NR Description: hypothetical protein [Burkholderia fungorum]
  misc_feature (17)..(134): Homolog of NCBI NO: 29827946 NR Description: hypothetical protein [Streptomyces avermitilis
MKGLDLHIAEIEELCTEFPKTTVLLDHAGFCKVPESGEAKLAYSQLMKLSRFPQVYVKFSALFRISRTGFPYQDLSPLLSQLVSHFGANRVMWGSDFPFVVLECGYKEAKEAVTIIAKEASLSSSEMDWILGKTLMQLFPGQWVLP

SEQ ID NO: 72554 - DNA, 1413 bp, Arabidopsis thaliana
  misc_feature (1)..(1413): Ceres Seq. ID no. 4937361
  misc_feature: MA Experiment ID: 20000180 Result: Down-regulated in Transcription
  misc_feature: MA Experiment 20000180 PARAMETER Experiment Name: At_Germinating_Seeds_P Parameter: Age (hr) Value: 24 vs. 0
  misc_feature: MA Experiment 20000180 PARAMETER Experiment Name: At_Germinating_Seeds_P Parameter: Tissue Value: Germinating Seeds
  misc_feature: MA Experiment ID: 20000286 Result: Up-regulated in Transcription
  misc_feature: MA Experiment 20000286 PARAMETER Experiment Name: At_Open_Flower_P Parameter: Age (day) Value: 21
  misc_feature: MA Experiment 20000286 PARAMETER Experiment Name: At_Open_Flower_P Parameter: Plant Line Value: WS
  misc_feature: MA Experiment 20000286 PARAMETER Experiment Name: At_Open_Flower_P Parameter: Tissue Value: Half Open vs. Whole Plant
  misc_feature: MA Experiment ID: 20001557 Result: Up-regulated in Transcription
  misc_feature: MA Experiment 20001557 PARAMETER Experiment Name: At_Drought_Soil_Dry_P Parameter: Age (day) Value: 27
  misc_feature: MA Experiment 20001557 PARAMETER Experiment Name: At_Drought_Soil_Dry_P Parameter: Organism Value: A. thaliana
  misc_feature: MA Experiment 20001557 PARAMETER Experiment Name: At_Drought_Soil_Dry_P Parameter: Plant Line Value: WS
  misc_feature: MA Experiment 20001557 PARAMETER Experiment Name: At_Drought_Soil_Dry_P Parameter: Post Timepoint (hr) Value: 3
  misc_feature: MA Experiment 20001557 PARAMETER Experiment Name: At_Drought_Soil_Dry_P Parameter: Post-Treatment Value: Re-Water vs. No Drought
  misc_feature: MA Experiment 20001557 PARAMETER Experiment Name: At_Drought_Soil_Dry_P Parameter: Timepoint (day) Value: 13
  misc_feature: MA Experiment 20001557 PARAMETER Experiment Name: At_Drought_Soil_Dry_P Parameter: Treatment Value: Drought vs. No Drought
  misc_feature: MA Experiment ID: 20001558 Result: Up-regulated in Transcription
  misc_feature: MA Experiment 20001558 PARAMETER Experiment Name: At_Drought_Soil_Dry_P Parameter: Age (day) Value: 27
  misc_feature: MA Experiment 20001558 PARAMETER Experiment Name: At_Drought_Soil_Dry_P Parameter: Organism Value: A. thaliana
  misc_feature: MA Experiment 20001558 PARAMETER Experiment Name: At_Drought_Soil_Dry_P Parameter: Plant Line Value: WS
  misc_feature: MA Experiment 20001558 PARAMETER Experiment Name: At_Drought_Soil_Dry_P Parameter: Post Timepoint (hr) Value: 6
  misc_feature: MA Experiment 20001558 PARAMETER Experiment Name: At_Drought_Soil_Dry_P Parameter: Post-Treatment Value: Re-Water vs. No Drought
  misc_feature: MA Experiment 20001558 PARAMETER Experiment Name: At_Drought_Soil_Dry_P Parameter: Timepoint (day) Value: 13
  misc_feature: MA Experiment 20001558 PARAMETER Experiment Name: At_Drought_Soil_Dry_P Parameter: Treatment Value: Drought vs. No Drought
atggccactgaaaagaatactctggattctgaggctacttttgcgcaaacagtaccagctcttgattctacaacaaagaaacaggatgagtctcctccaaagagtaccccgtctcttactgtcactgcttgtgctaatggatctgatgtagtatcttctcagccaaatgacaatggccaagcacatactacagattttcgaaagggaaatcaccgtgacaaaaacagctcagatgtctatgctgattcgactttgcgtggagatcgaccaaaaggaagcaattgtttgtctcaaacttctttttcggctcctaagcctcttggaaatttcaatggtgctggtagacttcctcccaatacacaagcacatgcattcagaccaccatttaagggaaaggaagccgcaggacagttcttaacattctccaatcagaagacaagctgtgtcccatattctggttacattaatggaaactcaaataatggtttctgggatcaaagggatcataataagaaacctgagagaaatggagagtctgactacttggttgaattgaaatgtggtccgagagccaatgcaaagactcgtcctccttccgagtcgtcaccactgaagcaaaacaattcgtttgccttggctcttcgtagagagatgtataacctccctgactttcagactgactatgaagatgccaagtttttcgtaatcaagtcgtacagcgaagatgatgttcacaagagtatcaaatattctgtgtggtcaagcactatcaacggaaacaagaaactcgatgcagctttccgtgatgctgaaacaaaaacactcgaggatggcaagaaacgtccaatatttctcttcttctcggtgaatgcgagtagacaatttgtgggattagctgagatggttggatatgtggacttcaacaaggatttggatttctggcaggttgataagtggagtggctttttccctgttgaatggcatgtggttaaagatattcctaactgggaactacgccatatcatcctcgacaacaatgaggacaagccagttactcatacgagagatactcacgagatcaaactcaaagaaggtctccaaatgctttcgatattcaagaagtactctgcggtaacatttttgttagacgacatggacttctacgaagagcgagagaagtctcttcgagcgaagaaggagcataaaccagccactcttcgcatggatctcttcaaagagaaagactatgactatgagatggaaggcaacaggagaatgaatcaccaagaaagaggatataattggaacagaagtagcaatagcaaaacacaagcatctcttgtcaatcaaaccaagtatctttccataagaggctactctggttacaagaagaacactggcaattcaacatga

SEQ ID NO: 72555 - protein, 470 aa, Arabidopsis thaliana
  peptide (1)..(470): Ceres Seq. ID no. 4937362
  misc_feature (286)..(375): Pfam Name: YT521-B-like family Pfam Description: YT521-B-like family
  misc_feature (47)..(470): Homolog of NCBI NO: 30681366 NR Description: expressed protein [Arabidopsis thaliana]
  misc_feature (130)..(470): Homolog of NCBI NO: 25402579 NR Description: hypothetical protein [imported] - Arabidopsis >gi|2160172|gb|AAB60735.1| F21M12.20 gene product [Arabidopsis
  misc_feature (205)..(432): Homolog of NCBI NO: 7487895 NR Description: hypothetical protein YUP8H12R.13 - Arabidopsis >gi|3152559|gb|AAC17040.1| Similarity to A. thaliana gene product gb|AC000132. EST gb|Z25651 comes from this gene. [Arabidopsis
  misc_feature (205)..(432): Homolog of NCBI NO: 18412316 NR Description: expressed protein; protein id: At1g79270.1, by cDNA: gi_11908125, supported by cDNA: gi_21280816 [Arabidopsis >gi|11908126|gb|AAG41492.1|AF326910_1 unknown protein
  misc_feature (23)..(409): Homolog of NCBI NO: 34911170 NR Description: B1144G04.32 [Oryza sativa (japonica
  misc_feature (175)..(405): Homolog of NCBI NO: 38636667 NR Description: putative Rubisco subunit binding-protein beta
  misc_feature (79)..(406): Homolog of NCBI NO: 15795138 NR Description: gb|AAF35955.1~gene_id:MGH6.21~strong similarity
  misc_feature (79)..(406): Homolog of NCBI NO: 30682438 NR Description: expressed protein [Arabidopsis thaliana]
  misc_feature (70)..(402): Homolog of NCBI NO: 34395023 NR Description: high-glucose-regulated protein 8-like [Oryza
  misc_feature (168)..(415): Homolog of NCBI NO: 38567895 NR Description: OSJNBa0060N03.15 [Oryza sativa (japonica
MATEKNTLDSEATFAQTVPALDSTTKKQDESPPKSTPSLTVTACANGSDVVSSQPNDNGQAHTTDFRKGNHRDKNSSDVYADSTLRGDRPKGSNCLSQTSFSAPKPLGNFNGAGRLPPNTQAHAFRPPFKGKEAAGQFLTFSNQKTSCVPYSGYINGNSNNGFWDQRDHNKKPERNGESDYLVELKCGPRANAKTRPPSESSPLKQNNSFALALRREMYNLPDFQTDYEDAKFFVIKSYSEDDVHKSIKYSVWSSTINGNKKLDAAFRDAETKTLEDGKKRPIFLFFSVNASRQFVGLAEMVGYVDFNKDLDFWQVDKWSGFFPVEWHVVKDIPNWELRHIILDNNEDKPVTHTRDTHEIKLKEGLQMLSIFKKYSAVTFLLDDMDFYEEREKSLRAKKEHKPATLRMDLFKEKDYDYEMEGNRRMNHQERGYNWNRSSNSKTQASLVNQTKYLSIRGYSGYKKNTGNST

SEQ ID NO: 72556 - protein, 253 aa, Arabidopsis thaliana
  peptide (1)..(253): Ceres Seq. ID no. 4937363
  misc_feature (69)..(158): Pfam Name: YT521-B-like family Pfam Description: YT521-B-like family
  misc_feature (1)..(253): Homolog of NCBI NO: 30681366 NR Description: expressed protein [Arabidopsis thaliana]
  misc_feature (1)..(253): Homolog of NCBI NO: 25402579 NR Description: hypothetical protein [imported] - Arabidopsis >gi|2160172|gb|AAB60735.1| F21M12.20 gene product [Arabidopsis
  misc_feature (1)..(215): Homolog of NCBI NO: 7487895 NR Description: hypothetical protein YUP8H12R.13 - Arabidopsis >gi|3152559|gb|AAC17040.1| Similarity to A. thaliana gene product gb|AC000132. EST gb|Z25651 comes from this gene. [Arabidopsis
  misc_feature (1)..(215): Homolog of NCBI NO: 18412316 NR Description: expressed protein; protein id: At1g79270.1, by cDNA: gi_11908125, supported by cDNA: gi_21280816 [Arabidopsis >gi|11908126|gb|AAG41492.1|AF326910_1 unknown protein
  misc_feature (1)..(192): Homolog of NCBI NO: 34911170 NR Description: B1144G04.32 [Oryza sativa (japonica
  misc_feature (1)..(188): Homolog of NCBI NO: 38636667 NR Description: putative Rubisco subunit binding-protein beta
  misc_feature (1)..(189): Homolog of NCBI NO: 15795138 NR Description: gb|AAF35955.1~gene_id:MGH6.21~strong similarity
  misc_feature (1)..(189): Homolog of NCBI NO: 30682438 NR Description: expressed protein [Arabidopsis thaliana]
  misc_feature (1)..(185): Homolog of NCBI NO: 34395023 NR Description: high-glucose-regulated protein 8-like [Oryza
  misc_feature (1)..(198): Homolog of NCBI NO: 38567895 NR Description: OSJNBa0060N03.15 [Oryza sativa (japonica
MYNLPDFQTDYEDAKFFVIKSYSEDDVHKSIKYSVWSSTINGNKKLDAAFRDAETKTLEDGKKRPIFLFFSVNASRQFVGLAEMVGYVDFNKDLDFWQVDKWSGFFPVEWHVVKDIPNWELRHIILDNNEDKPVTHTRDTHEIKLKEGLQMLSIFKKYSAVTFLLDDMDFYEEREKSLRAKKEHKPATLRMDLFKEKDYDYEMEGNRRMNHQERGYNWNRSSNSKTQASLVNQTKYLSIRGYSGYKKNTGNST

SEQ ID NO: 72557 - DNA, 1086 bp, Arabidopsis thaliana
  misc_feature (1)..(1086): Ceres Seq. ID no. 4937451
  misc_feature: MA Experiment ID: 20000234 Result: Up-regulated in Transcription
  misc_feature: MA Experiment 20000234 PARAMETER Experiment Name: At_Siliques_P Parameter: Age (day) Value: 21
  misc_feature: MA Experiment 20000234 PARAMETER Experiment Name: At_Siliques_P Parameter: Organism Value: A. thaliana
  misc_feature: MA Experiment 20000234 PARAMETER Experiment Name: At_Siliques_P Parameter: Plant Line Value: WS
  misc_feature: MA Experiment 20000234 PARAMETER Experiment Name: At_Siliques_P Parameter: Tissue Value: Less Than 5mm Siliques vs. Whole Plant
atgaaaggagctgagacgacggagcaaggtaattgctctgcctttgcctccagcggtaaccttcctcactgctgtctcgagcgaccaaccatagtcgaccttcttcccggtgcttctctcaacgttcaagttgccaattgttgccgtggaggcgtcttgacttccatgtctcaggaccacgccaatcacgtctctgcttttcacatgacagttggaagctctcctgatggccctgaggagttcaatatgccttctaatttcgatataggggtcccgggttatagctgcgacaatgctacatccgtgtccccgactaagtttagtactgataagggccgtcgcaaaacacaagctctagcaacatgggaggcagtgtgtgtatactcgcagtttcggtcatcaccatcgccaaaatgctgcgtttcactctctgccttctactaccaaaacattgttccttgtcctacctgtagctgcggctgctcgagttcccattgtgtcaaggatggagagttgccgccatatcttgaacagaaacatgatccagatgaggaagtatcgcctgtcgtgaagtgttcggatcatatgtgtcccatccgcatccactggcatgtgaaagtgaactatagagagtattggagggttaagatcacagcaacaaatttcaacacaatgaagaattacactaattggaacttagtggtgcttcatccaaacttgaaaagcgtccaacaagtctttagctttaactacaaatctttgacaccatatcaaaacagcatcaatgacacagggatgttttggggagtccagttttataatgatgttttgcttcaagaaggaaagattgggaatgttcaaacagagttattgctgaagaaggatatgggaaatttcactttcagagaaggttgggctttcccaaggagaatcttgttcaatggtgatgaatgtgttatgccttctccagatgactttccaaggctgccaaaatctgctcattcctcttcgtcttcctctgctgttattagctctgtttcagtcgttttctgttttctccttcatcatcttcttctactagtttga

SEQ ID NO: 72558 - protein, 361 aa, Arabidopsis thaliana
  peptide (1)..(361): Ceres Seq. ID no. 4937452
  misc_feature (1)..(361): Homolog of NCBI NO: 30681356 NR Description: phytochelatin synthetase -related [Arabidopsis
  misc_feature (120)..(349): Homolog of NCBI NO: 25402576 NR Description: hypothetical protein [imported] - Arabidopsis >gi|2160169|gb|AAB60732.1| F21M12.17 gene product [Arabidopsis
  misc_feature (1)..(92): Homolog of NCBI NO: 25402576 NR Description: hypothetical protein [imported] - Arabidopsis >gi|2160169|gb|AAB60732.1| F21M12.17 gene product [Arabidopsis
  misc_feature (1)..(333): Homolog of NCBI NO: 30090026 NR Description: phytochelatin synthetase-like protein 2 [Sorghum
  misc_feature (1)..(333): Homolog of NCBI NO: 6690554 NR Description: phytochelatin synthetase-like protein [Zea mays]
  misc_feature (1)..(355): Homolog of NCBI NO: 15232863 NR Description: unknown protein; protein id: At3g02210.1 thaliana] >gi|6041808|gb|AAF02128.1|AC009755_21 unknown protein
  misc_feature (1)..(352): Homolog of NCBI NO: 18424412 NR Description: phytochelatin synthetase - like protein; protein At5g60920.1, supported by cDNA: 17250., supported by cDNA: [Arabidopsis thaliana] >gi|14193657|gb|AAK56072.1|AF319663_1
  misc_feature (1)..(352): Homolog of NCBI NO: 21553837 NR Description: phytochelatin synthetase-like protein
  misc_feature (1)..(352): Homolog of NCBI NO: 25456127 NR Description: probable phytochelatin synthetase [imported] - thaliana >gi|3559805|emb|CAA07251.1| putative phytochelatin [Arabidopsis thaliana] >gi|10177315|dbj|BAB10641.1| phytochelatin
  misc_feature (1)..(333): Homolog of NCBI NO: 30090032 NR Description: phytochelatin synthetase [Triticum monococcum]
MKGAETTEQGNCSAFASSGNLPHCCLERPTIVDLLPGASLNVQVANCCRGGVLTSMSQDHANHVSAFHMTVGSSPDGPEEFNMPSNFDIGVPGYSCDNATSVSPTKFSTDKGRRKTQALATWEAVCVYSQFRSSPSPKCCVSLSAFYYQNIVPCPTCSCGCSSSHCVKDGELPPYLEQKHDPDEEVSPVVKCSDHMCPIRIHWHVKVNYREYWRVKITATNFNTMKNYTNWNLVVLHPNLKSVQQVFSFNYKSLTPYQNSINDTGMFWGVQFYNDVLLQEGKIGNVQTELLLKKDMGNFTFREGWAFPRRILFNGDECVMPSPDDFPRLPKSAHSSSSSSAVISSVSVVFCFLLHHLLLLV

SEQ ID NO: 72559 - protein, 306 aa, Arabidopsis thaliana
  peptide (1)..(306): Ceres Seq. ID no. 4937453
  misc_feature (1)..(306): Homolog of NCBI NO: 30681356 NR Description: phytochelatin synthetase -related [Arabidopsis
  misc_feature (65)..(294): Homolog of NCBI NO: 25402576 NR Description: hypothetical protein [imported] - Arabidopsis >gi|2160169|gb|AAB60732.1| F21M12.17 gene product [Arabidopsis
  misc_feature (1)..(37): Homolog of NCBI NO: 25402576 NR Description: hypothetical protein [imported] - Arabidopsis >gi|2160169|gb|AAB60732.1| F21M12.17 gene product [Arabidopsis
  misc_feature (1)..(278): Homolog of NCBI NO: 30090026 NR Description: phytochelatin synthetase-like protein 2 [Sorghum
  misc_feature (1)..(278): Homolog of NCBI NO: 6690554 NR Description: phytochelatin synthetase-like protein [Zea mays]
  misc_feature (1)..(300): Homolog of NCBI NO: 15232863 NR Description: unknown protein; protein id: At3g02210.1 thaliana] >gi|6041808|gb|AAF02128.1|AC009755_21 unknown protein
  misc_feature (1)..(297): Homolog of NCBI NO: 18424412 NR Description: phytochelatin synthetase - like protein; protein At5g60920.1, supported by cDNA: 17250., supported by cDNA: [Arabidopsis thaliana] >gi|14193657|gb|AAK56072.1|AF319663_1
  misc_feature (1)..(297): Homolog of NCBI NO: 25456127 NR Description: probable phytochelatin synthetase [imported] - thaliana >gi|3559805|emb|CAA07251.1| putative phytochelatin [Arabidopsis thaliana] >gi|10177315|dbj|BAB10641.1| phytochelatin
  misc_feature (1)..(297): Homolog of NCBI NO: 21553837 NR Description: phytochelatin synthetase-like protein
  misc_feature (1)..(278): Homolog of NCBI NO: 30090032 NR Description: phytochelatin synthetase [Triticum monococcum]
MSQDHANHVSAFHMTVGSSPDGPEEFNMPSNFDIGVPGYSCDNATSVSPTKFSTDKGRRKTQALATWEAVCVYSQFRSSPSPKCCVSLSAFYYQNIVPCPTCSCGCSSSHCVKDGELPPYLEQKHDPDEEVSPVVKCSDHMCPIRIHWHVKVNYREYWRVKITATNFNTMKNYTNWNLVVLHPNLKSVQQVFSFNYKSLTPYQNSINDTGMFWGVQFYNDVLLQEGKIGNVQTELLLKKDMGNFTFREGWAFPRRILFNGDECVMPSPDDFPRLPKSAHSSSSSSAVISSVSVVFCFLLHHLLLLV

SEQ ID NO: 72560 - protein, 293 aa, Arabidopsis thaliana
  peptide (1)..(293): Ceres Seq. ID no. 4937454
  misc_feature (1)..(293): Homolog of NCBI NO: 30681356 NR Description: phytochelatin synthetase -related [Arabidopsis
  misc_feature (52)..(281): Homolog of NCBI NO: 25402576 NR Description: hypothetical protein [imported] - Arabidopsis >gi|2160169|gb|AAB60732.1| F21M12.17 gene product [Arabidopsis
  misc_feature (1)..(24): Homolog of NCBI NO: 25402576 NR Description: hypothetical protein [imported] - Arabidopsis >gi|2160169|gb|AAB60732.1| F21M12.17 gene product [Arabidopsis
  misc_feature (1)..(265): Homolog of NCBI NO: 30090026 NR Description: phytochelatin synthetase-like protein 2 [Sorghum
  misc_feature (1)..(265): Homolog of NCBI NO: 6690554 NR Description: phytochelatin synthetase-like protein [Zea mays]
  misc_feature (1)..(287): Homolog of NCBI NO: 15232863 NR Description: unknown protein; protein id: At3g02210.1 thaliana] >gi|6041808|gb|AAF02128.1|AC009755_21 unknown protein
  misc_feature (1)..(284): Homolog of NCBI NO: 18424412 NR Description: phytochelatin synthetase - like protein; protein At5g60920.1, supported by cDNA: 17250., supported by cDNA: [Arabidopsis thaliana] >gi|14193657|gb|AAK56072.1|AF319663_1
  misc_feature (1)..(284): Homolog of NCBI NO: 21553837 NR Description: phytochelatin synthetase-like protein
  misc_feature (1)..(284): Homolog of NCBI NO: 25456127 NR Description: probable phytochelatin synthetase [imported] - thaliana >gi|3559805|emb|CAA07251.1| putative phytochelatin [Arabidopsis thaliana] >gi|10177315|dbj|BAB10641.1| phytochelatin
  misc_feature (1)..(265): Homolog of NCBI NO: 30090032 NR Description: phytochelatin synthetase [Triticum monococcum]
MTVGSSPDGPEEFNMPSNFDIGVPGYSCDNATSVSPTKFSTDKGRRKTQALATWEAVCVYSQFRSSPSPKCCVSLSAFYYQNIVPCPTCSCGCSSSHCVKDGELPPYLEQKHDPDEEVSPVVKCSDHMCPIRIHWHVKVNYREYWRVKITATNFNTMKNYTNWNLVVLHPNLKSVQQVFSFNYKSLTPYQNSINDTGMFWGVQFYNDVLLQEGKIGNVQTELLLKKDMGNFTFREGWAFPRRILFNGDECVMPSPDDFPRLPKSAHSSSSSSAVISSVSVVFCFLLHHLLLLV

SEQ ID NO: 72561 - DNA, 927 bp, Arabidopsis thaliana
  misc_feature (1)..(927): Ceres Seq. ID no. 4937922
  misc_feature: MA Experiment ID: 108434 Result: Up-regulated in Transcription
  misc_feature: MA Experiment 108434 PARAMETER Experiment Name: At_Root_Tips_cDNA_P Parameter: Tissue Value: Root Tips
  misc_feature: MA Experiment ID: 108488 Result: Down-regulated in Transcription
  misc_feature: MA Experiment ID: 108579 Result: Down-regulated in Transcription
  misc_feature: MA Experiment 108579 PARAMETER Experiment Name: At_4deg_Cold_cDNA_P Parameter: Temperature (deg C) Value: 4 vs. 22
  misc_feature: MA Experiment 108579 PARAMETER Experiment Name: At_4deg_Cold_cDNA_P Parameter: Timepoint (hr) Value: 6
  misc_feature: MA Experiment 108579 PARAMETER Experiment Name: At_4deg_Cold_cDNA_P Parameter: Tissue Value: Aerial
  misc_feature: MA Experiment ID: 20000184 Result: Down-regulated in Transcription
  misc_feature: MA Experiment 20000184 PARAMETER Experiment Name: At_Shoots__P Parameter: Age (day) Value: 7
  misc_feature: MA Experiment 20000184 PARAMETER Experiment Name: At_Shoots__P Parameter: Tissue Value: Shoots vs. Whole Plant
  misc_feature: MA Experiment ID: 20000794 Result: Up-regulated in Transcription
  misc_feature: MA Experiment 20000794 PARAMETER Experiment Name: At_Petals_P Parameter: Age (day) Value: 23-25 days
  misc_feature: MA Experiment 20000794 PARAMETER Experiment Name: At_Petals_P Parameter: Plant Line Value: WS
  misc_feature: MA Experiment 20000794 PARAMETER Experiment Name: At_Petals_P Parameter: Tissue Value: Petals vs. Whole plant
aaataacgaattcgattttaaccggaaactgaaccggaagctgagtctcgtgcctgccttctctaggcttctttgtttccgatcagaatctcgagctcaactgtcaaaactagccgaccactaagtcgttgtcctaactttctctctgttcctcatcgaacattattgggaggagagagagagagagagaagaccaagaaacaacgaggatagatccgaggaaattgtcggaaccaaaaggaggaagatgggagatatctggacatggcttatttccttcttcttcctcatcgctcttgtcggaatcatcgtctatcagcttgtttgcttagcggatctcgagtttgattacatcaacccttacgactctgcgtcgagaataaactcagtggttttaccggagttcattgttcaaggagttctatgcgtattctacctcctaacaggacactggttcatgacactcttatgtctcccctatctatactacaacttccatctttactcgaagcgacaacacttagtagatgtcaccgagatcttcaatttgcttaactgggaaaagaagaaacggctgttcaagcttgcttacattgtccttaacctctttctcactatcttctggatgatttattcggcgctggatgattacgaggactgactaatgaagaagacatggtccatcttcttcggtttattgacactacgcttaaagatacagcgacatgcttgtggacatgaaaaaaagcaaggaaaagtgtttgctttgtgatgtttgtaagattagtggcaggaagatttgtgtatttatttctttcttagaaacatgttcagattaactgttttttttatgtcttgatcattatttgtacaagcaatcaagctcgtaaactactggttacagtaacaatgaaactgaataatttc

SEQ ID NO: 72562 - protein, 137 aa, Arabidopsis thaliana; identical to SEQ ID NO: 22542
  peptide (1)..(137): Ceres Seq. ID no. 4937923
  misc_feature (3)..(126): Pfam Name: Cornichon protein Pfam Description: Cornichon protein
  misc_feature (1)..(137): Homolog of NCBI NO: 30682747 NR Description: expressed protein [Arabidopsis thaliana]
  misc_feature (1)..(137): Homolog of NCBI NO: 15221614 NR Description: unknown protein; protein id: At1g62880.1 thaliana] >gi|26452314|dbj|BAC43243.1| unknown protein thaliana] >gi|28416891|gb|AAO42976.1| At1g62880 [Arabidopsis
  misc_feature (1)..(126): Homolog of NCBI NO: 25336823 NR Description: hypothetical protein F16P17.3 [imported] - thaliana >gi|8493595|gb|AAF75818.1|AC011000_21 Contains
  misc_feature (22)..(126): Homolog of NCBI NO: 18391380 NR Description: hypothetical protein; protein id: At1g12340.1
  misc_feature (1)..(126): Homolog of NCBI NO: 8778625 NR Description: F5O11.11 [Arabidopsis thaliana]
  misc_feature (22)..(116): Homolog of NCBI NO: 8778623 NR Description: F5O11.7 [Arabidopsis thaliana]
  misc_feature (24)..(134): Homolog of NCBI NO: 15234412 NR Description: putative protein; protein id: At4g12090.1
  misc_feature (3)..(137): Homolog of NCBI NO: 15230426 NR Description: unknown protein; protein id: At3g12180.1
  misc_feature (3)..(125): Homolog of NCBI NO: 9294117 NR Description: gene_id:T23B7.14~pir||T06616~similar to unknown
  misc_feature (7)..(134): Homolog of NCBI NO: 32413457 NR Description: hypothetical protein [Neurospora crassa]

SEQ ID NO: 72563 - DNA, 1256 bp, Arabidopsis thaliana
  misc_feature (1)..(1256): Ceres Seq. ID no. 4937924
  misc_feature: MA Experiment ID: 108434 Result: Down-regulated in Transcription
  misc_feature: MA Experiment 108434 PARAMETER Experiment Name: At_Root_Tips_cDNA_P Parameter: Tissue Value: Root Tips
  misc_feature: MA Experiment ID: 108462 Result: Up-regulated in Transcription
  misc_feature: MA Experiment 108462 PARAMETER Experiment Name: At_Germinating_Seeds_cDNA_P Parameter: Age (day) Value: 2 vs. 0
  misc_feature: MA Experiment 108462 PARAMETER Experiment Name: At_Germinating_Seeds_cDNA_P Parameter: Tissue Value: Germinating Seeds
  misc_feature: MA Experiment ID: 108463 Result: Up-regulated in Transcription
  misc_feature: MA Experiment 108463 PARAMETER Experiment Name: At_Germinating_Seeds_cDNA_P Parameter: Age (day) Value: 3 vs. 0
  misc_feature: MA Experiment 108463 PARAMETER Experiment Name: At_Germinating_Seeds_cDNA_P Parameter: Tissue Value: Germinating Seeds
  misc_feature: MA Experiment ID: 108464 Result: Up-regulated in Transcription
  misc_feature: MA Experiment 108464 PARAMETER Experiment Name: At_Germinating_Seeds_cDNA_P Parameter: Age (day) Value: 4 vs. 0
  misc_feature: MA Experiment 108464 PARAMETER Experiment Name: At_Germinating_Seeds_cDNA_P Parameter: Tissue Value: Germinating Seeds
  misc_feature: MA Experiment ID: 108488 Result: Down-regulated in Transcription
  misc_feature: MA Experiment ID: 20000173 Result: Down-regulated in Transcription
  misc_feature: MA Experiment 20000173 PARAMETER Experiment Name: At_42deg_Heat_P Parameter: Age (day) Value: 14
  misc_feature: MA Experiment 20000173 PARAMETER Experiment Name: At_42deg_Heat_P Parameter: Organism Value: A. thaliana
  misc_feature: MA Experiment 20000173 PARAMETER Experiment Name: At_42deg_Heat_P Parameter: Plant Line Value: WS
  misc_feature: MA Experiment 20000173 PARAMETER Experiment Name: At_42deg_Heat_P Parameter: Temperature (deg C) Value: 42 vs. 22
  misc_feature: MA Experiment 20000173 PARAMETER Experiment Name: At_42deg_Heat_P Parameter: Timepoint (hr) Value: 6
  misc_feature: MA Experiment 20000173 PARAMETER Experiment Name: At_42deg_Heat_P Parameter: Tissue Value: Aerial
  misc_feature: MA Experiment ID: 20000264 Result: Up-regulated in Transcription
  misc_feature: MA Experiment 20000264 PARAMETER Experiment Name: At_Open_Flower_P Parameter: Age (day) Value: 21
  misc_feature: MA Experiment 20000264 PARAMETER Experiment Name: At_Open_Flower_P Parameter: Plant Line Value: WS
  misc_feature: MA Experiment 20000264 PARAMETER Experiment Name: At_Open_Flower_P Parameter: Tissue Value: Open Flower vs. Whole Plant
  misc_feature: MA Experiment ID: 20000794 Result: Up-regulated in Transcription
  misc_feature: MA Experiment 20000794 PARAMETER Experiment Name: At_Petals_P Parameter: Age (day) Value: 23-25 days
  misc_feature: MA Experiment 20000794 PARAMETER Experiment Name: At_Petals_P Parameter: Plant Line Value: WS
  misc_feature: MA Experiment 20000794 PARAMETER Experiment Name: At_Petals_P Parameter: Tissue Value: Petals vs. Whole plant
  misc_feature: MA Experiment ID: 20001247 Result: Up-regulated in Transcription
  misc_feature: MA Experiment 20001247 PARAMETER Experiment Name: At_Far-red-induction_P Parameter: Age (day) Value: 7
  misc_feature: MA Experiment 20001247 PARAMETER Experiment Name: At_Far-red-induction_P Parameter: Light Value: Far-red vs. White
  misc_feature: MA Experiment 20001247 PARAMETER Experiment Name: At_Far-red-induction_P Parameter: Organism Value: A. thaliana
  misc_feature: MA Experiment 20001247 PARAMETER Experiment Name: At_Far-red-induction_P Parameter: Plant Line Value: Columbia
  misc_feature: MA Experiment 20001247 PARAMETER Experiment Name: At_Far-red-induction_P Parameter: Timepoint (hr) Value: 1
  misc_feature: MA Experiment 20001247 PARAMETER Experiment Name: At_Far-red-induction_P Parameter: Tissue Value: Whole Plant
agattctttcttctaaccccattcgctctctccgatcaacacaacatttgatctaacggtttaattttctcgagaaaccgaaggaaaacaaacagagcaatggcgtcgatgggacggtgcctgagctgaaattgagagtcgaagaagattccgataatggtgattatctgaaattgagaggaggatcaaatgaagaagatgaaggatcatcggcggaatcatcgagatgtccgataggatcggttacttctgtctggttctgggtgaaattgatctccttggtcgtttgtttgggttcattggcctttgttatcatcaaatgggttggtccctttttgattgaaaaggagctgattccatttataaattgggtgagaaacacattcagcataccggttctcggtcttctactatttgcctcagtggcattgtttccaagcattcttcttccttcttccccttccatgtggatggctggtcttacatttggttatggaaaagggtttcttctgattttatcagctgcttccatcggtgttactcttcctttcttaattggacatctcttcctccacaagatgcaagaatggttgaagaaataccctaaaaaagcagccatacttagagctgctggtgaaggaacctggtttcatcagtttcaagcagtcacactaatccgtgtctctccatttccttacatcatttacaactactgcgctttagcgactggagttcattatggtccttatatcttaggctctcttgttggaatggttcctgagatctttgtctcaatttacacgggtataatgctaaggacactagcagttgcatcagacacgagacacacactttcggttgtggagatagtcgtgaatgttcttggcttctgtgtaactgcgagcgcgactatagtctgcacaatctatgcgaagaagaagctaagtgcgatgcaatcagaggacgtagagacattacaaaatccaatactttattaactcttttcaccatgaccacaacataccatcatctaacacgatcttgaaattgataatatataatgtttttttttttttttgttattcttattcatttgaaaatgaatatttatgtctttttctcttgtatatatgatatgtatcaattgaattttgaaaatttccaatgtatatttattagatcatctaagtctttttctttccttgcatataatccaccttatgtatcatggaacaatgtcttgttgggttttgttc

SEQ ID NO: 72564 - protein, 177 aa, Arabidopsis thaliana; identical to SEQ ID NO: 26159
  peptide (1)..(177): Ceres Seq. ID no. 4937925
  misc_feature (1)..(121): Pfam Name: DedA family Pfam Description: DedA family
  misc_feature (1)..(177): Homolog of NCBI NO: 15221330 NR Description: hypothetical protein; protein id: At1g12450.1
  misc_feature (1)..(40): Homolog of NCBI NO: 8778630 NR Description: F5O11.19 [Arabidopsis thaliana]
  misc_feature (107)..(177): Homolog of NCBI NO: 8778630 NR Description: F5O11.19 [Arabidopsis thaliana]
  misc_feature (1)..(172): Homolog of NCBI NO: 30685958 NR Description: expressed protein [Arabidopsis thaliana] unknown protein [Arabidopsis thaliana]
  misc_feature (1)..(166): Homolog of NCBI NO: 15234386 NR Description: putative protein; protein id: At4g12000.1, by cDNA: gi_18176120, supported by cDNA: gi_20465310 [Arabidopsis
  misc_feature (1)..(130): Homolog of NCBI NO: 8778630 NR Description: F5O11.19 [Arabidopsis thaliana]
  misc_feature (1)..(167): Homolog of NCBI NO: 18395356 NR Description: expressed protein; protein id: At2g02370.1, by cDNA: gi_13605570, supported by cDNA: gi_16323325 [Arabidopsis >gi|13605571|gb|AAK32779.1|AF361611_1 At2g02370/T16F16.16
  misc_feature (1)..(167): Homolog of NCBI NO: 31249711 NR Description: hypothetical protein [Oryza sativa (japonica
  misc_feature (1)..(167): Homolog of NCBI NO: 34913316 NR Description: P0519E12.36 [Oryza sativa (japonica >gi|22093829|dbj|BAC07116.1| hypothetical protein [Oryza sativa
  misc_feature (15)..(172): Homolog of NCBI NO: 7486891 NR Description: hypothetical protein T12H17.240 - Arabidopsis >gi|2832606|emb|CAA16570.1| predicted protein [Arabidopsis >gi|3292810|emb|CAA19800.1| putative protein [Arabidopsis

SEQ ID NO: 72565 - protein, 175 aa, Arabidopsis thaliana; identical to SEQ ID NO: 26160
  peptide (1)..(175): Ceres Seq. ID no. 4937926
  misc_feature (1)..(119): Pfam Name: DedA family Pfam Description: DedA family
  misc_feature (1)..(175): Homolog of NCBI NO: 15221330 NR Description: hypothetical protein; protein id: At1g12450.1
  misc_feature (1)..(38): Homolog of NCBI NO: 8778630 NR Description: F5O11.19 [Arabidopsis thaliana]
  misc_feature (105)..(175): Homolog of NCBI NO: 8778630 NR Description: F5O11.19 [Arabidopsis thaliana]
  misc_feature (1)..(170): Homolog of NCBI NO: 30685958 NR Description: expressed protein [Arabidopsis thaliana] unknown protein [Arabidopsis thaliana]
  misc_feature (1)..(164): Homolog of NCBI NO: 15234386 NR Description: putative protein; protein id: At4g12000.1, by cDNA: gi_18176120, supported by cDNA: gi_20465310 [Arabidopsis
  misc_feature (1)..(128): Homolog of NCBI NO: 8778630 NR Description: F5O11.19 [Arabidopsis thaliana]
  misc_feature (1)..(165): Homolog of NCBI NO: 18395356 NR Description: expressed protein; protein id: At2g02370.1, by cDNA: gi_13605570, supported by cDNA: gi_16323325 [Arabidopsis >gi|13605571|gb|AAK32779.1|AF361611_1 At2g02370/T16F16.16
  misc_feature (1)..(165): Homolog of NCBI NO: 31249711 NR Description: hypothetical protein [Oryza sativa (japonica
  misc_feature (1)..(165): Homolog of NCBI NO: 34913316 NR Description: P0519E12.36 [Oryza sativa (japonica >gi|22093829|dbj|BAC07116.1| hypothetical protein [Oryza sativa
  misc_feature (13)..(170): Homolog of NCBI NO: 7486891 NR Description: hypothetical protein T12H17.240 - Arabidopsis >gi|2832606|emb|CAA16570.1| predicted protein [Arabidopsis >gi|3292810|emb|CAA19800.1| putative protein [Arabidopsis

SEQ ID NO: 72566 - protein, 139 aa, Arabidopsis thaliana; identical to SEQ ID NO: 39549
  peptide (1)..(139): Ceres Seq. ID no. 4937927
  misc_feature (1)..(83): Pfam Name: DedA family Pfam Description: DedA family
  misc_feature (1)..(139): Homolog of NCBI NO: 15221330 NR Description: hypothetical protein; protein id: At1g12450.1
  misc_feature (69)..(139): Homolog of NCBI NO: 8778630 NR Description: F5O11.19 [Arabidopsis thaliana]
  misc_feature (1)..(134): Homolog of NCBI NO: 30685958 NR Description: expressed protein [Arabidopsis thaliana] unknown protein [Arabidopsis thaliana]
  misc_feature (1)..(128): Homolog of NCBI NO: 15234386 NR Description: putative protein; protein id: At4g12000.1, by cDNA: gi_18176120, supported by cDNA: gi_20465310 [Arabidopsis
  misc_feature (1)..(92): Homolog of NCBI NO: 8778630 NR Description: F5O11.19 [Arabidopsis thaliana]
  misc_feature (1)..(129): Homolog of NCBI NO: 18395356 NR Description: expressed protein; protein id: At2g02370.1, by cDNA: gi_13605570, supported by cDNA: gi_16323325 [Arabidopsis >gi|13605571|gb|AAK32779.1|AF361611_1 At2g02370/T16F16.16
  misc_feature (1)..(129): Homolog of NCBI NO: 31249711 NR Description: hypothetical protein [Oryza sativa (japonica
  misc_feature (1)..(129): Homolog of NCBI NO: 34913316 NR Description: P0519E12.36 [Oryza sativa (japonica >gi|22093829|dbj|BAC07116.1| hypothetical protein [Oryza sativa
  misc_feature (1)..(134): Homolog of NCBI NO: 7486891 NR Description: hypothetical protein T12H17.240 - Arabidopsis >gi|2832606|emb|CAA16570.1| predicted protein [Arabidopsis >gi|3292810|emb|CAA19800.1| putative protein [Arabidopsis
  misc_feature (1)..(129): Homolog of NCBI NO: 25410981 NR Description: hypothetical protein At2g02370 [imported] -

SEQ ID NO: 72567 - DNA, 861 bp, Arabidopsis thaliana
  misc_feature (1)..(861): Ceres Seq. ID no. 4937932
  misc_feature: MA Experiment ID: 108434 Result: Down-regulated in Transcription
  misc_feature: MA Experiment 108434 PARAMETER Experiment Name: At_Root_Tips_cDNA_P Parameter: Tissue Value: Root Tips
  misc_feature: MA Experiment ID: 108461 Result: Down-regulated in Transcription
  misc_feature: MA Experiment 108461 PARAMETER Experiment Name: At_Germinating_Seeds_cDNA_P Parameter: Age (day) Value: 1 vs. 0
  misc_feature: MA Experiment 108461 PARAMETER Experiment Name: At_Germinating_Seeds_cDNA_P Parameter: Tissue Value: Germinating Seeds
  misc_feature: MA Experiment ID: 108488 Result: Down-regulated in Transcription
  misc_feature: MA Experiment ID: 108576 Result: Down-regulated in Transcription
  misc_feature: MA Experiment 108576 PARAMETER Experiment Name: At_42deg_Heat_cDNA_P Parameter: Temperature (deg C) Value: 42 vs. 22
  misc_feature: MA Experiment 108576 PARAMETER Experiment Name: At_42deg_Heat_cDNA_P Parameter: Timepoint (hr) Value: 1
  misc_feature: MA Experiment 108576 PARAMETER Experiment Name: At_42deg_Heat_cDNA_P Parameter: Tissue Value: Aerial
  misc_feature: MA Experiment ID: 108577 Result: Down-regulated in Transcription
  misc_feature: MA Experiment 108577 PARAMETER Experiment Name: At_42deg_Heat_cDNA_P Parameter: Temperature (deg C) Value: 42 vs. 22
  misc_feature: MA Experiment 108577 PARAMETER Experiment Name: At_42deg_Heat_cDNA_P Parameter: Timepoint (hr) Value: 6
  misc_feature: MA Experiment 108577 PARAMETER Experiment Name: At_42deg_Heat_cDNA_P Parameter: Tissue Value: Aerial
  misc_feature: MA Experiment ID: 108585 Result: Up-regulated in Transcription
  misc_feature: MA Experiment 108585 PARAMETER Experiment Name: At_5mM_NaNP_cDNA_P Parameter: Timepoint (hr) Value: 6
  misc_feature: MA Experiment 108585 PARAMETER Experiment Name: At_5mM_NaNP_cDNA_P Parameter: Tissue Value: Aerial
  misc_feature: MA Experiment 108585 PARAMETER Experiment Name: At_5mM_NaNP_cDNA_P Parameter: Treatment Value: null
  misc_feature: MA Experiment ID: 20000179 Result: Down-regulated in Transcription
  misc_feature: MA Experiment 20000179 PARAMETER Experiment Name: At_Germinating_Seeds_P Parameter: Age (hr) Value: 6 vs. 0
  misc_feature: MA Experiment 20000179 PARAMETER Experiment Name: At_Germinating_Seeds_P Parameter: Tissue Value: Germinating Seeds
  misc_feature: MA Experiment ID: 20000227 Result: Down-regulated in Transcription
  misc_feature: MA Experiment 20000227 PARAMETER Experiment Name: At_Root-Tips-vs-Tops_P Parameter: Tissue Value: Root Tips vs. Root Tops
  misc_feature: MA Experiment ID: 20000234 Result: Down-regulated in Transcription
  misc_feature: MA Experiment 20000234 PARAMETER Experiment Name: At_Siliques_P Parameter: Age (day) Value: 21
  misc_feature: MA Experiment 20000234 PARAMETER Experiment Name: At_Siliques_P Parameter: Organism Value: A. thaliana
  misc_feature: MA Experiment 20000234 PARAMETER Experiment Name: At_Siliques_P Parameter: Plant Line Value: WS
  misc_feature: MA Experiment 20000234 PARAMETER Experiment Name: At_Siliques_P Parameter: Tissue Value: Less Than 5mm Siliques vs. Whole Plant
  misc_feature: MA Experiment ID: 20000264 Result: Down-regulated in Transcription
  misc_feature: MA Experiment 20000264 PARAMETER Experiment Name: At_Open_Flower_P Parameter: Age (day) Value: 21
  misc_feature: MA Experiment 20000264 PARAMETER Experiment Name: At_Open_Flower_P Parameter: Plant Line Value: WS
  misc_feature: MA Experiment 20000264 PARAMETER Experiment Name: At_Open_Flower_P Parameter: Tissue Value: Open Flower vs. Whole Plant
  misc_feature: MA Experiment ID: 20000265 Result: Down-regulated in Transcription
  misc_feature: MA Experiment 20000265 PARAMETER Experiment Name: At_Open_Flower_P Parameter: Age (day) Value: 21
  misc_feature: MA Experiment 20000265 PARAMETER Experiment Name: At_Open_Flower_P Parameter: Plant Line Value: WS
  misc_feature: MA Experiment 20000265 PARAMETER Experiment Name: At_Open_Flower_P Parameter: Tissue Value: Closed Flower vs. Whole Plant
  misc_feature: MA Experiment ID: 20000286 Result: Down-regulated in Transcription
  misc_feature: MA Experiment 20000286 PARAMETER Experiment Name: At_Open_Flower_P Parameter: Age (day) Value: 21
  misc_feature: MA Experiment 20000286 PARAMETER Experiment Name: At_Open_Flower_P Parameter: Plant Line Value: WS
  misc_feature: MA Experiment 20000286 PARAMETER Experiment Name: At_Open_Flower_P Parameter: Tissue Value: Half Open vs. Whole Plant
  misc_feature: MA Experiment ID: 20000437 Result: Down-regulated in Transcription
  misc_feature: MA Experiment 20000437 PARAMETER Experiment Name: At_Drought_P Parameter: Age (day) Value: 8
  misc_feature: MA Experiment 20000437 PARAMETER Experiment Name: At_Drought_P Parameter: Organism Value: A. thaliana
  misc_feature: MA Experiment 20000437 PARAMETER Experiment Name: At_Drought_P Parameter: Plant Line Value: WS
  misc_feature: MA Experiment 20000437 PARAMETER Experiment Name: At_Drought_P Parameter: Timepoint (hr) Value: 24
  misc_feature: MA Experiment 20000437 PARAMETER Experiment Name: At_Drought_P Parameter: Tissue Value: Whole Plant
  misc_feature: MA Experiment 20000437 PARAMETER Experiment Name: At_Drought_P Parameter: Treatment Value: Drought vs. No Drought
  misc_feature: MA Experiment ID: 20000439 Result: Down-regulated in Transcription
  misc_feature: MA Experiment 20000439 PARAMETER Experiment Name: At_Roots__P Parameter: Age (day) Value: 14 vs. 21
  misc_feature: MA Experiment 20000439 PARAMETER Experiment Name: At_Roots__P Parameter: Organism Value: A. thaliana
  misc_feature: MA Experiment 20000439 PARAMETER Experiment Name: At_Roots__P Parameter: Tissue Value: Roots vs. Whole Plant
  misc_feature: MA Experiment ID: 20001247 Result: Up-regulated in Transcription
  misc_feature: MA Experiment 20001247 PARAMETER Experiment Name: At_Far-red-induction_P Parameter: Age (day) Value: 7
  misc_feature: MA Experiment 20001247 PARAMETER Experiment Name: At_Far-red-induction_P Parameter: Light Value: Far-red vs. White
  misc_feature: MA Experiment 20001247 PARAMETER Experiment Name: At_Far-red-induction_P Parameter: Organism Value: A. thaliana
  misc_feature: MA Experiment 20001247 PARAMETER Experiment Name: At_Far-red-induction_P Parameter: Plant Line Value: Columbia
  misc_feature: MA Experiment 20001247 PARAMETER Experiment Name: At_Far-red-induction_P Parameter: Timepoint (hr) Value: 1
  misc_feature: MA Experiment 20001247 PARAMETER Experiment Name: At_Far-red-induction_P Parameter: Tissue Value: Whole Plant
  misc_feature: MA Experiment ID: 20001248 Result: Up-regulated in Transcription
  misc_feature: MA Experiment 20001248 PARAMETER Experiment Name: At_Far-red-induction_P Parameter: Age (day) Value: 7
  misc_feature: MA Experiment 20001248 PARAMETER Experiment Name: At_Far-red-induction_P Parameter: Light Value: Far-red vs. White
  misc_feature: MA Experiment 20001248 PARAMETER Experiment Name: At_Far-red-induction_P Parameter: Organism Value: A. thaliana
  misc_feature: MA Experiment 20001248 PARAMETER Experiment Name: At_Far-red-induction_P Parameter: Plant Line Value: Columbia
  misc_feature: MA Experiment 20001248 PARAMETER Experiment Name: At_Far-red-induction_P Parameter: Timepoint (hr) Value: 4
  misc_feature: MA Experiment 20001248 PARAMETER Experiment Name: At_Far-red-induction_P Parameter: Tissue Value: Whole Plant
  misc_feature: MA Experiment ID: 20001450 Result: Up-regulated in Transcription
  misc_feature: MA Experiment 20001450 PARAMETER Experiment Name: At_Far-red-induction_P Parameter: Age (day) Value: 7
  misc_feature: MA Experiment 20001450 PARAMETER Experiment Name: At_Far-red-induction_P Parameter: Light Value: Far-red vs. White
  misc_feature: MA Experiment 20001450 PARAMETER Experiment Name: At_Far-red-induction_P Parameter: Organism Value: A. thaliana
  misc_feature: MA Experiment 20001450 PARAMETER Experiment Name: At_Far-red-induction_P Parameter: Plant Line Value: Columbia
  misc_feature: MA Experiment 20001450 PARAMETER Experiment Name: At_Far-red-induction_P Parameter: Timepoint (hr) Value: 8
  misc_feature: MA Experiment 20001450 PARAMETER Experiment Name: At_Far-red-induction_P Parameter: Tissue Value: Whole Plant
  misc_feature: MA Experiment ID: 20001451 Result: Up-regulated in Transcription
  misc_feature: MA Experiment 20001451 PARAMETER Experiment Name: At_Far-red-induction_P Parameter: Age (day) Value: 7
  misc_feature: MA Experiment 20001451 PARAMETER Experiment Name: At_Far-red-induction_P Parameter: Light Value: Far-red vs. White
  misc_feature: MA Experiment 20001451 PARAMETER Experiment Name: At_Far-red-induction_P Parameter: Organism Value: A. thaliana
  misc_feature: MA Experiment 20001451 PARAMETER Experiment Name: At_Far-red-induction_P Parameter: Plant Line Value: Columbia
  misc_feature: MA Experiment 20001451 PARAMETER Experiment Name: At_Far-red-induction_P Parameter: Timepoint (hr) Value: 24
  misc_feature: MA Experiment 20001451 PARAMETER Experiment Name: At_Far-red-induction_P Parameter: Tissue Value: Whole Plant
  misc_feature: MA Experiment ID: 20001555 Result: Down-regulated in Transcription
  misc_feature: MA Experiment 20001555 PARAMETER Experiment Name: At_Drought_Soil_Dry_P Parameter: Age (day) Value: 24
  misc_feature: MA Experiment 20001555 PARAMETER Experiment Name: At_Drought_Soil_Dry_P Parameter: Organism Value: A. thaliana
  misc_feature: MA Experiment 20001555 PARAMETER Experiment Name: At_Drought_Soil_Dry_P Parameter: Plant Line Value: WS
  misc_feature: MA Experiment 20001555 PARAMETER Experiment Name: At_Drought_Soil_Dry_P Parameter: Post Timepoint (hr) Value: None
  misc_feature: MA Experiment 20001555 PARAMETER Experiment Name: At_Drought_Soil_Dry_P Parameter: Post-Treatment Value: None
  misc_feature: MA Experiment 20001555 PARAMETER Experiment Name: At_Drought_Soil_Dry_P Parameter: Timepoint (day) Value: 10
  misc_feature: MA Experiment 20001555 PARAMETER Experiment Name: At_Drought_Soil_Dry_P Parameter: Treatment Value: Drought vs. No Drought
  misc_feature: MA Experiment ID: 20001556 Result: Down-regulated in Transcription
  misc_feature: MA Experiment 20001556 PARAMETER Experiment Name: At_Drought_Soil_Dry_P Parameter: Age (day) Value: 26
  misc_feature: MA Experiment 20001556 PARAMETER Experiment Name: At_Drought_Soil_Dry_P Parameter: Organism Value: A. thaliana
  misc_feature: MA Experiment 20001556 PARAMETER Experiment Name: At_Drought_Soil_Dry_P Parameter: Plant Line Value: WS
  misc_feature: MA Experiment 20001556 PARAMETER Experiment Name: At_Drought_Soil_Dry_P Parameter: Post Timepoint (hr) Value: None
  misc_feature: MA Experiment 20001556 PARAMETER Experiment Name: At_Drought_Soil_Dry_P Parameter: Post-Treatment Value: None
  misc_feature: MA Experiment 20001556 PARAMETER Experiment Name: At_Drought_Soil_Dry_P Parameter: Timepoint (day) Value: 12
  misc_feature: MA Experiment 20001556 PARAMETER Experiment Name: At_Drought_Soil_Dry_P Parameter: Treatment Value: Drought vs. No Drought
  misc_feature: MA Experiment ID: 20001905 Result: Down-regulated in Transcription
  misc_feature: MA Experiment 20001905 PARAMETER Experiment Name: At_Drought_Reproduction_P Parameter: Age (day) Value: 40
  misc_feature: MA Experiment 20001905 PARAMETER Experiment Name: At_Drought_Reproduction_P Parameter: Organism Value: A. thaliana
  misc_feature: MA Experiment 20001905 PARAMETER Experiment Name: At_Drought_Reproduction_P Parameter: Plant Line Value: WS
  misc_feature: MA Experiment 20001905 PARAMETER Experiment Name: At_Drought_Reproduction_P Parameter: Timepoint (day) Value: 10
  misc_feature: MA Experiment 20001905 PARAMETER Experiment Name: At_Drought_Reproduction_P Parameter: Tissue Value: Rosettes
  misc_feature: MA Experiment 20001905 PARAMETER Experiment Name: At_Drought_Reproduction_P Parameter: Treatment Value: Drought vs. No Drought
attgtcaatttccctttattttctcgacggaatcataaataaaaaccctaaacctaaagtcacaaattcattcttcatctgttattcacgatttgtgttgtcttttcttttgcagtaagatttcgactttggaattgggagatctttccattatgggttctgagcaaaacgacagcacaagcttctctccttcagagccaaagctctgcgtcaaaggatgtggcttcttcggatctccatcgaacatgaacctctgctctaaatgctacagagacatccgagccacggaggaacaaaccgcttccgctaaagccgccgtcgagaaatctctaaaccctaataaacccaaaactcaaccacaacagagccaagaaatcactcaaggcgtcctcggatctggatcgtcttcctcatcaacgagagggggtgattcggctgctgctccgttggatccaccgaaatcgacggctacgagatgcttgagctgtaacaagaaagttggcgtgacgggtttcaagtgtaggtgtggaagcactttctgtggaactcatagatatccagagagtcacgagtgccaattcgatttcaaaggagttgcgagagaagctattgctaaagctaatcctgtggtgaaggctgataaggttgataggatatgaattggtgaagaaactgttgtgttctcttttgtttttttattttcaagtctcgtgatgttggtggtttggctctctgttttctgctcttattatggttttatttgcttttagggtttcttaggaaaggccttagattctgctattatgtggtttcatgttttgcaacattggatttgttgttctgtaataaagtgttggttat

SEQ ID NO: 72568 - protein, 168 aa, Arabidopsis thaliana; identical to SEQ ID NO: 35636
  peptide (1)..(168): Ceres Seq. ID no. 4937933
  misc_feature (109)..(149): Pfam Name: AN1-like Zinc finger Pfam Description: AN1-like Zinc finger
  misc_feature (1)..(168): Homolog of NCBI NO: 8778645 NR Description: F5O11.17 [Arabidopsis thaliana]
  misc_feature (1)..(168): Homolog of NCBI NO: 15221329 NR Description: hypothetical protein; protein id: At1g12440.1
  misc_feature (1)..(168): Homolog of NCBI NO: 15234402 NR Description: putative protein; protein id: At4g12040.1, by cDNA: 45., supported by cDNA: gi_13605498 [Arabidopsis
  misc_feature (1)..(167): Homolog of NCBI NO: 15235819 NR Description: similar to zinc finger - like protein; protein
  misc_feature (15)..(168): Homolog of NCBI NO: 15225894 NR Description: putative zinc finger protein; protein id: supported by cDNA: 14203., supported by cDNA: gi_18253038
  misc_feature (4)..(168): Homolog of NCBI NO: 28269431 NR Description: putative zinc finger protein [Oryza sativa
  misc_feature (6)..(168): Homolog of NCBI NO: 18403408 NR Description: expressed protein; protein id: At1g51200.1, by cDNA: gi_15912334 [Arabidopsis thaliana]
  misc_feature (5)..(168): Homolog of NCBI NO: 30908921 NR Description: putative zinc finger transcription factor ZFP33
  misc_feature (6)..(168): Homolog of NCBI NO: 25082726 NR Description: expressed protein [Arabidopsis thaliana]
  misc_feature (12)..(168): Homolog of NCBI NO: 18404102 NR Description: expressed protein; protein id: At2g36320.1, by cDNA: 24255. [Arabidopsis thaliana] >gi|25408460|pir||C84779

SEQ ID NO: 72569 - protein, 137 aa, Arabidopsis thaliana; identical to SEQ ID NO: 35637
  peptide (1)..(137): Ceres Seq. ID no. 4937934
  misc_feature (78)..(118): Pfam Name: AN1-like Zinc finger Pfam Description: AN1-like Zinc finger
  misc_feature (1)..(137): Homolog of NCBI NO: 8778645 NR Description: F5O11.17 [Arabidopsis thaliana]
  misc_feature (1)..(137): Homolog of NCBI NO: 15221329 NR Description: hypothetical protein; protein id: At1g12440.1
  misc_feature (1)..(137): Homolog of NCBI NO: 15234402 NR Description: putative protein; protein id: At4g12040.1, by cDNA: 45., supported by cDNA: gi_13605498 [Arabidopsis
  misc_feature (1)..(136): Homolog of NCBI NO: 15235819 NR Description: similar to zinc finger - like protein; protein
  misc_feature (1)..(137): Homolog of NCBI NO: 15225894 NR Description: putative zinc finger protein; protein id: supported by cDNA: 14203., supported by cDNA: gi_18253038
  misc_feature (1)..(137): Homolog of NCBI NO: 28269431 NR Description: putative zinc finger protein [Oryza sativa
  misc_feature (1)..(137): Homolog of NCBI NO: 18403408 NR Description: expressed protein; protein id: At1g51200.1, by cDNA: gi_15912334 [Arabidopsis thaliana]
  misc_feature (1)..(137): Homolog of NCBI NO: 30908921 NR Description: putative zinc finger transcription factor ZFP33
  misc_feature (1)..(137): Homolog of NCBI NO: 25082726 NR Description: expressed protein [Arabidopsis thaliana]
  misc_feature (1)..(137): Homolog of NCBI NO: 18404102 NR Description: expressed protein; protein id: At2g36320.1, by cDNA: 24255. [Arabidopsis thaliana] >gi|25408460|pir||C84779

SEQ ID NO: 72570 - DNA, 1041 bp, Arabidopsis thaliana
  misc_feature (1)..(1041): Ceres Seq. ID no. 4938370
  misc_feature: MA Experiment ID: 20000184 Result: Up-regulated in Transcription
  misc_feature: MA Experiment 20000184 PARAMETER Experiment Name: At_Shoots__P Parameter: Age (day) Value: 7
  misc_feature: MA Experiment 20000184 PARAMETER Experiment Name: At_Shoots__P Parameter: Tissue Value: Shoots vs. Whole Plant
  misc_feature: MA Experiment ID: 20000235 Result: Up-regulated in Transcription
  misc_feature: MA Experiment 20000235 PARAMETER Experiment Name: At_Siliques_P Parameter: Age (day) Value: 21
  misc_feature: MA Experiment 20000235 PARAMETER Experiment Name: At_Siliques_P Parameter: Organism Value: A. thaliana
  misc_feature: MA Experiment 20000235 PARAMETER Experiment Name: At_Siliques_P Parameter: Plant Line Value: WS
  misc_feature: MA Experiment 20000235 PARAMETER Experiment Name: At_Siliques_P Parameter: Tissue Value: 5-10mm Siliques vs. Whole Plant
atggccagtttcaaattcttctttgcagccataattttggttctgtttcatccggcagcaataacttttgttgcttcgtatggctcattacagcttggcgatcaatgctcatcggacgaagactgcaatgttggacttggttgttttaaatgcggtatagatgttgcaagatgcgttagatccaatatcacagatcagttctccattgtgaacaattcgatgccgtttaataaatatgcatttttgacgacccacaattcatatgccattgaagggaaagcgcttcatgtggcgacccaagaagatactatagttcaacaactcaacagtggtgttcgagcattgatgttggatacgtacgattacgaaggagacgtatggttttgccattccttcgacgaacaatgctttgagttcaccaaatttaatcgggcgatagacacattcaaggagatattcgcgttcttgacagcgaatccatcagagatcgtgacattgatcttggaggattacgtcaaatcgcaaaacgggttaaccaaagtatttaccgattccggtttgaagaaattttggtttccggttcaaaatatgcctataggtggccaagattggccgttggttaaggatatggtcgccaataaccaccggttaatcgttttcacttcagctaaatctaagcaagaaaccgaaggaatagcttaccagtggaattacatggtggaaaatcaatatggagacgatggagttaaaccagatgaatgtagcaatagagcagattctgcactgttaaccgataaaacgaaagctttggtttcggtaaaccatttcaagacagttccggttaagatattgacttgtgaggagaactctgagcaacttctcgatatgattaagacatgttacgtagccgcagggaaccgatgggccaattttgtcgccgtcaacttttacaagaggagtaatggaggaggaacgtttcaagcaattgataaactaaacggagagcttctatgtggacgtgatgatgtgcatgcttgttaa

SEQ ID NO: 72571 - protein, 346 aa, Arabidopsis thaliana
  peptide (1)..(346): Ceres Seq. ID no. 4938371
  misc_feature (1)..(346): Homolog of NCBI NO: 25372964 NR Description: hypothetical protein F21F23.12 - Arabidopsis
  misc_feature (137)..(346): Homolog of NCBI NO: 15222920 NR Description: unknown protein; protein id: At1g13680.1
  misc_feature (30)..(143): Homolog of NCBI NO: 15222920 NR Description: unknown protein; protein id: At1g13680.1
  misc_feature (29)..(346): Homolog of NCBI NO: 25407778 NR Description: MAP3K-like protein kinase [imported] -
  misc_feature (11)..(346): Homolog of NCBI NO: 18402763 NR Description: expressed protein; protein id: At1g49740.1, by cDNA: 17743., supported by cDNA: gi_20260217 [Arabidopsis
  misc_feature (20)..(346): Homolog of NCBI NO: 38637049 NR Description: MAP3K-like protein kinase [Oryza sativa (japonica
  misc_feature (12)..(346): Homolog of NCBI NO: 18425155 NR Description: putative protein; protein id: At5g67130.1, by cDNA: 38897., supported by cDNA: gi_15451187, supported by gi_20148448 [Arabidopsis thaliana] >gi|15451188|gb|AAK96865.1|
  misc_feature (12)..(346): Homolog of NCBI NO: 21593427 NR Description: unknown [Arabidopsis thaliana]
  misc_feature (13)..(346): Homolog of NCBI NO: 38345461 NR Description: OSJNBa0042L16.16 [Oryza sativa (japonica
  misc_feature (4)..(346): Homolog of NCBI NO: 15230348 NR Description: unknown protein; protein id: At3g19310.1
MASFKFFFAAIILVLFHPAAITFVASYGSLQLGDQCSSDEDCNVGLGCFKCGIDVARCVRSNITDQFSIVNNSMPFNKYAFLTTHNSYAIEGKALHVATQEDTIVQQLNSGVRALMLDTYDYEGDVWFCHSFDEQCFEFTKFNRAIDTFKEIFAFLTANPSEIVTLILEDYVKSQNGLTKVFTDSGLKKFWFPVQNMPIGGQDWPLVKDMVANNHRLIVFTSAKSKQETEGIAYQWNYMVENQYGDDGVKPDECSNRADSALLTDKTKALVSVNHFKTVPVKILTCEENSEQLLDMIKTCYVAAGNRWANFVAVNFYKRSNGGGTFQAIDKLNGELLCGRDDVHAC

SEQ ID NO: 72572 - protein, 273 aa, Arabidopsis thaliana
  peptide (1)..(273): Ceres Seq. ID no. 4938372
  misc_feature (1)..(273): Homolog of NCBI NO: 25372964 NR Description: hypothetical protein F21F23.12 - Arabidopsis
  misc_feature (64)..(273): Homolog of NCBI NO: 15222920 NR Description: unknown protein; protein id: At1g13680.1
  misc_feature (1)..(70): Homolog of NCBI NO: 15222920 NR Description: unknown protein; protein id: At1g13680.1
  misc_feature (1)..(273): Homolog of NCBI NO: 25407778 NR Description: MAP3K-like protein kinase [imported] -
  misc_feature (1)..(273): Homolog of NCBI NO: 18402763 NR Description: expressed protein; protein id: At1g49740.1, by cDNA: 17743., supported by cDNA: gi_20260217 [Arabidopsis
  misc_feature (1)..(273): Homolog of NCBI NO: 38637049 NR Description: MAP3K-like protein kinase [Oryza sativa (japonica
  misc_feature (1)..(273): Homolog of NCBI NO: 18425155 NR Description: putative protein; protein id: At5g67130.1, by cDNA: 38897., supported by cDNA: gi_15451187, supported by gi_20148448 [Arabidopsis thaliana] >gi|15451188|gb|AAK96865.1|
  misc_feature (1)..(273): Homolog of NCBI NO: 21593427 NR Description: unknown [Arabidopsis thaliana]
  misc_feature (1)..(273): Homolog of NCBI NO: 38345461 NR Description: OSJNBa0042L16.16 [Oryza sativa (japonica
  misc_feature (1)..(273): Homolog of NCBI NO: 15230348 NR Description: unknown protein; protein id: At3g19310.1
MPFNKYAFLTTHNSYAIEGKALHVATQEDTIVQQLNSGVRALMLDTYDYEGDVWFCHSFDEQCFEFTKFNRAIDTFKEIFAFLTANPSEIVTLILEDYVKSQNGLTKVFTDSGLKKFWFPVQNMPIGGQDWPLVKDMVANNHRLIVFTSAKSKQETEGIAYQWNYMVENQYGDDGVKPDECSNRADSALLTDKTKALVSVNHFKTVPVKILTCEENSEQLLDMIKTCYVAAGNRWANFVAVNFYKRSNGGGTFQAIDKLNGELLCGRDDVHAC

SEQ ID NO: 72573 - protein, 231 aa, Arabidopsis thaliana
  peptide (1)..(231): Ceres Seq. ID no. 4938373
  misc_feature (1)..(231): Homolog of NCBI NO: 25372964 NR Description: hypothetical protein F21F23.12 - Arabidopsis
  misc_feature (22)..(231): Homolog of NCBI NO: 15222920 NR Description: unknown protein; protein id: At1g13680.1
  misc_feature (1)..(28): Homolog of NCBI NO: 15222920 NR Description: unknown protein; protein id: At1g13680.1
  misc_feature (1)..(231): Homolog of NCBI NO: 25407778 NR Description: MAP3K-like protein kinase [imported] -
  misc_feature (1)..(231): Homolog of NCBI NO: 18402763 NR Description: expressed protein; protein id: At1g49740.1, by cDNA: 17743., supported by cDNA: gi_20260217 [Arabidopsis
  misc_feature (1)..(231): Homolog of NCBI NO: 38637049 NR Description: MAP3K-like protein kinase [Oryza sativa (japonica
  misc_feature (1)..(231): Homolog of NCBI NO: 18425155 NR Description: putative protein; protein id: At5g67130.1, by cDNA: 38897., supported by cDNA: gi_15451187, supported by gi_20148448 [Arabidopsis thaliana] >gi|15451188|gb|AAK96865.1|
  misc_feature (1)..(231): Homolog of NCBI NO: 21593427 NR Description: unknown [Arabidopsis thaliana]
  misc_feature (1)..(231): Homolog of NCBI NO: 38345461 NR Description: OSJNBa0042L16.16 [Oryza sativa (japonica
  misc_feature (1)..(231): Homolog of NCBI NO: 15230348 NR Description: unknown protein; protein id: At3g19310.1
MLDTYDYEGDVWFCHSFDEQCFEFTKFNRAIDTFKEIFAFLTANPSEIVTLILEDYVKSQNGLTKVFTDSGLKKFWFPVQNMPIGGQDWPLVKDMVANNHRLIVFTSAKSKQETEGIAYQWNYMVENQYGDDGVKPDECSNRADSALLTDKTKALVSVNHFKTVPVKILTCEENSEQLLDMIKTCYVAAGNRWANFVAVNFYKRSNGGGTFQAIDKLNGELLCGRDDVHAC

SEQ ID NO: 72574 - DNA, 903 bp, Arabidopsis thaliana
  misc_feature (1)..(903): Ceres Seq. ID no. 4938449
  misc_feature: MA Experiment ID: 20000184 Result: Up-regulated in Transcription
  misc_feature: MA Experiment 20000184 PARAMETER Experiment Name: At_Shoots__P Parameter: Age (day) Value: 7
  misc_feature: MA Experiment 20000184 PARAMETER Experiment Name: At_Shoots__P Parameter: Tissue Value: Shoots vs. Whole Plant
  misc_feature: MA Experiment ID: 20000235 Result: Up-regulated in Transcription
  misc_feature: MA Experiment 20000235 PARAMETER Experiment Name: At_Siliques_P Parameter: Age (day) Value: 21
  misc_feature: MA Experiment 20000235 PARAMETER Experiment Name: At_Siliques_P Parameter: Organism Value: A. thaliana
  misc_feature: MA Experiment 20000235 PARAMETER Experiment Name: At_Siliques_P Parameter: Plant Line Value: WS
  misc_feature: MA Experiment 20000235 PARAMETER Experiment Name: At_Siliques_P Parameter: Tissue Value: 5-10mm Siliques vs. Whole Plant
atgcagcttggcgatcaatgctcatcggacgaagactgcaatgttggacttggttgttttaaatgcggtatagatgttgcaagatgcgttagatccaatatcacagatcagttctccattgtgaacaattcgatgccgtttaataaatatgcatttttgacgacccacaattcatatgccattgaagggaaagcgcttcatgtggcgacccaagaagatactatagttcaacaactcaacagtggtgttcgagcattgatgttggatacgtacgattacgaaggagacaatcgggcgatagacacattcaaggagatattcgcgttcttgacagcgaatccatcagagatcgtgacattgatcttggaggattacgtcaaatcgcaaaacgggttaaccaaagtatttaccgattccggtttgaagaaattttggtttccggttcaaaatatgcctataggtggccaagattggccgttggttaaggatatggtcgccaataaccaccggttaatcgttttcacttcagctaaatctaagcaagaaaccgaaggaatagcttaccagtggaattacatggtggaaaatcaatatggagacgatggagttaaaccagatgaatgtagcaatagagcagattctgcactgttaaccgataaaacgaaagctttggtttcggtaaaccatttcaagacagttccggttaagatattgacttgtgaggagaactctgagcaacttctcgatatgattaagacatgttacgtagccgcagggaaccgatgggccaattttgtcgccgtcaacttttacaagaggagtaatggaggaggaacgtttcaagcaattgataaactaaacggagagcttctatgtggacgtgatgatgtgcatgcttgttaa

SEQ ID NO: 72575 - protein, 300 aa, Arabidopsis thaliana
  peptide (1)..(300): Ceres Seq. ID no. 4938450
  misc_feature (1)..(300): Homolog of NCBI NO: 15222920 NR Description: unknown protein; protein id: At1g13680.1
  misc_feature (91)..(300): Homolog of NCBI NO: 25372964 NR Description: hypothetical protein F21F23.12 - Arabidopsis
  misc_feature (1)..(113): Homolog of NCBI NO: 25372964 NR Description: hypothetical protein F21F23.12 - Arabidopsis
  misc_feature (99)..(300): Homolog of NCBI NO: 38345461 NR Description: OSJNBa0042L16.16 [Oryza sativa (japonica
  misc_feature (2)..(96): Homolog of NCBI NO: 38345461 NR Description: OSJNBa0042L16.16 [Oryza sativa (japonica
  misc_feature (91)..(300): Homolog of NCBI NO: 15230348 NR Description: unknown protein; protein id: At3g19310.1
  misc_feature (91)..(300): Homolog of NCBI NO: 27754722 NR Description: unknown protein [Arabidopsis thaliana]
  misc_feature (4)..(96): Homolog of NCBI NO: 15230348 NR Description: unknown protein; protein id: At3g19310.1
  misc_feature (4)..(96): Homolog of NCBI NO: 27754722 NR Description: unknown protein [Arabidopsis thaliana]
  misc_feature (99)..(290): Homolog of NCBI NO: 34897530 NR Description: OSJNBa0042L16.2 [Oryza sativa (japonica
MQLGDQCSSDEDCNVGLGCFKCGIDVARCVRSNITDQFSIVNNSMPFNKYAFLTTHNSYAIEGKALHVATQEDTIVQQLNSGVRALMLDTYDYEGDNRAIDTFKEIFAFLTANPSEIVTLILEDYVKSQNGLTKVFTDSGLKKFWFPVQNMPIGGQDWPLVKDMVANNHRLIVFTSAKSKQETEGIAYQWNYMVENQYGDDGVKPDECSNRADSALLTDKTKALVSVNHFKTVPVKILTCEENSEQLLDMIKTCYVAAGNRWANFVAVNFYKRSNGGGTFQAIDKLNGELLCGRDDVHAC

SEQ ID NO: 72576 - protein, 256 aa, Arabidopsis thaliana
  peptide (1)..(256): Ceres Seq. ID no. 4938451
  misc_feature (1)..(256): Homolog of NCBI NO: 15222920 NR Description: unknown protein; protein id: At1g13680.1
  misc_feature (47)..(256): Homolog of NCBI NO: 25372964 NR Description: hypothetical protein F21F23.12 - Arabidopsis
  misc_feature (1)..(69): Homolog of NCBI NO: 25372964 NR Description: hypothetical protein F21F23.12 - Arabidopsis
  misc_feature (55)..(256): Homolog of NCBI NO: 38345461 NR Description: OSJNBa0042L16.16 [Oryza sativa (japonica
  misc_feature (1)..(52): Homolog of NCBI NO: 38345461 NR Description: OSJNBa0042L16.16 [Oryza sativa (japonica
  misc_feature (47)..(256): Homolog of NCBI NO: 15230348 NR Description: unknown protein; protein id: At3g19310.1
  misc_feature (47)..(256): Homolog of NCBI NO: 27754722 NR Description: unknown protein [Arabidopsis thaliana]
  misc_feature (1)..(52): Homolog of NCBI NO: 15230348 NR Description: unknown protein; protein id: At3g19310.1
  misc_feature (1)..(52): Homolog of NCBI NO: 27754722 NR Description: unknown protein [Arabidopsis thaliana]
  misc_feature (55)..(246): Homolog of NCBI NO: 34897530 NR Description: OSJNBa0042L16.2 [Oryza sativa (japonica
MPFNKYAFLTTHNSYAIEGKALHVATQEDTIVQQLNSGVRALMLDTYDYEGDNRAIDTFKEIFAFLTANPSEIVTLILEDYVKSQNGLTKVFTDSGLKKFWFPVQNMPIGGQDWPLVKDMVANNHRLIVFTSAKSKQETEGIAYQWNYMVENQYGDDGVKPDECSNRADSALLTDKTKALVSVNHFKTVPVKILTCEENSEQLLDMIKTCYVAAGNRWANFVAVNFYKRSNGGGTFQAIDKLNGELLCGRDDVHAC

SEQ ID NO: 72577 - protein, 214 aa, Arabidopsis thaliana
  peptide (1)..(214): Ceres Seq. ID no. 4938452
  misc_feature (1)..(214): Homolog of NCBI NO: 15222920 NR Description: unknown protein; protein id: At1g13680.1
  misc_feature (5)..(214): Homolog of NCBI NO: 25372964 NR Description: hypothetical protein F21F23.12 - Arabidopsis
  misc_feature (1)..(27): Homolog of NCBI NO: 25372964 NR Description: hypothetical protein F21F23.12 - Arabidopsis
  misc_feature (13)..(214): Homolog of NCBI NO: 38345461 NR Description: OSJNBa0042L16.16 [Oryza sativa (japonica
  misc_feature (5)..(214): Homolog of NCBI NO: 15230348 NR Description: unknown protein; protein id: At3g19310.1
  misc_feature (5)..(214): Homolog of NCBI NO: 27754722 NR Description: unknown protein [Arabidopsis thaliana]
  misc_feature (13)..(204): Homolog of NCBI NO: 34897530 NR Description: OSJNBa0042L16.2 [Oryza sativa (japonica
  misc_feature (1)..(214): Homolog of NCBI NO: 38637049 NR Description: MAP3K-like protein kinase [Oryza sativa (japonica
  misc_feature (5)..(214): Homolog of NCBI NO: 18402763 NR Description: expressed protein; protein id: At1g49740.1, by cDNA: 17743., supported by cDNA: gi_20260217 [Arabidopsis
  misc_feature (5)..(214): Homolog of NCBI NO: 25407778 NR Description: MAP3K-like protein kinase [imported] -
MLDTYDYEGDNRAIDTFKEIFAFLTANPSEIVTLILEDYVKSQNGLTKVFTDSGLKKFWFPVQNMPIGGQDWPLVKDMVANNHRLIVFTSAKSKQETEGIAYQWNYMVENQYGDDGVKPDECSNRADSALLTDKTKALVSVNHFKTVPVKILTCEENSEQLLDMIKTCYVAAGNRWANFVAVNFYKRSNGGGTFQAIDKLNGELLCGRDDVHAC

SEQ ID NO: 72578 - DNA, 1257 bp, Arabidopsis thaliana
  misc_feature (1)..(1257): Ceres Seq. ID no. 4938538
  misc_feature: MA Experiment ID: 108488 Result: Down-regulated in Transcription
  misc_feature: MA Experiment ID: 108501 Result: Down-regulated in Transcription
  misc_feature: MA Experiment 108501 PARAMETER Experiment Name: At_ap2_floral_buds_cDNA_P Parameter: Plant Line Value: ap2 (Ler.)
  misc_feature: MA Experiment 108501 PARAMETER Experiment Name: At_ap2_floral_buds_cDNA_P Parameter: Tissue Value: Closed Flower
  misc_feature: MA Experiment ID: 108577 Result: Down-regulated in Transcription
  misc_feature: MA Experiment 108577 PARAMETER Experiment Name: At_42deg_Heat_cDNA_P Parameter: Temperature (deg C) Value: 42 vs. 22
  misc_feature: MA Experiment 108577 PARAMETER Experiment Name: At_42deg_Heat_cDNA_P Parameter: Timepoint (hr) Value: 6
  misc_feature: MA Experiment 108577 PARAMETER Experiment Name: At_42deg_Heat_cDNA_P Parameter: Tissue Value: Aerial
atttcactttccgattttataaaattgattcttctcttcttcttaaacccatgaagagttcatgatttcttaagctcgcagcataatcgatggcgaatttgagtttgagcttgtatctaatcctccggatttacgctcttttgttgctgttcaatgtctccttcgctaaaacacttaaacgagacatgaaagctttgaatgagataaagaaattggtgggatggagattggtatactcttgggttggagatgatccttgtggcgatggagttttgcctccgtggtctggagttacttgctctaaagttggcgattatcgtgtcgtcgtcaagctagaagtgtattcaatgtcgatagttgggaatttcccaaaggctataacgaagctcttagatctcactgttttggatatgcataataacaaattaacaggtcctattcctccagaaattgggcggcttaagcggcttatcacactgaatttgaggtggaacaaacttcaacaggcactgcctcctgaaattggtggattgaagagtctaacttatctgtacctgagttttaacaatttcaaaggagaaatccccaaagaacttgcaaatctccatgagctccagtacttacatattcaggagaatcattttactgggcgaattccagcagagctgggaacattacaaaaacttcgccacttggatgctggcaacaataacttagtggggagtataagcgatctttttcgcattgaaggatgctttccagctcttagaaacctgtttttaaacaataattacttgactggaggactcccaaacaagcttgcaaatctaacaaacctggagatcttgtacttatctttcaacaaaatgactggagcaatacccgctgcacttgccagtataccaagactaactaacttgcacttggaccacaatctattcaatggaagtatacctgaagccttctacaagcatccaaacctaaaagatatgtacatagaagggaatgctttcaaatcagacgtgaaggcgattggtgcacataaggtcctcgaactttctgacacagacttccttgtttagttatgtatagcacaactttgtttcatttacagataggaatttggcagtgttaactggttatttaagattcattttctctgttaaagcgagattgtagttgatgtgttttctgaatgtaaaagattccttatccatgtatgaaaattgaatataaaaggaatctggtttgttcttt

SEQ ID NO: 72579 - protein, 330 aa, Arabidopsis thaliana; identical to SEQ ID NO: 42501
  peptide (1)..(330): Ceres Seq. ID no. 4938539
  misc_feature (273)..(296): Pfam Name: Leucine Rich Repeat Pfam Description: Leucine Rich Repeat
  misc_feature (1)..(330): Homolog of NCBI NO: 15222979 NR Description: disease resistance protein, putative; protein id: [Arabidopsis thaliana] >gi|26450219|dbj|BAC42228.1| putative
  misc_feature (8)..(330): Homolog of NCBI NO: 25402771 NR Description: protein F16A14.12 [imported] - Arabidopsis >gi|8778389|gb|AAF79397.1|AC068197_7 F16A14.12 [Arabidopsis
  misc_feature (7)..(330): Homolog of NCBI NO: 14626935 NR Description: leucine-rich repeat resistance protein-like
  misc_feature (10)..(330): Homolog of NCBI NO: 9757845 NR Description: leucine-rich repeat disease resistance
  misc_feature (127)..(330): Homolog of NCBI NO: 15240186 NR Description: Cf-5 disease resistance protein - like; protein
  misc_feature (10)..(318): Homolog of NCBI NO: 15240186 NR Description: Cf-5 disease resistance protein - like; protein
  misc_feature (66)..(329): Homolog of NCBI NO: 3894383 NR Description: disease resistance protein [Lycopersicon
  misc_feature (66)..(316): Homolog of NCBI NO: 7488988 NR Description: disease resistance protein Hcr2-5D - tomato
  misc_feature (66)..(317): Homolog of NCBI NO: 30692999 NR Description: leucine-rich repeat transmembrane protein kinase,
  misc_feature (66)..(317): Homolog of NCBI NO: 25403209 NR Description: probable Protein kinase [imported] - Arabidopsis >gi|10086466|gb|AAG12526.1|AC015446_7 Putative Protein kinase

SEQ ID NO: 72580 - protein, 298 aa, Arabidopsis thaliana; identical to SEQ ID NO: 42502
  peptide (1)..(298): Ceres Seq. ID no. 4938540
  misc_feature (241)..(264): Pfam Name: Leucine Rich Repeat Pfam Description: Leucine Rich Repeat
  misc_feature (1)..(298): Homolog of NCBI NO: 15222979 NR Description: disease resistance protein, putative; protein id: [Arabidopsis thaliana] >gi|26450219|dbj|BAC42228.1| putative
  misc_feature (1)..(298): Homolog of NCBI NO: 25402771 NR Description: protein F16A14.12 [imported] - Arabidopsis >gi|8778389|gb|AAF79397.1|AC068197_7 F16A14.12 [Arabidopsis
  misc_feature (1)..(298): Homolog of NCBI NO: 14626935 NR Description: leucine-rich repeat resistance protein-like
  misc_feature (1)..(298): Homolog of NCBI NO: 9757845 NR Description: leucine-rich repeat disease resistance
  misc_feature (95)..(298): Homolog of NCBI NO: 15240186 NR Description: Cf-5 disease resistance protein - like; protein
  misc_feature (1)..(286): Homolog of NCBI NO: 15240186 NR Description: Cf-5 disease resistance protein - like; protein
  misc_feature (34)..(297): Homolog of NCBI NO: 3894383 NR Description: disease resistance protein [Lycopersicon
  misc_feature (34)..(284): Homolog of NCBI NO: 7488988 NR Description: disease resistance protein Hcr2-5D - tomato
  misc_feature (34)..(285): Homolog of NCBI NO: 30692999 NR Description: leucine-rich repeat transmembrane protein kinase,
  misc_feature (34)..(285): Homolog of NCBI NO: 25403209 NR Description: probable Protein kinase [imported] - Arabidopsis >gi|10086466|gb|AAG12526.1|AC015446_7 Putative Protein kinase

SEQ ID NO: 72581 - protein, 244 aa, Arabidopsis thaliana; identical to SEQ ID NO: 42503
  peptide (1)..(244): Ceres Seq. ID no. 4938541
  misc_feature (187)..(210): Pfam Name: Leucine Rich Repeat Pfam Description: Leucine Rich Repeat
  misc_feature (1)..(244): Homolog of NCBI NO: 15222979 NR Description: disease resistance protein, putative; protein id: [Arabidopsis thaliana] >gi|26450219|dbj|BAC42228.1| putative
  misc_feature (1)..(244): Homolog of NCBI NO: 25402771 NR Description: protein F16A14.12 [imported] - Arabidopsis >gi|8778389|gb|AAF79397.1|AC068197_7 F16A14.12 [Arabidopsis
  misc_feature (1)..(244): Homolog of NCBI NO: 14626935 NR Description: leucine-rich repeat resistance protein-like
  misc_feature (1)..(244): Homolog of NCBI NO: 9757845 NR Description: leucine-rich repeat disease resistance
  misc_feature (41)..(244): Homolog of NCBI NO: 15240186 NR Description: Cf-5 disease resistance protein - like; protein
  misc_feature (1)..(232): Homolog of NCBI NO: 15240186 NR Description: Cf-5 disease resistance protein - like; protein
  misc_feature (1)..(243): Homolog of NCBI NO: 3894383 NR Description: disease resistance protein [Lycopersicon
  misc_feature (1)..(230): Homolog of NCBI NO: 7488988 NR Description: disease resistance protein Hcr2-5D - tomato
  misc_feature (1)..(231): Homolog of NCBI NO: 30692999 NR Description: leucine-rich repeat transmembrane protein kinase,
  misc_feature (1)..(231): Homolog of NCBI NO: 25403209 NR Description: probable Protein kinase [imported] - Arabidopsis >gi|10086466|gb|AAG12526.1|AC015446_7 Putative Protein kinase

SEQ ID NO: 72582 - DNA, 2550 bp, Arabidopsis thaliana
  misc_feature (1)..(2550): Ceres Seq. ID no. 4938713
  misc_feature: MA Experiment ID: 20000184 Result: Up-regulated in Transcription
  misc_feature: MA Experiment 20000184 PARAMETER Experiment Name: At_Shoots__P Parameter: Age (day) Value: 7
  misc_feature: MA Experiment 20000184 PARAMETER Experiment Name: At_Shoots__P Parameter: Tissue Value: Shoots vs. Whole Plant
  misc_feature: MA Experiment ID: 20001451 Result: Up-regulated in Transcription
  misc_feature: MA Experiment 20001451 PARAMETER Experiment Name: At_Far-red-induction_P Parameter: Age (day) Value: 7
  misc_feature: MA Experiment 20001451 PARAMETER Experiment Name: At_Far-red-induction_P Parameter: Light Value: Far-red vs. White
  misc_feature: MA Experiment 20001451 PARAMETER Experiment Name: At_Far-red-induction_P Parameter: Organism Value: A. thaliana
  misc_feature: MA Experiment 20001451 PARAMETER Experiment Name: At_Far-red-induction_P Parameter: Plant Line Value: Columbia
  misc_feature: MA Experiment 20001451 PARAMETER Experiment Name: At_Far-red-induction_P Parameter: Timepoint (hr) Value: 24
  misc_feature: MA Experiment 20001451 PARAMETER Experiment Name: At_Far-red-induction_P Parameter: Tissue Value: Whole Plant
  misc_feature: Pfam Name: Glyoxal_oxid_N Pfam Description: Glyoxal oxidase N-terminus
atgacgcaagaaagattcaagaacaaccttaacgccgtcgtgatatcattcttcttcttcttcctctgttccacgtcggatttgctccttccacgttcaccgttagctattctcaccggcgggaggtgggatcttctgcagccgagtgtaggtatatccgcaatgcacatgcagcttctacacaacaacaaagtcgtcatctttgaccgtacggattatggaccttcgaatgtttctctcccttctcaaacctgccaaaacgccaccgtttttgactgctctgctcattcaatactatacgacgtcgcttcaaatacctttcgcccacttacactacgttacgacacgtggtgctcttccggttctttaaacgcttccggttctttaatccaaaccggcggttatggcaacggcgaaagaactgtacgggttttcacaccttgcgacggaggagttggaagcgtttcgtgtgattggattgagaacagagcgtatctctcctctcgccggtggtattccaccaatcagattcttcccgatggtcggattatcatcgtcggcggaagaagagctttcaactacgagttttaccccaaggatccgggagaatccgttttcaatctcagattcttggcggagacgagagatccgaatgaagaaaacaatctttatccgtttcttcatcttctccccgacggtaatctcttcatcttcgccaatcggagatcgattttgttcgatttcgtcaatcaccgaatcatcaaggagtttccacagattcccggcggcgataaacggaattatcccagcactggctcctccgtgctcctccctctctttctcaccggagacattaacagaacgaagataactgctgaggttatggtatgcggcggtgctccgccgggagcgttcttcaaagcggcgaggacgattcctaaaatcttcgtcgcgggatcacgcacgtgtgggagattgaaagtgaccgacccggatccgaaatgggtcatggagcaaatgccatcgccacgtgtcatgtctgatatgttactgttaccaaacggtgacgttttgatcattaacggtgctgctaacggaaccgctggttgggaagacgcgacgaacgctgttctcaacccgattttatacttacccgaggagcctgaccagacccggagattcgaaattctcaccccgactcgaatccctagaatgtaccattcggcgtctcttcttctgtcagacggcagagtcttagtcggaggaagcaatcctcatcgaaattacaatttcacggcgaggccgtacccaacggagctcagcctcgaggcttatctcccgcgttacctggatccacagtacgcacgtgtgagaccgacgatcatcacggtggagctcgccgggaatatgttgtacggtcaggcttttgccgtaacgttcgcgattccggcattcggaatgttcgacggaggggtatcggtgaggctcgtggcgccgtcgttcagcactcactcaacggcgatgaaccagaggttgttggttttgcgcgtcaggcgcgtgagtcagttatctgttttcgcttataaagctgacgtggacgggcctactaactcctacgtggcaccacctgggtattatatgatgttcgtggttcaccgtggaattccgagtgtagctgtttgggaaatttcggttaagacccctactcctcgggagaagatatttgattttgtttgtcctagtagttgtgatggtttgatatgcttctacaatctttataaatcgggtattgtagtcaatccagccactagatggcatcgaagttttcctccacctaggtataaacaagtcattctcgacaaatcttctagtgaatatagtagtgtctttcctttgcctttgcttggattcggcaaagacatcatcaatggcacatacaagccggtttgcttatataattcactagaaagaggactaagaaacgctactacgtgtgaagttttcgactttaggaccaatgtttggaagtatattaccccttcttctccttaccggatcattgctttccatgatcctgtgtacgtagatgggtcgctgcattggttcaccgaatgcaaagaaatcaaagttctatctctagatcttcataccgagacttttcaagtaatctccaaagttccttttgacattgcaaattgtgacaacattgccatgtgcaacttggataaccgcttgtgcatatccgagaacaagtggcctgaccaagtggtatggtcgtttgattcatgcaacaagaaatggcacaaaatgtttacgttagatctgaatatattttctcatgggtttgggaagcactttttggcagtctcaccagtagcagttttggaaaagaagaagaaaaatggtaagttattgttatcttctaatctaatatataagcaacaaatggtggtacatgatcccgaaaccaaatcttatgattttgttttcaagagtaagaattctggaaatcatgtttgttatttcgagagtctagtctctattttataa

SEQ ID NO: 72583 - protein, 849 aa, Arabidopsis thaliana
  peptide (1)..(849): Ceres Seq. ID no. 4938714
  misc_feature: Pfam Name: Glyoxal_oxid_N Pfam Description: Glyoxal oxidase N-terminus
  misc_feature (1)..(561): Homolog of NCBI NO: 25352602 NR Description: F14L17.20 protein - Arabidopsis thaliana Weak similarity to glyoxal oxidase (glx2) from Phanerochaete
  misc_feature (8)..(561): Homolog of NCBI NO: 15230360 NR Description: putative protein; protein id: At3g57620.1 thaliana] >gi|7485502|pir||T06758 probable galactose oxidase (EC
  misc_feature (16)..(561): Homolog of NCBI NO: 15223699 NR Description: unknown protein; protein id: At1g19900.1, by cDNA: gi_16604506 [Arabidopsis thaliana]
  misc_feature (41)..(561): Homolog of NCBI NO: 15222300 NR Description: unknown protein; protein id: At1g75620.1 thaliana] >gi|9369366|gb|AAF87115.1|AC006434_11 F10A5.18
  misc_feature (55)..(561): Homolog of NCBI NO: 25352604 NR Description: hypothetical protein F6F9.4 [imported] - thaliana >gi|10086483|gb|AAG12543.1|AC007797_3 Unknown Protein
  misc_feature (40)..(561): Homolog of NCBI NO: 15241135 NR Description: putative protein; protein id: At5g19580.1,
  misc_feature (40)..(561): Homolog of NCBI NO: 19310437 NR Description: AT5g19580/T20D1_100 [Arabidopsis thaliana]
  misc_feature (41)..(561): Homolog of NCBI NO: 15220398 NR Description: glyoxal oxidase (glx1), putative; protein id: [Arabidopsis thaliana] >gi|9828629|gb|AAG00252.1|AC002130_17 [Arabidopsis thaliana] >gi|27754377|gb|AAO22637.1| putative
  misc_feature (28)..(561): Homolog of NCBI NO: 34911116 NR Description: putative glyoxal oxidase [Oryza sativa (japonica group)] >gi|20161084|dbj|BAB90014.1| putative glyoxal oxidase
  misc_feature (564)..(848): Homolog of NCBI NO: 15217570 NR Description: hypothetical protein; protein id: At1g09650.1
MTQERFKNNLNAVVISFFFFFLCSTSDLLLPRSPLAILTGGRWDLLQPSVGISAMHMQLLHNNKVVIFDRTDYGPSNVSLPSQTCQNATVFDCSAHSILYDVASNTFRPLTLRYDTWCSSGSLNASGSLIQTGGYGNGERTVRVFTPCDGGVGSVSCDWIENRAYLSSRRWYSTNQILPDGRIIIVGGRRAFNYEFYPKDPGESVFNLRFLAETRDPNEENNLYPFLHLLPDGNLFIFANRRSILFDFVNHRIIKEFPQIPGGDKRNYPSTGSSVLLPLFLTGDINRTKITAEVMVCGGAPPGAFFKAARTIPKIFVAGSRTCGRLKVTDPDPKWVMEQMPSPRVMSDMLLLPNGDVLIINGAANGTAGWEDATNAVLNPILYLPEEPDQTRRFEILTPTRIPRMYHSASLLLSDGRVLVGGSNPHRNYNFTARPYPTELSLEAYLPRYLDPQYARVRPTIITVELAGNMLYGQAFAVTFAIPAFGMFDGGVSVRLVAPSFSTHSTAMNQRLLVLRVRRVSQLSVFAYKADVDGPTNSYVAPPGYYMMFVVHRGIPSVAVWEISVKTPTPREKIFDFVCPSSCDGLICFYNLYKSGIVVNPATRWHRSFPPPRYKQVILDKSSSEYSSVFPLPLLGFGKDIINGTYKPVCLYNSLERGLRNATTCEVFDFRTNVWKYITPSSPYRIIAFHDPVYVDGSLHWFTECKEIKVLSLDLHTETFQVISKVPFDIANCDNIAMCNLDNRLCISENKWPDQVVWSFDSCNKKWHKMFTLDLNIFSHGFGKHFLAVSPVAVLEKKKKNGKLLLSSNLIYKQQMVVHDPETKSYDFVFKSKNSGNHVCYFESLVSIL

SEQ ID NO: 72584 - protein, 795 aa, Arabidopsis thaliana
  peptide (1)..(795): Ceres Seq. ID no. 4938715
  misc_feature: Pfam Name: Glyoxal_oxid_N Pfam Description: Glyoxal oxidase N-terminus
  misc_feature (1)..(507): Homolog of NCBI NO: 25352602 NR Description: F14L17.20 protein - Arabidopsis thaliana Weak similarity to glyoxal oxidase (glx2) from Phanerochaete
  misc_feature (1)..(507): Homolog of NCBI NO: 15230360 NR Description: putative protein; protein id: At3g57620.1 thaliana] >gi|7485502|pir||T06758 probable galactose oxidase (EC
  misc_feature (1)..(507): Homolog of NCBI NO: 15223699 NR Description: unknown protein; protein id: At1g19900.1, by cDNA: gi_16604506 [Arabidopsis thaliana]
  misc_feature (1)..(507): Homolog of NCBI NO: 15222300 NR Description: unknown protein; protein id: At1g75620.1 thaliana] >gi|9369366|gb|AAF87115.1|AC006434_11 F10A5.18
  misc_feature (1)..(507): Homolog of NCBI NO: 25352604 NR Description: hypothetical protein F6F9.4 [imported] - thaliana >gi|10086483|gb|AAG12543.1|AC007797_3 Unknown Protein
  misc_feature (1)..(507): Homolog of NCBI NO: 15241135 NR Description: putative protein; protein id: At5g19580.1,
  misc_feature (1)..(507): Homolog of NCBI NO: 19310437 NR Description: AT5g19580/T20D1_100 [Arabidopsis thaliana]
  misc_feature (1)..(507): Homolog of NCBI NO: 15220398 NR Description: glyoxal oxidase (glx1), putative; protein id: [Arabidopsis thaliana] >gi|9828629|gb|AAG00252.1|AC002130_17 [Arabidopsis thaliana] >gi|27754377|gb|AAO22637.1| putative
  misc_feature (1)..(507): Homolog of NCBI NO: 34911116 NR Description: putative glyoxal oxidase [Oryza sativa (japonica group)] >gi|20161084|dbj|BAB90014.1| putative glyoxal oxidase
  misc_feature (510)..(794): Homolog of NCBI NO: 15217570 NR Description: hypothetical protein; protein id: At1g09650.1
MHMQLLHNNKVVIFDRTDYGPSNVSLPSQTCQNATVFDCSAHSILYDVASNTFRPLTLRYDTWCSSGSLNASGSLIQTGGYGNGERTVRVFTPCDGGVGSVSCDWIENRAYLSSRRWYSTNQILPDGRIIIVGGRRAFNYEFYPKDPGESVFNLRFLAETRDPNEENNLYPFLHLLPDGNLFIFANRRSILFDFVNHRIIKEFPQIPGGDKRNYPSTGSSVLLPLFLTGDINRTKITAEVMVCGGAPPGAFFKAARTIPKIFVAGSRTCGRLKVTDPDPKWVMEQMPSPRVMSDMLLLPNGDVLIINGAANGTAGWEDATNAVLNPILYLPEEPDQTRRFEILTPTRIPRMYHSASLLLSDGRVLVGGSNPHRNYNFTARPYPTELSLEAYLPRYLDPQYARVRPTIITVELAGNMLYGQAFAVTFAIPAFGMFDGGVSVRLVAPSFSTHSTAMNQRLLVLRVRRVSQLSVFAYKADVDGPTNSYVAPPGYYMMFVVHRGIPSVAVWEISVKTPTPREKIFDFVCPSSCDGLICFYNLYKSGIVVNPATRWHRSFPPPRYKQVILDKSSSEYSSVFPLPLLGFGKDIINGTYKPVCLYNSLERGLRNATTCEVFDFRTNVWKYITPSSPYRIIAFHDPVYVDGSLHWFTECKEIKVLSLDLHTETFQVISKVPFDIANCDNIAMCNLDNRLCISENKWPDQVVWSFDSCNKKWHKMFTLDLNIFSHGFGKHFLAVSPVAVLEKKKKNGKLLLSSNLIYKQQMVVHDPETKSYDFVFKSKNSGNHVCYFESLVSIL

SEQ ID NO: 72585 - protein, 793 aa, Arabidopsis thaliana
  peptide (1)..(793): Ceres Seq. ID no. 4938716
  misc_feature: Pfam Name: Glyoxal_oxid_N Pfam Description: Glyoxal oxidase N-terminus
  misc_feature (1)..(505): Homolog of NCBI NO: 25352602 NR Description: F14L17.20 protein - Arabidopsis thaliana Weak similarity to glyoxal oxidase (glx2) from Phanerochaete
  misc_feature (1)..(505): Homolog of NCBI NO: 15230360 NR Description: putative protein; protein id: At3g57620.1 thaliana] >gi|7485502|pir||T06758 probable galactose oxidase (EC
  misc_feature (1)..(505): Homolog of NCBI NO: 15223699 NR Description: unknown protein; protein id: At1g19900.1, by cDNA: gi_16604506 [Arabidopsis thaliana]
  misc_feature (1)..(505): Homolog of NCBI NO: 15222300 NR Description: unknown protein; protein id: At1g75620.1 thaliana] >gi|9369366|gb|AAF87115.1|AC006434_11 F10A5.18
  misc_feature (1)..(505): Homolog of NCBI NO: 25352604 NR Description: hypothetical protein F6F9.4 [imported] - thaliana >gi|10086483|gb|AAG12543.1|AC007797_3 Unknown Protein
  misc_feature (1)..(505): Homolog of NCBI NO: 15241135 NR Description: putative protein; protein id: At5g19580.1,
  misc_feature (1)..(505): Homolog of NCBI NO: 19310437 NR Description: AT5g19580/T20D1_100 [Arabidopsis thaliana]
  misc_feature (1)..(505): Homolog of NCBI NO: 15220398 NR Description: glyoxal oxidase (glx1), putative; protein id: [Arabidopsis thaliana] >gi|9828629|gb|AAG00252.1|AC002130_17 [Arabidopsis thaliana] >gi|27754377|gb|AAO22637.1| putative
  misc_feature (1)..(505): Homolog of NCBI NO: 34911116 NR Description: putative glyoxal oxidase [Oryza sativa (japonica group)] >gi|20161084|dbj|BAB90014.1| putative glyoxal oxidase
  misc_feature (508)..(792): Homolog of NCBI NO: 15217570 NR Description: hypothetical protein; protein id: At1g09650.1
MQLLHNNKVVIFDRTDYGPSNVSLPSQTCQNATVFDCSAHSILYDVASNTFRPLTLRYDTWCSSGSLNASGSLIQTGGYGNGERTVRVFTPCDGGVGSVSCDWIENRAYLSSRRWYSTNQILPDGRIIIVGGRRAFNYEFYPKDPGESVFNLRFLAETRDPNEENNLYPFLHLLPDGNLFIFANRRSILFDFVNHRIIKEFPQIPGGDKRNYPSTGSSVLLPLFLTGDINRTKITAEVMVCGGAPPGAFFKAARTIPKIFVAGSRTCGRLKVTDPDPKWVMEQMPSPRVMSDMLLLPNGDVLIINGAANGTAGWEDATNAVLNPILYLPEEPDQTRRFEILTPTRIPRMYHSASLLLSDGRVLVGGSNPHRNYNFTARPYPTELSLEAYLPRYLDPQYARVRPTIITVELAGNMLYGQAFAVTFAIPAFGMFDGGVSVRLVAPSFSTHSTAMNQRLLVLRVRRVSQLSVFAYKADVDGPTNSYVAPPGYYMMFVVHRGIPSVAVWEISVKTPTPREKIFDFVCPSSCDGLICFYNLYKSGIVVNPATRWHRSFPPPRYKQVILDKSSSEYSSVFPLPLLGFGKDIINGTYKPVCLYNSLERGLRNATTCEVFDFRTNVWKYITPSSPYRIIAFHDPVYVDGSLHWFTECKEIKVLSLDLHTETFQVISKVPFDIANCDNIAMCNLDNRLCISENKWPDQVVWSFDSCNKKWHKMFTLDLNIFSHGFGKHFLAVSPVAVLEKKKKNGKLLLSSNLIYKQQMVVHDPETKSYDFVFKSKNSGNHVCYFESLVSIL

SEQ ID NO: 72586 - DNA, 1689 bp, Arabidopsis thaliana
  misc_feature (1)..(1689): Ceres Seq. ID no. 4938735
  misc_feature: MA Experiment ID: 20001457 Result: Up-regulated in Transcription
  misc_feature: MA Experiment 20001457 PARAMETER Experiment Name: At_50mM_NH4NO3_L-to-H_P Parameter: Age (day) Value: Undefined
  misc_feature: MA Experiment 20001457 PARAMETER Experiment Name: At_50mM_NH4NO3_L-to-H_P Parameter: Organism Value: Undefined
  misc_feature: MA Experiment 20001457 PARAMETER Experiment Name: At_50mM_NH4NO3_L-to-H_P Parameter: Plant Line Value: Undefined
  misc_feature: MA Experiment 20001457 PARAMETER Experiment Name: At_50mM_NH4NO3_L-to-H_P Parameter: Timepoint (hr) Value: 0.5
  misc_feature: MA Experiment 20001457 PARAMETER Experiment Name: At_50mM_NH4NO3_L-to-H_P Parameter: Tissue Value: Siliques
  misc_feature: MA Experiment 20001457 PARAMETER Experiment Name: At_50mM_NH4NO3_L-to-H_P Parameter: Treatment Value: 50mM NH4NO3 vs. 100mM Manitol
atgatttcccaggtggagagagatctgtcgattcaaaatcggcttccgggaagcgatcacactactccttctccgccaacatctcctcatctctgccggagccggtcgaaatcctcctctgtctccgggcaacagcaaagtcggaacgtcgctcaccgtctctcatggatcattttatctgttcttctccggcgtcagggaattctccttttcgctcctatcatctacatctcctgtatgctttttcacctacacgcggcgtcgtttgatgcctctcccattatccaccgccgtcctgctccgggatccgtctaccggagccctcaggtttacgctaggcttcgcggcgagattgaagccgataataccacggctgatgcgatatcaacaatttggaagcgttcctataaaggtgtagaatggaagccatgtgtgaacatgtctactggagttttacctgtgtcaaatggtttcatatttattgaggcaaatggaggcttgaatcagcagcggacttcgatatgcaatgcggttgctgtggcaggctaccttaatgcgacccttgtaattcccaactttcactatcacagcatatggaaagatccgagtaaatttggggacatctatgatgaagagtactttatcgataccttagcaaatgatgtgcgggtggtcgatacagttcctgaatacttgatggagcgttttgactataacttgacaaatgtctacaacttcagagttaaagcatgggcacccacctcctattaccgggactcagtcctgccaaagctgcttgaagaaaaggttataagaatttccccatttgcaaatagactttcgtttgatgctcctcgagctgtccagagatttagatgtttggcgaataatgtagccttgcgattttcaaaacccatactgacccaaggagaaacattggtgaacaaaatgaagggtcttagtgcaaacaacgccgggaaatacgtttctgtgcatcttcgttttgaagaggatatggttgcgttctcttgttgtgtatttgatggtggagaccaagaaaaacaagacatgattgccgctagagaacgaggatggaaagggaagttcacaaaaccgggccgtgtgatacgaccaggagctaacaggctcaatgggaaatgccctttaactcctttagaggtcggtttgatgcttagaggaatgggcttcaacaaaagtacatatatattccttgccgctggcccgatatatagcgcaaatagaactatggccccactactcgagatgttccctaatctacagacaaaggagatgcttgcttctgaggaagacctggctccttttaagaacttctcctcgagaatggctgcaatagattacacggtgtgtctccacagtgaggtatttgtgacaacacaaggtggaaacttccctcatttcctcatggggcatcggaggtatttgtttggaggacattcaaagacgattcagccagacaagcgaaagttagccgtactctttgacaatcccaagttgggatggaaaagttttaaacggcaaatgctaagtatgaggtcccatagtgactccaaggggtttgagctgaaacgatcaagtgactccatttacatattcccttgtcctgattgtatgtgccggaagaacaaaacaacagcatcagccacctga

SEQ ID NO: 72587 - protein, 562 aa, Arabidopsis thaliana
  peptide (1)..(562): Ceres Seq. ID no. 4938736
  misc_feature (160)..(517): Pfam Name: Plant protein family Pfam Description: Plant protein family
  misc_feature (1)..(562): Homolog of NCBI NO: 15221017 NR Description: auxin-independent growth promoter, putative;
  misc_feature (80)..(562): Homolog of NCBI NO: 8778220 NR Description: F10B6.36 [Arabidopsis thaliana]
  misc_feature (12)..(558): Homolog of NCBI NO: 15226282 NR Description: similar to axi 1 protein from Nicotiana tabacum; id: At2g01480.1, supported by cDNA: gi_20260419 [Arabidopsis >gi|25410909|pir||C84425 similar to axi 1 protein from Nicotiana
  misc_feature (17)..(560): Homolog of NCBI NO: 34908166 NR Description: axi 1-like protein [Oryza sativa (japonica
  misc_feature (22)..(554): Homolog of NCBI NO: 18399706 NR Description: growth regulator, putative; protein id: supported by cDNA: gi_15293042 [Arabidopsis thaliana]
  misc_feature (24)..(554): Homolog of NCBI NO: 15293043 NR Description: putative growth regulator protein [Arabidopsis
  misc_feature (32)..(552): Homolog of NCBI NO: 22329977 NR Description: similar to growth regulator, putative; protein At1g38131.1 [Arabidopsis thaliana] >gi|27311577|gb|AAO00754.1|
  misc_feature (207)..(396): Homolog of NCBI NO: 25403440 NR Description: protein F15O4.45 [imported] - Arabidopsis >gi|8778357|gb|AAF79365.1|AC007887_24 F15O4.45 [Arabidopsis
  misc_feature (22)..(201): Homolog of NCBI NO: 25403440 NR Description: protein F15O4.45 [imported] - Arabidopsis >gi|8778357|gb|AAF79365.1|AC007887_24 F15O4.45 [Arabidopsis
  misc_feature (394)..(554): Homolog of NCBI NO: 25403440 NR Description: protein F15O4.45 [imported] - Arabidopsis >gi|8778357|gb|AAF79365.1|AC007887_24 F15O4.45 [Arabidopsis
MISQVERDLSIQNRLPGSDHTTPSPPTSPHLCRSRSKSSSVSGQQQSRNVAHRLSWIILSVLLRRQGILLFAPIIYISCMLFHLHAASFDASPIIHRRPAPGSVYRSPQVYARLRGEIEADNTTADAISTIWKRSYKGVEWKPCVNMSTGVLPVSNGFIFIEANGGLNQQRTSICNAVAVAGYLNATLVIPNFHYHSIWKDPSKFGDIYDEEYFIDTLANDVRVVDTVPEYLMERFDYNLTNVYNFRVKAWAPTSYYRDSVLPKLLEEKVIRISPFANRLSFDAPRAVQRFRCLANNVALRFSKPILTQGETLVNKMKGLSANNAGKYVSVHLRFEEDMVAFSCCVFDGGDQEKQDMIAARERGWKGKFTKPGRVIRPGANRLNGKCPLTPLEVGLMLRGMGFNKSTYIFLAAGPIYSANRTMAPLLEMFPNLQTKEMLASEEDLAPFKNFSSRMAAIDYTVCLHSEVFVTTQGGNFPHFLMGHRRYLFGGHSKTIQPDKRKLAVLFDNPKLGWKSFKRQMLSMRSHSDSKGFELKRSSDSIYIFPCPDCMCRKNKTTASAT

SEQ ID NO: 72588 - protein, 483 aa, Arabidopsis thaliana
  peptide (1)..(483): Ceres Seq. ID no. 4938737
  misc_feature (81)..(438): Pfam Name: Plant protein family Pfam Description: Plant protein family
  misc_feature (1)..(483): Homolog of NCBI NO: 15221017 NR Description: auxin-independent growth promoter, putative;
  misc_feature (1)..(483): Homolog of NCBI NO: 8778220 NR Description: F10B6.36 [Arabidopsis thaliana]
  misc_feature (1)..(479): Homolog of NCBI NO: 15226282 NR Description: similar to axi 1 protein from Nicotiana tabacum; id: At2g01480.1, supported by cDNA: gi_20260419 [Arabidopsis >gi|25410909|pir||C84425 similar to axi 1 protein from Nicotiana
  misc_feature (1)..(481): Homolog of NCBI NO: 34908166 NR Description: axi 1-like protein [Oryza sativa (japonica
  misc_feature (1)..(475): Homolog of NCBI NO: 18399706 NR Description: growth regulator, putative; protein id: supported by cDNA: gi_15293042 [Arabidopsis thaliana]
  misc_feature (1)..(475): Homolog of NCBI NO: 15293043 NR Description: putative growth regulator protein [Arabidopsis
  misc_feature (1)..(473): Homolog of NCBI NO: 22329977 NR Description: similar to growth regulator, putative; protein At1g38131.1 [Arabidopsis thaliana] >gi|27311577|gb|AAO00754.1|
  misc_feature (128)..(317): Homolog of NCBI NO: 25403440 NR Description: protein F15O4.45 [imported] - Arabidopsis >gi|8778357|gb|AAF79365.1|AC007887_24 F15O4.45 [Arabidopsis
  misc_feature (1)..(122): Homolog of NCBI NO: 25403440 NR Description: protein F15O4.45 [imported] - Arabidopsis >gi|8778357|gb|AAF79365.1|AC007887_24 F15O4.45 [Arabidopsis
  misc_feature (315)..(475): Homolog of NCBI NO: 25403440 NR Description: protein F15O4.45 [imported] - Arabidopsis >gi|8778357|gb|AAF79365.1|AC007887_24 F15O4.45 [Arabidopsis
MLFHLHAASFDASPIIHRRPAPGSVYRSPQVYARLRGEIEADNTTADAISTIWKRSYKGVEWKPCVNMSTGVLPVSNGFIFIEANGGLNQQRTSICNAVAVAGYLNATLVIPNFHYHSIWKDPSKFGDIYDEEYFIDTLANDVRVVDTVPEYLMERFDYNLTNVYNFRVKAWAPTSYYRDSVLPKLLEEKVIRISPFANRLSFDAPRAVQRFRCLANNVALRFSKPILTQGETLVNKMKGLSANNAGKYVSVHLRFEEDMVAFSCCVFDGGDQEKQDMIAARERGWKGKFTKPGRVIRPGANRLNGKCPLTPLEVGLMLRGMGFNKSTYIFLAAGPIYSANRTMAPLLEMFPNLQTKEMLASEEDLAPFKNFSSRMAAIDYTVCLHSEVFVTTQGGNFPHFLMGHRRYLFGGHSKTIQPDKRKLAVLFDNPKLGWKSFKRQMLSMRSHSDSKGFELKRSSDSIYIFPCPDCMCRKNKTTASAT

SEQ ID NO: 72589 - protein, 416 aa, Arabidopsis thaliana
  peptide (1)..(416): Ceres Seq. ID no. 4938738
  misc_feature (14)..(371): Pfam Name: Plant protein family Pfam Description: Plant protein family
  misc_feature (1)..(416): Homolog of NCBI NO: 15221017 NR Description: auxin-independent growth promoter, putative;
  misc_feature (1)..(416): Homolog of NCBI NO: 8778220 NR Description: F10B6.36 [Arabidopsis thaliana]
  misc_feature (1)..(412): Homolog of NCBI NO: 15226282 NR Description: similar to axi 1 protein from Nicotiana tabacum; id: At2g01480.1, supported by cDNA: gi_20260419 [Arabidopsis >gi|25410909|pir||C84425 similar to axi 1 protein from Nicotiana
  misc_feature (1)..(414): Homolog of NCBI NO: 34908166 NR Description: axi 1-like protein [Oryza sativa (japonica
  misc_feature (1)..(408): Homolog of NCBI NO: 18399706 NR Description: growth regulator, putative; protein id: supported by cDNA: gi_15293042 [Arabidopsis thaliana]
  misc_feature (1)..(408): Homolog of NCBI NO: 15293043 NR Description: putative growth regulator protein [Arabidopsis
  misc_feature (1)..(406): Homolog of NCBI NO: 22329977 NR Description: similar to growth regulator, putative; protein At1g38131.1 [Arabidopsis thaliana] >gi|27311577|gb|AAO00754.1|
  misc_feature (61)..(250): Homolog of NCBI NO: 25403440 NR Description: protein F15O4.45 [imported] - Arabidopsis >gi|8778357|gb|AAF79365.1|AC007887_24 F15O4.45 [Arabidopsis
  misc_feature (1)..(55): Homolog of NCBI NO: 25403440 NR Description: protein F15O4.45 [imported] - Arabidopsis >gi|8778357|gb|AAF79365.1|AC007887_24 F15O4.45 [Arabidopsis
  misc_feature (248)..(408): Homolog of NCBI NO: 25403440 NR Description: protein F15O4.45 [imported] - Arabidopsis >gi|8778357|gb|AAF79365.1|AC007887_24 F15O4.45 [Arabidopsis
MSTGVLPVSNGFIFIEANGGLNQQRTSICNAVAVAGYLNATLVIPNFHYHSIWKDPSKFGDIYDEEYFIDTLANDVRVVDTVPEYLMERFDYNLTNVYNFRVKAWAPTSYYRDSVLPKLLEEKVIRISPFANRLSFDAPRAVQRFRCLANNVALRFSKPILTQGETLVNKMKGLSANNAGKYVSVHLRFEEDMVAFSCCVFDGGDQEKQDMIAARERGWKGKFTKPGRVIRPGANRLNGKCPLTPLEVGLMLRGMGFNKSTYIFLAAGPIYSANRTMAPLLEMFPNLQTKEMLASEEDLAPFKNFSSRMAAIDYTVCLHSEVFVTTQGGNFPHFLMGHRRYLFGGHSKTIQPDKRKLAVLFDNPKLGWKSFKRQMLSMRSHSDSKGFELKRSSDSIYIFPCPDCMCRKNKTTASAT

SEQ ID NO: 72590 - DNA, 1269 bp, Arabidopsis thaliana
  misc_feature (1)..(1269): Ceres Seq. ID no. 4938972
  misc_feature: MA Experiment ID: 20000315 Result: Down-regulated in Transcription
  misc_feature: MA Experiment 20000315 PARAMETER Experiment Name: At_14day_Shoots-Roots_Sub_P Parameter: Age (day) Value: 14
  misc_feature: MA Experiment 20000315 PARAMETER Experiment Name: At_14day_Shoots-Roots_Sub_P Parameter: Organism Value: A. thaliana
  misc_feature: MA Experiment 20000315 PARAMETER Experiment Name: At_14day_Shoots-Roots_Sub_P Parameter: Plant Line Value: WS
  misc_feature: MA Experiment 20000315 PARAMETER Experiment Name: At_14day_Shoots-Roots_Sub_P Parameter: Tissue Value: Shoots vs. Whole Plant
atggctgagaagcaagttttctcgagagtcctggatataggattggttaagcaaggttatttgttctctttgaatcacgcacgggtggtggttcttatggcgacaatgtatgcaatgtactgtgtcaaagtcagacttggatggcctggagttattctctcgatgaatcttgcattcttgtccaacgatatatttatttgtcttcttcaatggtgtgatactgttagtgaaaaaacacaagtggaggagccaacgaaacctgaaactgtaatagacgaagagtttccaggagagtttgagtattcttctgttcctgctgaagaagcagagaaaaaggttcatgaagataagtcgtccactaagccagcatcatcgtcaactgttgtcagtaacatgaaggagatttctactgttaaggtagtcaaaatagaaacagattcagcggatgagatgaaacgaattcttgatagtttgaatcactatgaagcattggggctccctctgtttaaaaagattgatgccgcattgcttaagaaagactatagaaagaaggcaatgctggttcatccggataaaaatatgggaagtcctttggcaagtgaatcattcaagaaacttcaaagtgcctacgaggttctttcggattctgttaaaagaagagattatgatgagctgttaaagaaggaagaatctcggaccaagattgtctgtcagtcctcgcacgcctcttctcatcagaatagtgctgcttatcgatcagaagagtcaaggcgcatacactgtacaaaatgcgggaattcacacatttgggtatgtaccaacaggagtaaggcaaaggccagatggtgtcaggagtgtggtcaatatcatcaagccaaagatggtgacggatgggttgaacacaaagggactctggtattcgagaaagcacataagattgaaataccacgagcttttgtttgcgctgagggaaaagtctttgatgtctcagaatgggctatttgtcagggaatggcgtgtagaccaaatacacataggccaagtttccatgtgaacatggtcggtttagaaaaggcaacacagagatcaaagtcgagcaggttcccgtgggatcttgatgtggagatgatggacgaggatgaggaagagtttgagttatggcttcaacaagctctagcttccggtctattctgtgaaacatcaaaacgcagaaaaagctggagtcctttcaagttaaccaagaaacaatcccgaagaacatcgacttga

SEQ ID NO: 72591 - protein, 422 aa, Arabidopsis thaliana
  peptide (1)..(422): Ceres Seq. ID no. 4938973
  misc_feature (159)..(226): Pfam Name: DnaJ domain Pfam Description: DnaJ domain
  misc_feature (46)..(422): Homolog of NCBI NO: 15219309 NR Description: S-locus protein, putative; protein id:
  misc_feature (1)..(18): Homolog of NCBI NO: 15219309 NR Description: S-locus protein, putative; protein id:
  misc_feature (36)..(422): Homolog of NCBI NO: 25518299 NR Description: hypothetical protein F19K19.3 - Arabidopsis >gi|9989051|gb|AAG10814.1|AC011808_2 Similar to DNAJ proteins
  misc_feature (19)..(419): Homolog of NCBI NO: 7487909 NR Description: hypothetical protein YUP8H12R.35 - Arabidopsis >gi|3152572|gb|AAC17053.1| Contains homology to DNAJ heatshock
  misc_feature (27)..(422): Homolog of NCBI NO: 6069485 NR Description: S-locus protein 5 [Brassica rapa]
  misc_feature (120)..(422): Homolog of NCBI NO: 7487909 NR Description: hypothetical protein YUP8H12R.35 - Arabidopsis >gi|3152572|gb|AAC17053.1| Contains homology to DNAJ heatshock
  misc_feature (19)..(260): Homolog of NCBI NO: 30699386 NR Description: S-locus protein, putative [Arabidopsis thaliana]
  misc_feature (15)..(366): Homolog of NCBI NO: 31249740 NR Description: putative heat shock protein [Oryza sativa
  misc_feature (144)..(353): Homolog of NCBI NO: 15240510 NR Description: putative protein; protein id: At5g49580.1 thaliana] >gi|10177624|dbj|BAB10771.1| contains similarity to
  misc_feature (19)..(95): Homolog of NCBI NO: 15240510 NR Description: putative protein; protein id: At5g49580.1 thaliana] >gi|10177624|dbj|BAB10771.1| contains similarity to
MAEKQVFSRVLDIGLVKQGYLFSLNHARVVVLMATMYAMYCVKVRLGWPGVILSMNLAFLSNDIFICLLQWCDTVSEKTQVEEPTKPETVIDEEFPGEFEYSSVPAEEAEKKVHEDKSSTKPASSSTVVSNMKEISTVKVVKIETDSADEMKRILDSLNHYEALGLPLFKKIDAALLKKDYRKKAMLVHPDKNMGSPLASESFKKLQSAYEVLSDSVKRRDYDELLKKEESRTKIVCQSSHASSHQNSAAYRSEESRRIHCTKCGNSHIWVCTNRSKAKARWCQECGQYHQAKDGDGWVEHKGTLVFEKAHKIEIPRAFVCAEGKVFDVSEWAICQGMACRPNTHRPSFHVNMVGLEKATQRSKSSRFPWDLDVEMMDEDEEEFELWLQQALASGLFCETSKRRKSWSPFKLTKKQSRRTST

SEQ ID NO: 72592 - protein, 390 aa, Arabidopsis thaliana
  peptide (1)..(390): Ceres Seq. ID no. 4938974
  misc_feature (127)..(194): Pfam Name: DnaJ domain Pfam Description: DnaJ domain
  misc_feature (14)..(390): Homolog of NCBI NO: 15219309 NR Description: S-locus protein, putative; protein id:
  misc_feature (4)..(390): Homolog of NCBI NO: 25518299 NR Description: hypothetical protein F19K19.3 - Arabidopsis >gi|9989051|gb|AAG10814.1|AC011808_2 Similar to DNAJ proteins
  misc_feature (1)..(387): Homolog of NCBI NO: 7487909 NR Description: hypothetical protein YUP8H12R.35 - Arabidopsis >gi|3152572|gb|AAC17053.1| Contains homology to DNAJ heatshock
  misc_feature (1)..(390): Homolog of NCBI NO: 6069485 NR Description: S-locus protein 5 [Brassica rapa]
  misc_feature (88)..(390): Homolog of NCBI NO: 7487909 NR Description: hypothetical protein YUP8H12R.35 - Arabidopsis >gi|3152572|gb|AAC17053.1| Contains homology to DNAJ heatshock
  misc_feature (1)..(228): Homolog of NCBI NO: 30699386 NR Description: S-locus protein, putative [Arabidopsis thaliana]
  misc_feature (1)..(334): Homolog of NCBI NO: 31249740 NR Description: putative heat shock protein [Oryza sativa
  misc_feature (112)..(321): Homolog of NCBI NO: 15240510 NR Description: putative protein; protein id: At5g49580.1 thaliana] >gi|10177624|dbj|BAB10771.1| contains similarity to
  misc_feature (1)..(63): Homolog of NCBI NO: 15240510 NR Description: putative protein; protein id: At5g49580.1 thaliana] >gi|10177624|dbj|BAB10771.1| contains similarity to
  misc_feature (208)..(389): Homolog of NCBI NO: 32400881 NR Description: s-locus protein 5 [Triticum aestivum]
MATMYAMYCVKVRLGWPGVILSMNLAFLSNDIFICLLQWCDTVSEKTQVEEPTKPETVIDEEFPGEFEYSSVPAEEAEKKVHEDKSSTKPASSSTVVSNMKEISTVKVVKIETDSADEMKRILDSLNHYEALGLPLFKKIDAALLKKDYRKKAMLVHPDKNMGSPLASESFKKLQSAYEVLSDSVKRRDYDELLKKEESRTKIVCQSSHASSHQNSAAYRSEESRRIHCTKCGNSHIWVCTNRSKAKARWCQECGQYHQAKDGDGWVEHKGTLVFEKAHKIEIPRAFVCAEGKVFDVSEWAICQGMACRPNTHRPSFHVNMVGLEKATQRSKSSRFPWDLDVEMMDEDEEEFELWLQQALASGLFCETSKRRKSWSPFKLTKKQSRRTST

SEQ ID NO: 72593 - protein, 387 aa, Arabidopsis thaliana
  peptide (1)..(387): Ceres Seq. ID no. 4938975
  misc_feature (124)..(191): Pfam Name: DnaJ domain Pfam Description: DnaJ domain
  misc_feature (11)..(387): Homolog of NCBI NO: 15219309 NR Description: S-locus protein, putative; protein id:
  misc_feature (1)..(387): Homolog of NCBI NO: 25518299 NR Description: hypothetical protein F19K19.3 - Arabidopsis >gi|9989051|gb|AAG10814.1|AC011808_2 Similar to DNAJ proteins
  misc_feature (1)..(384): Homolog of NCBI NO: 7487909 NR Description: hypothetical protein YUP8H12R.35 - Arabidopsis >gi|3152572|gb|AAC17053.1| Contains homology to DNAJ heatshock
  misc_feature (1)..(387): Homolog of NCBI NO: 6069485 NR Description: S-locus protein 5 [Brassica rapa]
  misc_feature (85)..(387): Homolog of NCBI NO: 7487909 NR Description: hypothetical protein YUP8H12R.35 - Arabidopsis >gi|3152572|gb|AAC17053.1| Contains homology to DNAJ heatshock
  misc_feature (1)..(225): Homolog of NCBI NO: 30699386 NR Description: S-locus protein, putative [Arabidopsis thaliana]
  misc_feature (1)..(331): Homolog of NCBI NO: 31249740 NR Description: putative heat shock protein [Oryza sativa
  misc_feature (109)..(318): Homolog of NCBI NO: 15240510 NR Description: putative protein; protein id: At5g49580.1 thaliana] >gi|10177624|dbj|BAB10771.1| contains similarity to
  misc_feature (1)..(60): Homolog of NCBI NO: 15240510 NR Description: putative protein; protein id: At5g49580.1 thaliana] >gi|10177624|dbj|BAB10771.1| contains similarity to
  misc_feature (205)..(386): Homolog of NCBI NO: 32400881 NR Description: s-locus protein 5 [Triticum aestivum]
MYAMYCVKVRLGWPGVILSMNLAFLSNDIFICLLQWCDTVSEKTQVEEPTKPETVIDEEFPGEFEYSSVPAEEAEKKVHEDKSSTKPASSSTVVSNMKEISTVKVVKIETDSADEMKRILDSLNHYEALGLPLFKKIDAALLKKDYRKKAMLVHPDKNMGSPLASESFKKLQSAYEVLSDSVKRRDYDELLKKEESRTKIVCQSSHASSHQNSAAYRSEESRRIHCTKCGNSHIWVCTNRSKAKARWCQECGQYHQAKDGDGWVEHKGTLVFEKAHKIEIPRAFVCAEGKVFDVSEWAICQGMACRPNTHRPSFHVNMVGLEKATQRSKSSRFPWDLDVEMMDEDEEEFELWLQQALASGLFCETSKRRKSWSPFKLTKKQSRRTST

SEQ ID NO: 72594 - DNA, 1491 bp, Arabidopsis thaliana
  misc_feature (1)..(1491): Ceres Seq. ID no. 4939065
  misc_feature: MA Experiment ID: 20000315 Result: Down-regulated in Transcription
  misc_feature: MA Experiment 20000315 PARAMETER Experiment Name: At_14day_Shoots-Roots_Sub_P Parameter: Age (day) Value: 14
  misc_feature: MA Experiment 20000315 PARAMETER Experiment Name: At_14day_Shoots-Roots_Sub_P Parameter: Organism Value: A. thaliana
  misc_feature: MA Experiment 20000315 PARAMETER Experiment Name: At_14day_Shoots-Roots_Sub_P Parameter: Plant Line Value: WS
  misc_feature: MA Experiment 20000315 PARAMETER Experiment Name: At_14day_Shoots-Roots_Sub_P Parameter: Tissue Value: Shoots vs. Whole Plant
atggctgagaagcaagttttctcgagagtcctggatataggattggttaagcaagaagctttggcagagcgtcattggccactagtgtgcagtggatgtgggaagctattagggttacttagtttatcgtttgtttactggaaagactgcattttgaggggtttccagtccagtgttaaatttggttcagctgctttgctcctcataatgtggagttgcttccttagcctgacttcagtatcttgcttggtttatgttctcctcggtatgggagctgccggtgctgttgtcttgtacttaggtcgcacacctgggatcttcattgtaggactatttggaattttgatattgtggatacttggatggcctggagttattctctcgatgaatcttgcattcttgtccaacgatatatttatttgtcttcttcaatggtgtgatactgttagtgaaaaaacacaagtggaggagccaacgaaacctgaaactgtaatagacgaagagtttccaggagagtttgagtattcttctgttcctgctgaagaagcagagaaaaaggttcatgaagataagtcgtccactaagccagcatcatcgtcaactgttgtcagtaacatgaaggagatttctactgttaaggtagtcaaaatagaaacagattcagcggatgagatgaaacgaattcttgatagtttgaatcactatgaagcattggggctccctctgtttaaaaagattgatgccgcattgcttaagaaagactatagaaagaaggcaatgctggttcatccggataaaaatatgggaagtcctttggcaagtgaatcattcaagaaacttcaaagtgcctacgaggttctttcggattctgttaaaagaagagattatgatgagctgttaaagaaggaagaatctcggaccaagattgtctgtcagtcctcgcacgcctcttctcatcagaatagtgctgcttatcgatcagaagagtcaaggcgcatacactgtacaaaatgcgggaattcacacatttgggtatgtaccaacaggagtaaggcaaaggccagatggtgtcaggagtgtggtcaatatcatcaagccaaagatggtgacggatgggttgaacacaaagggactctggtattcgagaaagcacataagattgaaataccacgagcttttgtttgcgctgagggaaaagtctttgatgtctcagaatgggctatttgtcagggaatggcgtgtagaccaaatacacataggccaagtttccatgtgaacatggtcggtttagaaaaggcaacacagagatcaaagtcgagcaggttcccgtgggatcttgatgtggagatgatggacgaggatgaggaagagtttgagttatggcttcaacaagctctagcttccggtctattctgtgaaacatcaaaacgcagaaaaagctggagtcctttcaagttaaccaagaaacaatcccgaagaacatcgacttga

SEQ ID NO: 72595 - protein, 496 aa, Arabidopsis thaliana
  peptide (1)..(496): Ceres Seq. ID no. 4939066
  misc_feature (233)..(300): Pfam Name: DnaJ domain Pfam Description: DnaJ domain
  misc_feature (1)..(496): Homolog of NCBI NO: 15219309 NR Description: S-locus protein, putative; protein id:
  misc_feature (106)..(493): Homolog of NCBI NO: 7487909 NR Description: hypothetical protein YUP8H12R.35 - Arabidopsis >gi|3152572|gb|AAC17053.1| Contains homology to DNAJ heatshock
  misc_feature (21)..(119): Homolog of NCBI NO: 7487909 NR Description: hypothetical protein YUP8H12R.35 - Arabidopsis >gi|3152572|gb|AAC17053.1| Contains homology to DNAJ heatshock
  misc_feature (120)..(496): Homolog of NCBI NO: 25518299 NR Description: hypothetical protein F19K19.3 - Arabidopsis >gi|9989051|gb|AAG10814.1|AC011808_2 Similar to DNAJ proteins
  misc_feature (194)..(496): Homolog of NCBI NO: 7487909 NR Description: hypothetical protein YUP8H12R.35 - Arabidopsis >gi|3152572|gb|AAC17053.1| Contains homology to DNAJ heatshock
  misc_feature (106)..(496): Homolog of NCBI NO: 6069485 NR Description: S-locus protein 5 [Brassica rapa]
  misc_feature (106)..(334): Homolog of NCBI NO: 30699386 NR Description: S-locus protein, putative [Arabidopsis thaliana]
  misc_feature (90)..(119): Homolog of NCBI NO: 30699386 NR Description: S-locus protein, putative [Arabidopsis thaliana]
  misc_feature (218)..(427): Homolog of NCBI NO: 15240510 NR Description: putative protein; protein id: At5g49580.1 thaliana] >gi|10177624|dbj|BAB10771.1| contains similarity to
  misc_feature (34)..(134): Homolog of NCBI NO: 15240510 NR Description: putative protein; protein id: At5g49580.1 thaliana] >gi|10177624|dbj|BAB10771.1| contains similarity to
MAEKQVFSRVLDIGLVKQEALAERHWPLVCSGCGKLLGLLSLSFVYWKDCILRGFQSSVKFGSAALLLIMWSCFLSLTSVSCLVYVLLGMGAAGAVVLYLGRTPGIFIVGLFGILILWILGWPGVILSMNLAFLSNDIFICLLQWCDTVSEKTQVEEPTKPETVIDEEFPGEFEYSSVPAEEAEKKVHEDKSSTKPASSSTVVSNMKEISTVKVVKIETDSADEMKRILDSLNHYEALGLPLFKKIDAALLKKDYRKKAMLVHPDKNMGSPLASESFKKLQSAYEVLSDSVKRRDYDELLKKEESRTKIVCQSSHASSHQNSAAYRSEESRRIHCTKCGNSHIWVCTNRSKAKARWCQECGQYHQAKDGDGWVEHKGTLVFEKAHKIEIPRAFVCAEGKVFDVSEWAICQGMACRPNTHRPSFHVNMVGLEKATQRSKSSRFPWDLDVEMMDEDEEEFELWLQQALASGLFCETSKRRKSWSPFKLTKKQSRRTST

SEQ ID NO: 72596 - protein, 427 aa, Arabidopsis thaliana
  peptide (1)..(427): Ceres Seq. ID no. 4939067
  misc_feature (164)..(231): Pfam Name: DnaJ domain Pfam Description: DnaJ domain
  misc_feature (1)..(427): Homolog of NCBI NO: 15219309 NR Description: S-locus protein, putative; protein id:
  misc_feature (37)..(424): Homolog of NCBI NO: 7487909 NR Description: hypothetical protein YUP8H12R.35 - Arabidopsis >gi|3152572|gb|AAC17053.1| Contains homology to DNAJ heatshock
  misc_feature (1)..(50): Homolog of NCBI NO: 7487909 NR Description: hypothetical protein YUP8H12R.35 - Arabidopsis >gi|3152572|gb|AAC17053.1| Contains homology to DNAJ heatshock
  misc_feature (51)..(427): Homolog of NCBI NO: 25518299 NR Description: hypothetical protein F19K19.3 - Arabidopsis >gi|9989051|gb|AAG10814.1|AC011808_2 Similar to DNAJ proteins
  misc_feature (125)..(427): Homolog of NCBI NO: 7487909 NR Description: hypothetical protein YUP8H12R.35 - Arabidopsis >gi|3152572|gb|AAC17053.1| Contains homology to DNAJ heatshock
  misc_feature (37)..(427): Homolog of NCBI NO: 6069485 NR Description: S-locus protein 5 [Brassica rapa]
  misc_feature (37)..(265): Homolog of NCBI NO: 30699386 NR Description: S-locus protein, putative [Arabidopsis thaliana]
  misc_feature (21)..(50): Homolog of NCBI NO: 30699386 NR Description: S-locus protein, putative [Arabidopsis thaliana]
  misc_feature (149)..(358): Homolog of NCBI NO: 15240510 NR Description: putative protein; protein id: At5g49580.1 thaliana] >gi|10177624|dbj|BAB10771.1| contains similarity to
  misc_feature (1)..(65): Homolog of NCBI NO: 15240510 NR Description: putative protein; protein id: At5g49580.1 thaliana] >gi|10177624|dbj|BAB10771.1| contains similarity to
MWSCFLSLTSVSCLVYVLLGMGAAGAVVLYLGRTPGIFIVGLFGILILWILGWPGVILSMNLAFLSNDIFICLLQWCDTVSEKTQVEEPTKPETVIDEEFPGEFEYSSVPAEEAEKKVHEDKSSTKPASSSTVVSNMKEISTVKVVKIETDSADEMKRILDSLNHYEALGLPLFKKIDAALLKKDYRKKAMLVHPDKNMGSPLASESFKKLQSAYEVLSDSVKRRDYDELLKKEESRTKIVCQSSHASSHQNSAAYRSEESRRIHCTKCGNSHIWVCTNRSKAKARWCQECGQYHQAKDGDGWVEHKGTLVFEKAHKIEIPRAFVCAEGKVFDVSEWAICQGMACRPNTHRPSFHVNMVGLEKATQRSKSSRFPWDLDVEMMDEDEEEFELWLQQALASGLFCETSKRRKSWSPFKLTKKQSRRTST

SEQ ID NO: 72597 - protein, 407 aa, Arabidopsis thaliana
  peptide (1)..(407): Ceres Seq. ID no. 4939068
  misc_feature (144)..(211): Pfam Name: DnaJ domain Pfam Description: DnaJ domain
  misc_feature (1)..(407): Homolog of NCBI NO: 15219309 NR Description: S-locus protein, putative; protein id:
  misc_feature (17)..(404): Homolog of NCBI NO: 7487909 NR Description: hypothetical protein YUP8H12R.35 - Arabidopsis >gi|3152572|gb|AAC17053.1| Contains homology to DNAJ heatshock
  misc_feature (1)..(30): Homolog of NCBI NO: 7487909 NR Description: hypothetical protein YUP8H12R.35 - Arabidopsis >gi|3152572|gb|AAC17053.1| Contains homology to DNAJ heatshock
  misc_feature (31)..(407): Homolog of NCBI NO: 25518299 NR Description: hypothetical protein F19K19.3 - Arabidopsis >gi|9989051|gb|AAG10814.1|AC011808_2 Similar to DNAJ proteins
  misc_feature (105)..(407): Homolog of NCBI NO: 7487909 NR Description: hypothetical protein YUP8H12R.35 - Arabidopsis >gi|3152572|gb|AAC17053.1| Contains homology to DNAJ heatshock
  misc_feature (17)..(407): Homolog of NCBI NO: 6069485 NR Description: S-locus protein 5 [Brassica rapa]
  misc_feature (17)..(245): Homolog of NCBI NO: 30699386 NR Description: S-locus protein, putative [Arabidopsis thaliana]
  misc_feature (1)..(30): Homolog of NCBI NO: 30699386 NR Description: S-locus protein, putative [Arabidopsis thaliana]
  misc_feature (129)..(338): Homolog of NCBI NO: 15240510 NR Description: putative protein; protein id: At5g49580.1 thaliana] >gi|10177624|dbj|BAB10771.1| contains similarity to
  misc_feature (1)..(45): Homolog of NCBI NO: 15240510 NR Description: putative protein; protein id: At5g49580.1 thaliana] >gi|10177624|dbj|BAB10771.1| contains similarity to
MGAAGAVVLYLGRTPGIFIVGLFGILILWILGWPGVILSMNLAFLSNDIFICLLQWCDTVSEKTQVEEPTKPETVIDEEFPGEFEYSSVPAEEAEKKVHEDKSSTKPASSSTVVSNMKEISTVKVVKIETDSADEMKRILDSLNHYEALGLPLFKKIDAALLKKDYRKKAMLVHPDKNMGSPLASESFKKLQSAYEVLSDSVKRRDYDELLKKEESRTKIVCQSSHASSHQNSAAYRSEESRRIHCTKCGNSHIWVCTNRSKAKARWCQECGQYHQAKDGDGWVEHKGTLVFEKAHKIEIPRAFVCAEGKVFDVSEWAICQGMACRPNTHRPSFHVNMVGLEKATQRSKSSRFPWDLDVEMMDEDEEEFELWLQQALASGLFCETSKRRKSWSPFKLTKKQSRRTST

SEQ ID NO: 72598 - DNA, 1399 bp, Arabidopsis thaliana
  misc_feature (1)..(1399): Ceres Seq. ID no. 4939096
  misc_feature: MA Experiment ID: 108461 Result: Up-regulated in Transcription
  misc_feature: MA Experiment 108461 PARAMETER Experiment Name: At_Germinating_Seeds_cDNA_P Parameter: Age (day) Value: 1 vs. 0
  misc_feature: MA Experiment 108461 PARAMETER Experiment Name: At_Germinating_Seeds_cDNA_P Parameter: Tissue Value: Germinating Seeds
  misc_feature: MA Experiment ID: 108462 Result: Up-regulated in Transcription
  misc_feature: MA Experiment 108462 PARAMETER Experiment Name: At_Germinating_Seeds_cDNA_P Parameter: Age (day) Value: 2 vs. 0
  misc_feature: MA Experiment 108462 PARAMETER Experiment Name: At_Germinating_Seeds_cDNA_P Parameter: Tissue Value: Germinating Seeds
  misc_feature: MA Experiment ID: 20000111 Result: Up-regulated in Transcription
  misc_feature: MA Experiment 20000111 PARAMETER Experiment Name: At_42deg_Heat_cDNA_P Parameter: Temperature (deg C) Value: 42 vs. 22
  misc_feature: MA Experiment 20000111 PARAMETER Experiment Name: At_42deg_Heat_cDNA_P Parameter: Timepoint (hr) Value: 6
  misc_feature: MA Experiment 20000111 PARAMETER Experiment Name: At_42deg_Heat_cDNA_P Parameter: Tissue Value: Aerial
  misc_feature: MA Experiment ID: 20000180 Result: Up-regulated in Transcription
  misc_feature: MA Experiment 20000180 PARAMETER Experiment Name: At_Germinating_Seeds_P Parameter: Age (hr) Value: 24 vs. 0
  misc_feature: MA Experiment 20000180 PARAMETER Experiment Name: At_Germinating_Seeds_P Parameter: Tissue Value: Germinating Seeds
  misc_feature: MA Experiment ID: 20000224 Result: Up-regulated in Transcription
  misc_feature: MA Experiment ID: 20000234 Result: Down-regulated in Transcription
  misc_feature: MA Experiment 20000234 PARAMETER Experiment Name: At_Siliques_P Parameter: Age (day) Value: 21
  misc_feature: MA Experiment 20000234 PARAMETER Experiment Name: At_Siliques_P Parameter: Organism Value: A. thaliana
  misc_feature: MA Experiment 20000234 PARAMETER Experiment Name: At_Siliques_P Parameter: Plant Line Value: WS
  misc_feature: MA Experiment 20000234 PARAMETER Experiment Name: At_Siliques_P Parameter: Tissue Value: Less Than 5mm Siliques vs. Whole Plant
  misc_feature: MA Experiment ID: 20000264 Result: Down-regulated in Transcription
  misc_feature: MA Experiment 20000264 PARAMETER Experiment Name: At_Open_Flower_P Parameter: Age (day) Value: 21
  misc_feature: MA Experiment 20000264 PARAMETER Experiment Name: At_Open_Flower_P Parameter: Plant Line Value: WS
  misc_feature: MA Experiment 20000264 PARAMETER Experiment Name: At_Open_Flower_P Parameter: Tissue Value: Open Flower vs. Whole Plant
  misc_feature: MA Experiment ID: 20000265 Result: Down-regulated in Transcription
  misc_feature: MA Experiment 20000265 PARAMETER Experiment Name: At_Open_Flower_P Parameter: Age (day) Value: 21
  misc_feature: MA Experiment 20000265 PARAMETER Experiment Name: At_Open_Flower_P Parameter: Plant Line Value: WS
  misc_feature: MA Experiment 20000265 PARAMETER Experiment Name: At_Open_Flower_P Parameter: Tissue Value: Closed Flower vs. Whole Plant
  misc_feature: MA Experiment ID: 20000286 Result: Down-regulated in Transcription
  misc_feature: MA Experiment 20000286 PARAMETER Experiment Name: At_Open_Flower_P Parameter: Age (day) Value: 21
  misc_feature: MA Experiment 20000286 PARAMETER Experiment Name: At_Open_Flower_P Parameter: Plant Line Value: WS
  misc_feature: MA Experiment 20000286 PARAMETER Experiment Name: At_Open_Flower_P Parameter: Tissue Value: Half Open vs. Whole Plant
attatttacaggagtgcgataatattctttgaagctttaacattgttgcgaagaccagactctcagactcagactcgggagtgatttcacttcaactttctgctcagatggcagtccactactggacagccctgtttctattgttgccatgccttttctgtatttcaaatgctagtgctggcgatgctgatccagattacaggacatgtgtttcagaatgtgagataagcggttgtgttggacaactttgctttcctcagtgcaattcttcatccgatggtggtccatggtacatccaagaacctttgtatttacaatggaaaaaatggggttgtcaaggtgattgccgttatcaatgtatggttaatagagagactgaacgggaaactctcggtcaagccccagtcaagtaccatggtaaatggcccttcaagcgtgtacttgggattcaggagcctgcttctgttgctttctctgtactcaacctagcaatgcatttccatggttggctttcctttttcatcatgatctactataagttgcctctgaaacaagataggacagcgtactatgaatacgttggtttgtggcatatctacggtctcctgtccatgaactcttggttctggagtgctgttttccacagccgggatgttgaccttacagagaggttggactactcatccgcagtagcgattctcggattctcactcatcttagccattttacgaacatttgatattcgggttgaggctgcaagggtcatggtatccgctccaatactagcttttgtaaccacccacatactctacataaacttctacaaactcgactatggctggaacatgattgtgtgtgtggcaatgggagtctcacagcttttcctatgggcaagatgggccgctgtctcaagccacccttctaattggaaactttgggtggttgtgatagctggaggattagccatgcttctagagatatatgattttcctccatatgaaggctacttcgatgctcactcgatctggcacgctgccacaattcccttaaccattctctggtggagcttcattagagacgatgctgagttcagaacttccagcctcctcaagaaaactaagacgaaggcaaagtgagtctctttgctaagttttacaaggatttttatccgaccatacgagtatgcagacacgagggaaaaacaaaagatggaaatggatttaaacatcacgaagaaggcagagtcttttgtttaaagctagctggtttatggattcacaggtttcttcagttttttttattttatattgttacattaactgttgaatttgctttgagcctttcagtgtttttctttggccttacttttggttaagaaagattttgatatcatttactc

SEQ ID NO: 72599 - protein, 342 aa, Arabidopsis thaliana
  peptide (1)..(342): Ceres Seq. ID no. 4939097
  misc_feature (64)..(334): Pfam Name: Per1-like Pfam Description: Per1-like
  misc_feature (1)..(342): Homolog of NCBI NO: 15219283 NR Description: unknown protein; protein id: At1g16560.1
  misc_feature (6)..(338): Homolog of NCBI NO: 18424554 NR Description: putative protein; protein id: At5g62130.1, by cDNA: gi_15294203, supported by cDNA: gi_20147282 [Arabidopsis >gi|15294204|gb|AAK95279.1|AF410293_1 AT5g62130/mtg10_150
  misc_feature (6)..(338): Homolog of NCBI NO: 37536224 NR Description: unknown protein [Oryza sativa (japonica
  misc_feature (63)..(338): Homolog of NCBI NO: 10176931 NR Description: gene_id:MTG10.16~unknown protein [Arabidopsis
  misc_feature (35)..(181): Homolog of NCBI NO: 20260110 NR Description: unknown protein [Arabidopsis thaliana]
  misc_feature (48)..(342): Homolog of NCBI NO: 32949296 NR Description: CAB2 protein [Homo sapiens]
  misc_feature (22)..(327): Homolog of NCBI NO: 32418510 NR Description: hypothetical protein [Neurospora crassa]
  misc_feature (7)..(341): Homolog of NCBI NO: 19921698 NR Description: CG3271-PB [Drosophila melanogaster]
  misc_feature (164)..(342): Homolog of NCBI NO: 22761646 NR Description: unnamed protein product [Homo sapiens]
  misc_feature (8)..(105): Homolog of NCBI NO: 22761646 NR Description: unnamed protein product [Homo sapiens]
MAVHYWTALFLLLPCLFCISNASAGDADPDYRTCVSECEISGCVGQLCFPQCNSSSDGGPWYIQEPLYLQWKKWGCQGDCRYQCMVNRETERETLGQAPVKYHGKWPFKRVLGIQEPASVAFSVLNLAMHFHGWLSFFIMIYYKLPLKQDRTAYYEYVGLWHIYGLLSMNSWFWSAVFHSRDVDLTERLDYSSAVAILGFSLILAILRTFDIRVEAARVMVSAPILAFVTTHILYINFYKLDYGWNMIVCVAMGVSQLFLWARWAAVSSHPSNWKLWVVVIAGGLAMLLEIYDFPPYEGYFDAHSIWHAATIPLTILWWSFIRDDAEFRTSSLLKKTKTKAK

SEQ ID NO: 72600 - protein, 258 aa, Arabidopsis thaliana
  peptide (1)..(258): Ceres Seq. ID no. 4939098
  misc_feature (1)..(250): Pfam Name: Per1-like Pfam Description: Per1-like
  misc_feature (1)..(258): Homolog of NCBI NO: 15219283 NR Description: unknown protein; protein id: At1g16560.1
  misc_feature (1)..(254): Homolog of NCBI NO: 18424554 NR Description: putative protein; protein id: At5g62130.1, by cDNA: gi_15294203, supported by cDNA: gi_20147282 [Arabidopsis >gi|15294204|gb|AAK95279.1|AF410293_1 AT5g62130/mtg10_150
  misc_feature (1)..(254): Homolog of NCBI NO: 37536224 NR Description: unknown protein [Oryza sativa (japonica
  misc_feature (1)..(254): Homolog of NCBI NO: 10176931 NR Description: gene_id:MTG10.16~unknown protein [Arabidopsis
  misc_feature (1)..(97): Homolog of NCBI NO: 20260110 NR Description: unknown protein [Arabidopsis thaliana]
  misc_feature (1)..(258): Homolog of NCBI NO: 32949296 NR Description: CAB2 protein [Homo sapiens]
  misc_feature (1)..(243): Homolog of NCBI NO: 32418510 NR Description: hypothetical protein [Neurospora crassa]
  misc_feature (1)..(257): Homolog of NCBI NO: 19921698 NR Description: CG3271-PB [Drosophila melanogaster]
  misc_feature (80)..(258): Homolog of NCBI NO: 22761646 NR Description: unnamed protein product [Homo sapiens]
  misc_feature (1)..(21): Homolog of NCBI NO: 22761646 NR Description: unnamed protein product [Homo sapiens]
MVNRETERETLGQAPVKYHGKWPFKRVLGIQEPASVAFSVLNLAMHFHGWLSFFIMIYYKLPLKQDRTAYYEYVGLWHIYGLLSMNSWFWSAVFHSRDVDLTERLDYSSAVAILGFSLILAILRTFDIRVEAARVMVSAPILAFVTTHILYINFYKLDYGWNMIVCVAMGVSQLFLWARWAAVSSHPSNWKLWVVVIAGGLAMLLEIYDFPPYEGYFDAHSIWHAATIPLTILWWSFIRDDAEFRTSSLLKKTKTKAK

SEQ ID NO: 72601 - protein, 214 aa, Arabidopsis thaliana
  peptide (1)..(214): Ceres Seq. ID no. 4939099
  misc_feature (1)..(206): Pfam Name: Per1-like Pfam Description: Per1-like
  misc_feature (1)..(214): Homolog of NCBI NO: 15219283 NR Description: unknown protein; protein id: At1g16560.1
  misc_feature (1)..(210): Homolog of NCBI NO: 18424554 NR Description: putative protein; protein id: At5g62130.1, by cDNA: gi_15294203, supported by cDNA: gi_20147282 [Arabidopsis >gi|15294204|gb|AAK95279.1|AF410293_1 AT5g62130/mtg10_150
  misc_feature (1)..(210): Homolog of NCBI NO: 37536224 NR Description: unknown protein [Oryza sativa (japonica
  misc_feature (1)..(210): Homolog of NCBI NO: 10176931 NR Description: gene_id:MTG10.16~unknown protein [Arabidopsis
  misc_feature (1)..(53): Homolog of NCBI NO: 20260110 NR Description: unknown protein [Arabidopsis thaliana]
  misc_feature (1)..(214): Homolog of NCBI NO: 32949296 NR Description: CAB2 protein [Homo sapiens]
  misc_feature (1)..(199): Homolog of NCBI NO: 32418510 NR Description: hypothetical protein [Neurospora crassa]
  misc_feature (1)..(213): Homolog of NCBI NO: 19921698 NR Description: CG3271-PB [Drosophila melanogaster]
  misc_feature (36)..(214): Homolog of NCBI NO: 22761646 NR Description: unnamed protein product [Homo sapiens]
  misc_feature (1)..(199): Homolog of NCBI NO: 31212833 NR Description: ENSANGP00000021025 [Anopheles gambiae]
MHFHGWLSFFIMIYYKLPLKQDRTAYYEYVGLWHIYGLLSMNSWFWSAVFHSRDVDLTERLDYSSAVAILGFSLILAILRTFDIRVEAARVMVSAPILAFVTTHILYINFYKLDYGWNMIVCVAMGVSQLFLWARWAAVSSHPSNWKLWVVVIAGGLAMLLEIYDFPPYEGYFDAHSIWHAATIPLTILWWSFIRDDAEFRTSSLLKKTKTKAK

SEQ ID NO: 72602 - DNA, 1159 bp, Arabidopsis thaliana
  misc_feature (1)..(1159): Ceres Seq. ID no. 4939439
  misc_feature: MA Experiment ID: 108434 Result: Down-regulated in Transcription
  misc_feature: MA Experiment 108434 PARAMETER Experiment Name: At_Root_Tips_cDNA_P Parameter: Tissue Value: Root Tips
  misc_feature: MA Experiment ID: 108488 Result: Up-regulated in Transcription
  misc_feature: MA Experiment ID: 108569 Result: Up-regulated in Transcription
  misc_feature: MA Experiment 108569 PARAMETER Experiment Name: At_0.001%_MeJA__cDNA_P Parameter: Timepoint (hr) Value: 6
  misc_feature: MA Experiment 108569 PARAMETER Experiment Name: At_0.001%_MeJA__cDNA_P Parameter: Tissue Value: Aerial
  misc_feature: MA Experiment 108569 PARAMETER Experiment Name: At_0.001%_MeJA__cDNA_P Parameter: Treatment Value: 0.001% MeJA vs. No Treatment
  misc_feature: MA Experiment ID: 108573 Result: Down-regulated in Transcription
  misc_feature: MA Experiment 108573 PARAMETER Experiment Name: At_Drought_cDNA_P Parameter: Timepoint (hr) Value: 6
  misc_feature: MA Experiment 108573 PARAMETER Experiment Name: At_Drought_cDNA_P Parameter: Tissue Value: Aerial
  misc_feature: MA Experiment 108573 PARAMETER Experiment Name: At_Drought_cDNA_P Parameter: Treatment Value: Drought vs. No Drought
  misc_feature: MA Experiment ID: 108574 Result: Up-regulated in Transcription
  misc_feature: MA Experiment 108574 PARAMETER Experiment Name: At_Wounding__cDNA_P Parameter: Timepoint (hr) Value: 1
  misc_feature: MA Experiment 108574 PARAMETER Experiment Name: At_Wounding__cDNA_P Parameter: Tissue Value: Aerial
  misc_feature: MA Experiment 108574 PARAMETER Experiment Name: At_Wounding__cDNA_P Parameter: Treatment Value: Wounding vs. No Wounding
  misc_feature: MA Experiment ID: 108576 Result: Down-regulated in Transcription
  misc_feature: MA Experiment 108576 PARAMETER Experiment Name: At_42deg_Heat_cDNA_P Parameter: Temperature (deg C) Value: 42 vs. 22
  misc_feature: MA Experiment 108576 PARAMETER Experiment Name: At_42deg_Heat_cDNA_P Parameter: Timepoint (hr) Value: 1
  misc_feature: MA Experiment 108576 PARAMETER Experiment Name: At_42deg_Heat_cDNA_P Parameter: Tissue Value: Aerial
  misc_feature: MA Experiment ID: 108595 Result: Down-regulated in Transcription
  misc_feature: MA Experiment 108595 PARAMETER Experiment Name: At_Ler-pi_Ovule_cDNA_P Parameter: Plant Line Value: null
  misc_feature: MA Experiment ID: 20000090 Result: Down-regulated in Transcription
  misc_feature: MA Experiment ID: 20000093 Result: Down-regulated in Transcription
  misc_feature: MA Experiment 20000093 PARAMETER Experiment Name: At_42deg_Heat_cDNA_P Parameter: Temperature (deg C) Value: 42 vs. 22
  misc_feature: MA Experiment 20000093 PARAMETER Experiment Name: At_42deg_Heat_cDNA_P Parameter: Timepoint (hr) Value: 0.5
  misc_feature: MA Experiment 20000093 PARAMETER Experiment Name: At_42deg_Heat_cDNA_P Parameter: Tissue Value: Aerial
  misc_feature: MA Experiment ID: 20000111 Result: Down-regulated in Transcription
  misc_feature: MA Experiment 20000111 PARAMETER Experiment Name: At_42deg_Heat_cDNA_P Parameter: Temperature (deg C) Value: 42 vs. 22
  misc_feature: MA Experiment 20000111 PARAMETER Experiment Name: At_42deg_Heat_cDNA_P Parameter: Timepoint (hr) Value: 6
  misc_feature: MA Experiment 20000111 PARAMETER Experiment Name: At_42deg_Heat_cDNA_P Parameter: Tissue Value: Aerial
  misc_feature: MA Experiment ID: 20000112 Result: Down-regulated in Transcription
  misc_feature: MA Experiment 20000112 PARAMETER Experiment Name: At_42deg_Heat_cDNA_P Parameter: Temperature (deg C) Value: 42 vs. 22
  misc_feature: MA Experiment 20000112 PARAMETER Experiment Name: At_42deg_Heat_cDNA_P Parameter: Timepoint (hr) Value: 2
  misc_feature: MA Experiment 20000112 PARAMETER Experiment Name: At_42deg_Heat_cDNA_P Parameter: Tissue Value: Aerial
  misc_feature: MA Experiment ID: 20000113 Result: Down-regulated in Transcription
  misc_feature: MA Experiment 20000113 PARAMETER Experiment Name: At_42deg_Heat_cDNA_P Parameter: Temperature (deg C) Value: 42 vs. 22
  misc_feature: MA Experiment 20000113 PARAMETER Experiment Name: At_42deg_Heat_cDNA_P Parameter: Timepoint (hr) Value: 8
  misc_feature: MA Experiment 20000113 PARAMETER Experiment Name: At_42deg_Heat_cDNA_P Parameter: Tissue Value: Aerial
  misc_feature: MA Experiment ID: 20000144 Result: Down-regulated in Transcription
  misc_feature: MA Experiment 20000144 PARAMETER Experiment Name: At_42deg_Heat_cDNA_P Parameter: Temperature (deg C) Value: 42 vs. 22
  misc_feature: MA Experiment 20000144 PARAMETER Experiment Name: At_42deg_Heat_cDNA_P Parameter: Timepoint (hr) Value: 1
  misc_feature: MA Experiment 20000144 PARAMETER Experiment Name: At_42deg_Heat_cDNA_P Parameter: Tissue Value: Aerial
  misc_feature: MA Experiment ID: 20000171 Result: Down-regulated in Transcription
  misc_feature: MA Experiment 20000171 PARAMETER Experiment Name: At_42deg_Heat_P Parameter: Age (day) Value: 14
  misc_feature: MA Experiment 20000171 PARAMETER Experiment Name: At_42deg_Heat_P Parameter: Organism Value: A. thaliana
  misc_feature: MA Experiment 20000171 PARAMETER Experiment Name: At_42deg_Heat_P Parameter: Plant Line Value: WS
  misc_feature: MA Experiment 20000171 PARAMETER Experiment Name: At_42deg_Heat_P Parameter: Temperature (deg C) Value: 42 vs. 22
  misc_feature: MA Experiment 20000171 PARAMETER Experiment Name: At_42deg_Heat_P Parameter: Timepoint (hr) Value: 1
  misc_feature: MA Experiment 20000171 PARAMETER Experiment Name: At_42deg_Heat_P Parameter: Tissue Value: Aerial
  misc_feature: MA Experiment ID: 20000173 Result: Down-regulated in Transcription
  misc_feature: MA Experiment 20000173 PARAMETER Experiment Name: At_42deg_Heat_P Parameter: Age (day) Value: 14
  misc_feature: MA Experiment 20000173 PARAMETER Experiment Name: At_42deg_Heat_P Parameter: Organism Value: A. thaliana
  misc_feature: MA Experiment 20000173 PARAMETER Experiment Name: At_42deg_Heat_P Parameter: Plant Line Value: WS
  misc_feature: MA Experiment 20000173 PARAMETER Experiment Name: At_42deg_Heat_P Parameter: Temperature (deg C) Value: 42 vs. 22
  misc_feature: MA Experiment 20000173 PARAMETER Experiment Name: At_42deg_Heat_P Parameter: Timepoint (hr) Value: 6
  misc_feature: MA Experiment 20000173 PARAMETER Experiment Name: At_42deg_Heat_P Parameter: Tissue Value: Aerial
  misc_feature: MA Experiment ID: 20000180 Result: Up-regulated in Transcription
  misc_feature: MA Experiment 20000180 PARAMETER Experiment Name: At_Germinating_Seeds_P Parameter: Age (hr) Value: 24 vs. 0
  misc_feature: MA Experiment 20000180 PARAMETER Experiment Name: At_Germinating_Seeds_P Parameter: Tissue Value: Germinating Seeds
  misc_feature: MA Experiment ID: 20000182 Result: Down-regulated in Transcription
  misc_feature: MA Experiment 20000182 PARAMETER Experiment Name: At_2mM_SA_P Parameter: Age (day) Value: 14
  misc_feature: MA Experiment 20000182 PARAMETER Experiment Name: At_2mM_SA_P Parameter: Organism Value: A. thaliana
  misc_feature: MA Experiment 20000182 PARAMETER Experiment Name: At_2mM_SA_P Parameter: Plant Line Value: WS
  misc_feature: MA Experiment 20000182 PARAMETER Experiment Name: At_2mM_SA_P Parameter: Timepoint (hr) Value: 6
  misc_feature: MA Experiment 20000182 PARAMETER Experiment Name: At_2mM_SA_P Parameter: Tissue Value: Aerial
  misc_feature: MA Experiment 20000182 PARAMETER Experiment Name: At_2mM_SA_P Parameter: Treatment Value: 2mM SA vs. No Treatment
  misc_feature: MA Experiment ID: 20000184 Result: Down-regulated in Transcription
  misc_feature: MA Experiment 20000184 PARAMETER Experiment Name: At_Shoots__P Parameter: Age (day) Value: 7
  misc_feature: MA Experiment 20000184 PARAMETER Experiment Name: At_Shoots__P Parameter: Tissue Value: Shoots vs. Whole Plant
  misc_feature: MA Experiment ID: 20000185 Result: Down-regulated in Transcription
  misc_feature: MA Experiment 20000185 PARAMETER Experiment Name: At_Roots__P Parameter: Age (day) Value: 7 vs. 21
  misc_feature: MA Experiment 20000185 PARAMETER Experiment Name: At_Roots__P Parameter: Organism Value: A. thaliana
  misc_feature: MA Experiment 20000185 PARAMETER Experiment Name: At_Roots__P Parameter: Tissue Value: Roots vs. Whole Plant
  misc_feature: MA Experiment ID: 20000211 Result: Up-regulated in Transcription
  misc_feature: MA Experiment 20000211 PARAMETER Experiment Name: At_0.001percent_MeJA__P Parameter: Age (day) Value: 14
  misc_feature: MA Experiment 20000211 PARAMETER Experiment Name: At_0.001percent_MeJA__P Parameter: Organism Value: A. thaliana
  misc_feature: MA Experiment 20000211 PARAMETER Experiment Name: At_0.001percent_MeJA__P Parameter: Plant Line Value: WS
  misc_feature: MA Experiment 20000211 PARAMETER Experiment Name: At_0.001percent_MeJA__P Parameter: Timepoint (hr) Value: 1
  misc_feature: MA Experiment 20000211 PARAMETER Experiment Name: At_0.001percent_MeJA__P Parameter: Tissue Value: Aerial
  misc_feature: MA Experiment 20000211 PARAMETER Experiment Name: At_0.001percent_MeJA__P Parameter: Treatment Value: 0.001percent MeJA vs. No Treatment
  misc_feature: MA Experiment ID: 20000224 Result: Up-regulated in Transcription
  misc_feature: MA Experiment ID: 20000227 Result: Down-regulated in Transcription
  misc_feature: MA Experiment 20000227 PARAMETER Experiment Name: At_Root-Tips-vs-Tops_P Parameter: Tissue Value: Root Tips vs. Root Tops
  misc_feature: MA Experiment ID: 20000234 Result: Down-regulated in Transcription
  misc_feature: MA Experiment 20000234 PARAMETER Experiment Name: At_Siliques_P Parameter: Age (day) Value: 21
  misc_feature: MA Experiment 20000234 PARAMETER Experiment Name: At_Siliques_P Parameter: Organism Value: A. thaliana
  misc_feature: MA Experiment 20000234 PARAMETER Experiment Name: At_Siliques_P Parameter: Plant Line Value: WS
  misc_feature: MA Experiment 20000234 PARAMETER Experiment Name: At_Siliques_P Parameter: Tissue Value: Less Than 5mm Siliques vs. Whole Plant
  misc_feature: MA Experiment ID: 20000235 Result: Down-regulated in Transcription
  misc_feature: MA Experiment 20000235 PARAMETER Experiment Name: At_Siliques_P Parameter: Age (day) Value: 21
  misc_feature: MA Experiment 20000235 PARAMETER Experiment Name: At_Siliques_P Parameter: Organism Value: A. thaliana
  misc_feature: MA Experiment 20000235 PARAMETER Experiment Name: At_Siliques_P Parameter: Plant Line Value: WS
  misc_feature: MA Experiment 20000235 PARAMETER Experiment Name: At_Siliques_P Parameter: Tissue Value: 5-10mm Siliques vs. Whole Plant
  misc_feature: MA Experiment ID: 20000264 Result: Down-regulated in Transcription
  misc_feature: MA Experiment 20000264 PARAMETER Experiment Name: At_Open_Flower_P Parameter: Age (day) Value: 21
  misc_feature: MA Experiment 20000264 PARAMETER Experiment Name: At_Open_Flower_P Parameter: Plant Line Value: WS
  misc_feature: MA Experiment 20000264 PARAMETER Experiment Name: At_Open_Flower_P Parameter: Tissue Value: Open Flower vs. Whole Plant
  misc_feature: MA Experiment ID: 20000265 Result: Down-regulated in Transcription
  misc_feature: MA Experiment 20000265 PARAMETER Experiment Name: At_Open_Flower_P Parameter: Age (day) Value: 21
  misc_feature: MA Experiment 20000265 PARAMETER Experiment Name: At_Open_Flower_P Parameter: Plant Line Value: WS
  misc_feature: MA Experiment 20000265 PARAMETER Experiment Name: At_Open_Flower_P Parameter: Tissue Value: Closed Flower vs. Whole Plant
  misc_feature: MA Experiment ID: 20000286 Result: Down-regulated in Transcription
  misc_feature: MA Experiment 20000286 PARAMETER Experiment Name: At_Open_Flower_P Parameter: Age (day) Value: 21
  misc_feature: MA Experiment 20000286 PARAMETER Experiment Name: At_Open_Flower_P Parameter: Plant Line Value: WS
  misc_feature: MA Experiment 20000286 PARAMETER Experiment Name: At_Open_Flower_P Parameter: Tissue Value: Half Open vs. Whole Plant
  misc_feature: MA Experiment ID: 20000436 Result: Down-regulated in Transcription
  misc_feature: MA Experiment 20000436 PARAMETER Experiment Name: At_Drought_P Parameter: Age (day) Value: 7
  misc_feature: MA Experiment 20000436 PARAMETER Experiment Name: At_Drought_P Parameter: Organism Value: A. thaliana
  misc_feature: MA Experiment 20000436 PARAMETER Experiment Name: At_Drought_P Parameter: Plant Line Value: WS
  misc_feature: MA Experiment 20000436 PARAMETER Experiment Name: At_Drought_P Parameter: Timepoint (hr) Value: 12
  misc_feature: MA Experiment 20000436 PARAMETER Experiment Name: At_Drought_P Parameter: Tissue Value: Whole Plant
  misc_feature: MA Experiment 20000436 PARAMETER Experiment Name: At_Drought_P Parameter: Treatment Value: Drought vs. No Drought
  misc_feature: MA Experiment ID: 20000437 Result: Down-regulated in Transcription
  misc_feature: MA Experiment 20000437 PARAMETER Experiment Name: At_Drought_P Parameter: Age (day) Value: 8
  misc_feature: MA Experiment 20000437 PARAMETER Experiment Name: At_Drought_P Parameter: Organism Value: A. thaliana
  misc_feature: MA Experiment 20000437 PARAMETER Experiment Name: At_Drought_P Parameter: Plant Line Value: WS
  misc_feature: MA Experiment 20000437 PARAMETER Experiment Name: At_Drought_P Parameter: Timepoint (hr) Value: 24
  misc_feature: MA Experiment 20000437 PARAMETER Experiment Name: At_Drought_P Parameter: Tissue Value: Whole Plant
  misc_feature: MA Experiment 20000437 PARAMETER Experiment Name: At_Drought_P Parameter: Treatment Value: Drought vs. No Drought
  misc_feature: MA Experiment ID: 20000445 Result: Down-regulated in Transcription
  misc_feature: MA Experiment 20000445 PARAMETER Experiment Name: At_100uM_NAA__P Parameter: Age (day) Value: 14
  misc_feature: MA Experiment 20000445 PARAMETER Experiment Name: At_100uM_NAA__P Parameter: Organism Value: A. thaliana
  misc_feature: MA Experiment 20000445 PARAMETER Experiment Name: At_100uM_NAA__P Parameter: Plant Line Value: WS
  misc_feature: MA Experiment 20000445 PARAMETER Experiment Name: At_100uM_NAA__P Parameter: Timepoint (hr) Value: 6
  misc_feature: MA Experiment 20000445 PARAMETER Experiment Name: At_100uM_NAA__P Parameter: Tissue Value: Aerial
  misc_feature: MA Experiment 20000445 PARAMETER Experiment Name: At_100uM_NAA__P Parameter: Treatment Value: 100uM NAA vs. No Treatment
  misc_feature: MA Experiment ID: 20000451 Result: Up-regulated in Transcription
  misc_feature: MA Experiment 20000451 PARAMETER Experiment Name: At_CS6879_Shoots-Roots_P Parameter: Age (day) Value: 14
  misc_feature: MA Experiment 20000451 PARAMETER Experiment Name: At_CS6879_Shoots-Roots_P Parameter: Organism Value: A. thaliana
  misc_feature: MA Experiment 20000451 PARAMETER Experiment Name: At_CS6879_Shoots-Roots_P Parameter: Plant Line Value: CS6879 vs. WS
  misc_feature: MA Experiment 20000451 PARAMETER Experiment Name: At_CS6879_Shoots-Roots_P Parameter: Tissue Value: Roots
  misc_feature: MA Experiment ID: 20000794 Result: Down-regulated in Transcription
  misc_feature: MA Experiment 20000794 PARAMETER Experiment Name: At_Petals_P Parameter: Age (day) Value: 23-25 days
  misc_feature: MA Experiment 20000794 PARAMETER Experiment Name: At_Petals_P Parameter: Plant Line Value: WS
  misc_feature: MA Experiment 20000794 PARAMETER Experiment Name: At_Petals_P Parameter: Tissue Value: Petals vs. Whole plant
  misc_feature: MA Experiment ID: 20001248 Result: Down-regulated in Transcription
  misc_feature: MA Experiment 20001248 PARAMETER Experiment Name: At_Far-red-induction_P Parameter: Age (day) Value: 7
  misc_feature: MA Experiment 20001248 PARAMETER Experiment Name: At_Far-red-induction_P Parameter: Light Value: Far-red vs. White
  misc_feature: MA Experiment 20001248 PARAMETER Experiment Name: At_Far-red-induction_P Parameter: Organism Value: A. thaliana
  misc_feature: MA Experiment 20001248 PARAMETER Experiment Name: At_Far-red-induction_P Parameter: Plant Line Value: Columbia
  misc_feature: MA Experiment 20001248 PARAMETER Experiment Name: At_Far-red-induction_P Parameter: Timepoint (hr) Value: 4
  misc_feature: MA Experiment 20001248 PARAMETER Experiment Name: At_Far-red-induction_P Parameter: Tissue Value: Whole Plant
  misc_feature: MA Experiment ID: 20001450 Result: Down-regulated in Transcription
  misc_feature: MA Experiment 20001450 PARAMETER Experiment Name: At_Far-red-induction_P Parameter: Age (day) Value: 7
  misc_feature: MA Experiment 20001450 PARAMETER Experiment Name: At_Far-red-induction_P Parameter: Light Value: Far-red vs. White
  misc_feature: MA Experiment 20001450 PARAMETER Experiment Name: At_Far-red-induction_P Parameter: Organism Value: A. thaliana
  misc_feature: MA Experiment 20001450 PARAMETER Experiment Name: At_Far-red-induction_P Parameter: Plant Line Value: Columbia
  misc_feature: MA Experiment 20001450 PARAMETER Experiment Name: At_Far-red-induction_P Parameter: Timepoint (hr) Value: 8
  misc_feature: MA Experiment 20001450 PARAMETER Experiment Name: At_Far-red-induction_P Parameter: Tissue Value: Whole Plant
  misc_feature: MA Experiment ID: 20001451 Result: Down-regulated in Transcription
  misc_feature: MA Experiment 20001451 PARAMETER Experiment Name: At_Far-red-induction_P Parameter: Age (day) Value: 7
  misc_feature: MA Experiment 20001451 PARAMETER Experiment Name: At_Far-red-induction_P Parameter: Light Value: Far-red vs. White
  misc_feature: MA Experiment 20001451 PARAMETER Experiment Name: At_Far-red-induction_P Parameter: Organism Value: A. thaliana
  misc_feature: MA Experiment 20001451 PARAMETER Experiment Name: At_Far-red-induction_P Parameter: Plant Line Value: Columbia
  misc_feature: MA Experiment 20001451 PARAMETER Experiment Name: At_Far-red-induction_P Parameter: Timepoint (hr) Value: 24
  misc_feature: MA Experiment 20001451 PARAMETER Experiment Name: At_Far-red-induction_P Parameter: Tissue Value: Whole Plant
  misc_feature: MA Experiment ID: 20001457 Result: Down-regulated in Transcription
  misc_feature: MA Experiment 20001457 PARAMETER Experiment Name: At_50mM_NH4NO3_L-to-H_P Parameter: Age (day) Value: Undefined
  misc_feature: MA Experiment 20001457 PARAMETER Experiment Name: At_50mM_NH4NO3_L-to-H_P Parameter: Organism Value: Undefined
  misc_feature: MA Experiment 20001457 PARAMETER Experiment Name: At_50mM_NH4NO3_L-to-H_P Parameter: Plant Line Value: Undefined
  misc_feature: MA Experiment 20001457 PARAMETER Experiment Name: At_50mM_NH4NO3_L-to-H_P Parameter: Timepoint (hr) Value: 0.5
  misc_feature: MA Experiment 20001457 PARAMETER Experiment Name: At_50mM_NH4NO3_L-to-H_P Parameter: Tissue Value: Siliques
  misc_feature: MA Experiment 20001457 PARAMETER Experiment Name: At_50mM_NH4NO3_L-to-H_P Parameter: Treatment Value: 50mM NH4NO3 vs. 100mM Manitol
  misc_feature: MA Experiment ID: 20001560 Result: Up-regulated in Transcription
  misc_feature: MA Experiment 20001560 PARAMETER Experiment Name: At_Drought_Soil_Dry_P Parameter: Age (day) Value: 28
  misc_feature: MA Experiment 20001560 PARAMETER Experiment Name: At_Drought_Soil_Dry_P Parameter: Organism Value: A. thaliana
  misc_feature: MA Experiment 20001560 PARAMETER Experiment Name: At_Drought_Soil_Dry_P Parameter: Plant Line Value: WS
  misc_feature: MA Experiment 20001560 PARAMETER Experiment Name: At_Drought_Soil_Dry_P Parameter: Post Timepoint (hr) Value: None
  misc_feature: MA Experiment 20001560 PARAMETER Experiment Name: At_Drought_Soil_Dry_P Parameter: Post-Treatment Value: None
  misc_feature: MA Experiment 20001560 PARAMETER Experiment Name: At_Drought_Soil_Dry_P Parameter: Timepoint (day) Value: 14
  misc_feature: MA Experiment 20001560 PARAMETER Experiment Name: At_Drought_Soil_Dry_P Parameter: Treatment Value: Drought vs. No Drought
  misc_feature: MA Experiment ID: 20001906 Result: Up-regulated in Transcription
  misc_feature: MA Experiment 20001906 PARAMETER Experiment Name: At_Drought_Reproduction_P Parameter: Age (day) Value: 35
  misc_feature: MA Experiment 20001906 PARAMETER Experiment Name: At_Drought_Reproduction_P Parameter: Organism Value: A. thaliana
  misc_feature: MA Experiment 20001906 PARAMETER Experiment Name: At_Drought_Reproduction_P Parameter: Plant Line Value: WS
  misc_feature: MA Experiment 20001906 PARAMETER Experiment Name: At_Drought_Reproduction_P Parameter: Timepoint (day) Value: 5
  misc_feature: MA Experiment 20001906 PARAMETER Experiment Name: At_Drought_Reproduction_P Parameter: Tissue Value: Siliques
  misc_feature: MA Experiment 20001906 PARAMETER Experiment Name: At_Drought_Reproduction_P Parameter: Treatment Value: Drought vs. No Drought
atcaacgagtattaatctcttcattacatagccaaaaagaaaacactctctataatggaatccaaaaccataaacgacgtcgtcgtatcagagtcaaatcacgagttagcatcttcgtcgccatcagaatttgagaagaaccagaaacattaccaagaaatcatcgcaactcttcctcacaaagatggctggagaccaaaagatccgttcgttgagtacggtggtcactggtggctacaacctcttcttgaaggtttacttcacgcccagaagttcttcaaggcacgtcccaatgatttcttcgtctgcagctacccaaaaaccggcacgacttggctcaaagccttaactttcgcaatcgcaaatcgctccaagttcgacgtttcaacaaaccctcttctcaaacgtaatccacacgagtttgtgccttacatcgaaatcgacttcccgtttttcccaagcgttgatgttcttaaagacgaaggaaacacgcttttctcgactcatatcccttatgatctcttacctgaatcagttgtgaaatctggttgcaagattgtttacatatggagagacccaaaggacacgtttgtgtcgatgtggacttttgctcacaaggagagatcacaacaaggaccagtgggtattggaaagcttaccaagcaaacccggatcagattttgtttctcaagtatgagacaatgagagctgatccattgccttatgtgaagagattagctgagtttatgggttatgggttcacgaaggaggaagaggagggaaatgttgttgagaaagtagtgaagctttgtagctttgagactttgaagaatcttgaagctaacaaaggtgagaaagatagagaagatcgtcctgctgtttatgccaacagtgcgtatttcaggaaagggaaagttggggattggcagaattatctgactccggagatggtggctcgtattgatggtttgatggaagagaagtttaaaggaactggctttctttcttcaaaatcatgaatgtgatcttcttttgtcttgttttcgagctatgaatgtctgattcttctgatccttttgctggttatagcataagttgcttttgtttactagtatactctccattggaggaatatgtggtgaactgctgtattgttgct

SEQ ID NO: 72603 - protein, 216 aa, Arabidopsis thaliana; identical to SEQ ID NO: 28113
  peptide (1)..(216): Ceres Seq. ID no. 4939440
  misc_feature (79)..(196): Pfam Name: Sulfotransferase domain Pfam Description: Sulfotransferase domain
  misc_feature (1)..(196): Homolog of NCBI NO: 15221820 NR Description: flavonol 4'-sulfotransferase, putative; protein At1g18590.1 [Arabidopsis thaliana] >gi|25288803|pir||E86319
  misc_feature (1)..(196): Homolog of NCBI NO: 15221130 NR Description: putative flavonol sulfotransferase; protein id: supported by cDNA: 41006. [Arabidopsis thaliana]
  misc_feature (1)..(196): Homolog of NCBI NO: 21593660 NR Description: putative flavonol sulfotransferase [Arabidopsis
  misc_feature (1)..(194): Homolog of NCBI NO: 21593087 NR Description: putative flavonol sulfotransferase [Arabidopsis
  misc_feature (1)..(194): Homolog of NCBI NO: 15221131 NR Description: putative flavonol sulfotransferase; protein id: supported by cDNA: 36020., supported by cDNA: gi_14596198, by cDNA: gi_20148422 [Arabidopsis thaliana]
  misc_feature (25)..(188): Homolog of NCBI NO: 1706740 NR Description: FLAVONOL 4'-SULFOTRANSFERASE (F4-ST)
  misc_feature (25)..(188): Homolog of NCBI NO: 285286 NR Description: flavonol 4'-sulfotransferase - Flaveria
  misc_feature (34)..(185): Homolog of NCBI NO: 1706918 NR Description: FLAVONOL SULFOTRANSFERASE-LIKE
  misc_feature (34)..(185): Homolog of NCBI NO: 1706738 NR Description: FLAVONOL 3-SULFOTRANSFERASE (F3-ST)
  misc_feature (34)..(185): Homolog of NCBI NO: 4321096 NR Description: flavonol 3-sulfotransferase [Flaveria

SEQ ID NO: 72604 - protein, 150 aa, Arabidopsis thaliana
  peptide (1)..(150): Ceres Seq. ID no. 4939441
  misc_feature (26)..(144): Pfam Name: Sulfotransferase domain Pfam Description: Sulfotransferase domain
  misc_feature (26)..(150): Homolog of NCBI NO: 15221820 NR Description: flavonol 4'-sulfotransferase, putative; protein At1g18590.1 [Arabidopsis thaliana] >gi|25288803|pir||E86319
  misc_feature (1)..(146): Homolog of NCBI NO: 15221130 NR Description: putative flavonol sulfotransferase; protein id: supported by cDNA: 41006. [Arabidopsis thaliana]
  misc_feature (1)..(146): Homolog of NCBI NO: 21593660 NR Description: putative flavonol sulfotransferase [Arabidopsis
  misc_feature (26)..(146): Homolog of NCBI NO: 21593087 NR Description: putative flavonol sulfotransferase [Arabidopsis
  misc_feature (26)..(146): Homolog of NCBI NO: 15221131 NR Description: putative flavonol sulfotransferase; protein id: supported by cDNA: 36020., supported by cDNA: gi_14596198, by cDNA: gi_20148422 [Arabidopsis thaliana]
  misc_feature (26)..(146): Homolog of NCBI NO: 1706740 NR Description: FLAVONOL 4'-SULFOTRANSFERASE (F4-ST)
  misc_feature (26)..(146): Homolog of NCBI NO: 285286 NR Description: flavonol 4'-sulfotransferase - Flaveria
  misc_feature (16)..(146): Homolog of NCBI NO: 1706918 NR Description: FLAVONOL SULFOTRANSFERASE-LIKE
  misc_feature (1)..(146): Homolog of NCBI NO: 1706738 NR Description: FLAVONOL 3-SULFOTRANSFERASE (F3-ST)
  misc_feature (9)..(146): Homolog of NCBI NO: 4321096 NR Description: flavonol 3-sulfotransferase [Flaveria
MERPKGHVCVDVDFCSQGEITTRTSGYWKAYQANPDQILFLKYETMRADPLPYVKRLAEFMGYGFTKEEEEGNVVEKVVKLCSFETLKNLEANKGEKDREDRPAVYANSAYFRKGKVGDWQNYLTPEMVARIDGLMEEKFKGTGFLSSKS

SEQ ID NO: 72605 - DNA, 1899 bp, Arabidopsis thaliana
  misc_feature (1)..(1899): Ceres Seq. ID no. 4939446
  misc_feature: MA Experiment ID: 20000180 Result: Up-regulated in Transcription
  misc_feature: MA Experiment 20000180 PARAMETER Experiment Name: At_Germinating_Seeds_P Parameter: Age (hr) Value: 24 vs. 0
  misc_feature: MA Experiment 20000180 PARAMETER Experiment Name: At_Germinating_Seeds_P Parameter: Tissue Value: Germinating Seeds
  misc_feature: MA Experiment ID: 20000227 Result: Up-regulated in Transcription
  misc_feature: MA Experiment 20000227 PARAMETER Experiment Name: At_Root-Tips-vs-Tops_P Parameter: Tissue Value: Root Tips vs. Root Tops
atgatgcttcttcttcaccatcattcttcatactgtttctctcaatttctatctgtttcaggatatacttgctcatcagattttatagagatagactacgcctttaagctgttaagaaatctcgtatatagagaagggactgtgacacctggcaatgatgaaacagcacatgttatagaggagcttgaaaacgaaaatgttgtggaagattttgcaaatataacttcgcctgctgggaagtcgtttcttatgggagagagtgtgggatctacacattctgtgagtaacaaaaagacagtcttcaccgattatagttataagttagaccgtgtctggattcaagtgccatctggaggtctctcccctgatgggtcaagatcctcaggaagtggcagaggactgtcgacaacggctgtatcaaatggtggatggagaacccgtgggtttttgcgcggttggcagatccagaataccttatttaacaacatcaagttcatgattctctgctgcttcgtgaccattctcatcctacttggcacaatccgtgttgggaaccttggaagctccaacgccgactctgttaatcagagtttcatcaaggaaaccattccgattctcgcggagatcccctctgattcgcattcgacggacttggctgagcctcctaaagctgatgttagtcccaatgcaacgtatactctagagccaagaatcgcggagatcccatctgatgtgcattcaacggacttggttgagctgcctaaagctgatattagtcccaatgcaacgtatactctaggccccagaatcgcggagatcccatctgattcgcatttgacagacttgcttgagccgcctaaagctgatattagtcccaatgcgacatatactctagggcccaaaatcaccaactgggatagtcaacgcaaggtatggctgaatcagaaccctgagtttcctaatattgtcaatggcaaagctcgaatattgcttctcacagggtcttcccccggaccctgtgataaaccaattggaaactattatctattgaaagctgtgaagaacaagattgattactgtagactccacgggatagagattgtgtataacatggcgaatttggatgaggaactctcagggtattggacgaaattacctatgattaggacattaatgctgtctcatccagaagtagaatggatttggtggatggatagtgatgctttgttcactgatatactgtttgagatcccgttgcctcggtacgaaaatcataatctggtgatacacggttatccagacttgctgttcaaccaaaaatcatgggttgcattgaacacgggtatctttctgttgagaaattgtcagtggtcattggatttattagatgcttgggccccaatgggaccaaaagggaagatccgtgacgaaactgggaagatactgacagcttatctgaaaggcaggccagcatttgaggccgatgatcaatcggcgttgatatatctcttgctttcgcagaaggaaaaatggatagagaaggtttatgtggagaatcaatactacttgcacgggttttgggaaggtttggttgacaggtatgaagagatgatagagaagtatcatccaggattgggcgatgagagatggccctttgtgacacattttgtagggtgcaaaccgtgtggcagctatgctgattacgcagtcgatagatgcttcaagagcatggagagggcttttaattttgcagataatcaagtgctgaagctgtatgggtttagccacaggggactgttgagtcccaagattaaaaggatcagaaatgagacagtctctcctctggagtcagtagacaagtttgatattcgaagaatgcacatggaaaccaaaccatag

SEQ ID NO: 72606 - protein, 632 aa, Arabidopsis thaliana
  peptide (1)..(632): Ceres Seq. ID no. 4939447
  misc_feature (325)..(569): Pfam Name: galactosyl transferase GMA12/MNN10 family Pfam Description: galactosyl transferase GMA12/MNN10 family
  misc_feature (123)..(632): Homolog of NCBI NO: 25349326 NR Description: hypothetical protein F6A14.20 - Arabidopsis >gi|6730715|gb|AAF27110.1|AC011809_19 Similar to
  misc_feature (270)..(632): Homolog of NCBI NO: 15221224 NR Description: putative alpha galactosyltransferase; protein id:
  misc_feature (121)..(240): Homolog of NCBI NO: 15221224 NR Description: putative alpha galactosyltransferase; protein id:
  misc_feature (270)..(625): Homolog of NCBI NO: 15240848 NR Description: alpha galactosyltransferase protein; protein id: [Arabidopsis thaliana] >gi|9716848|emb|CAC01676.1| putative golgi [Arabidopsis thaliana] >gi|9759594|dbj|BAB11451.1| alpha
  misc_feature (125)..(238): Homolog of NCBI NO: 15240848 NR Description: alpha galactosyltransferase protein; protein id: [Arabidopsis thaliana] >gi|9716848|emb|CAC01676.1| putative golgi [Arabidopsis thaliana] >gi|9759594|dbj|BAB11451.1| alpha
  misc_feature (238)..(272): Homolog of NCBI NO: 15221224 NR Description: putative alpha galactosyltransferase; protein id:
  misc_feature (224)..(270): Homolog of NCBI NO: 15240848 NR Description: alpha galactosyltransferase protein; protein id: [Arabidopsis thaliana] >gi|9716848|emb|CAC01676.1| putative golgi [Arabidopsis thaliana] >gi|9759594|dbj|BAB11451.1| alpha
  misc_feature (284)..(623): Homolog of NCBI NO: 18411962 NR Description: putative glycosyltransferase; protein id: supported by cDNA: gi_16209668 [Arabidopsis thaliana]
  misc_feature (284)..(623): Homolog of NCBI NO: 25349323 NR Description: probable glycosyltransferase [imported] - thaliana >gi|3892054|gb|AAC78266.1|AAC78266 putative [Arabidopsis thaliana] >gi|7269010|emb|CAB80743.1| putative
  misc_feature (293)..(623): Homolog of NCBI NO: 15228843 NR Description: alpha galactosyltransferase-like protein; protein At3g62720.1, supported by cDNA: gi_15983425 [Arabidopsis
MMLLLHHHSSYCFSQFLSVSGYTCSSDFIEIDYAFKLLRNLVYREGTVTPGNDETAHVIEELENENVVEDFANITSPAGKSFLMGESVGSTHSVSNKKTVFTDYSYKLDRVWIQVPSGGLSPDGSRSSGSGRGLSTTAVSNGGWRTRGFLRGWQIQNTLFNNIKFMILCCFVTILILLGTIRVGNLGSSNADSVNQSFIKETIPILAEIPSDSHSTDLAEPPKADVSPNATYTLEPRIAEIPSDVHSTDLVELPKADISPNATYTLGPRIAEIPSDSHLTDLLEPPKADISPNATYTLGPKITNWDSQRKVWLNQNPEFPNIVNGKARILLLTGSSPGPCDKPIGNYYLLKAVKNKIDYCRLHGIEIVYNMANLDEELSGYWTKLPMIRTLMLSHPEVEWIWWMDSDALFTDILFEIPLPRYENHNLVIHGYPDLLFNQKSWVALNTGIFLLRNCQWSLDLLDAWAPMGPKGKIRDETGKILTAYLKGRPAFEADDQSALIYLLLSQKEKWIEKVYVENQYYLHGFWEGLVDRYEEMIEKYHPGLGDERWPFVTHFVGCKPCGSYADYAVDRCFKSMERAFNFADNQVLKLYGFSHRGLLSPKIKRIRNETVSPLESVDKFDIRRMHMETKP

SEQ ID NO: 72607 - protein, 631 aa, Arabidopsis thaliana
  peptide (1)..(631): Ceres Seq. ID no. 4939448
  misc_feature (324)..(568): Pfam Name: galactosyl transferase GMA12/MNN10 family Pfam Description: galactosyl transferase GMA12/MNN10 family
  misc_feature (122)..(631): Homolog of NCBI NO: 25349326 NR Description: hypothetical protein F6A14.20 - Arabidopsis >gi|6730715|gb|AAF27110.1|AC011809_19 Similar to
  misc_feature (269)..(631): Homolog of NCBI NO: 15221224 NR Description: putative alpha galactosyltransferase; protein id:
  misc_feature (120)..(239): Homolog of NCBI NO: 15221224 NR Description: putative alpha galactosyltransferase; protein id:
  misc_feature (269)..(624): Homolog of NCBI NO: 15240848 NR Description: alpha galactosyltransferase protein; protein id: [Arabidopsis thaliana] >gi|9716848|emb|CAC01676.1| putative golgi [Arabidopsis thaliana] >gi|9759594|dbj|BAB11451.1| alpha
  misc_feature (124)..(237): Homolog of NCBI NO: 15240848 NR Description: alpha galactosyltransferase protein; protein id: [Arabidopsis thaliana] >gi|9716848|emb|CAC01676.1| putative golgi [Arabidopsis thaliana] >gi|9759594|dbj|BAB11451.1| alpha
  misc_feature (237)..(271): Homolog of NCBI NO: 15221224 NR Description: putative alpha galactosyltransferase; protein id:
  misc_feature (223)..(269): Homolog of NCBI NO: 15240848 NR Description: alpha galactosyltransferase protein; protein id: [Arabidopsis thaliana] >gi|9716848|emb|CAC01676.1| putative golgi [Arabidopsis thaliana] >gi|9759594|dbj|BAB11451.1| alpha
  misc_feature (283)..(622): Homolog of NCBI NO: 18411962 NR Description: putative glycosyltransferase; protein id: supported by cDNA: gi_16209668 [Arabidopsis thaliana]
  misc_feature (283)..(622): Homolog of NCBI NO: 25349323 NR Description: probable glycosyltransferase [imported] - thaliana >gi|3892054|gb|AAC78266.1|AAC78266 putative [Arabidopsis thaliana] >gi|7269010|emb|CAB80743.1| putative
  misc_feature (292)..(622): Homolog of NCBI NO: 15228843 NR Description: alpha galactosyltransferase-like protein; protein At3g62720.1, supported by cDNA: gi_15983425 [Arabidopsis
MLLLHHHSSYCFSQFLSVSGYTCSSDFIEIDYAFKLLRNLVYREGTVTPGNDETAHVIEELENENVVEDFANITSPAGKSFLMGESVGSTHSVSNKKTVFTDYSYKLDRVWIQVPSGGLSPDGSRSSGSGRGLSTTAVSNGGWRTRGFLRGWQIQNTLFNNIKFMILCCFVTILILLGTIRVGNLGSSNADSVNQSFIKETIPILAEIPSDSHSTDLAEPPKADVSPNATYTLEPRIAEIPSDVHSTDLVELPKADISPNATYTLGPRIAEIPSDSHLTDLLEPPKADISPNATYTLGPKITNWDSQRKVWLNQNPEFPNIVNGKARILLLTGSSPGPCDKPIGNYYLLKAVKNKIDYCRLHGIEIVYNMANLDEELSGYWTKLPMIRTLMLSHPEVEWIWWMDSDALFTDILFEIPLPRYENHNLVIHGYPDLLFNQKSWVALNTGIFLLRNCQWSLDLLDAWAPMGPKGKIRDETGKILTAYLKGRPAFEADDQSALIYLLLSQKEKWIEKVYVENQYYLHGFWEGLVDRYEEMIEKYHPGLGDERWPFVTHFVGCKPCGSYADYAVDRCFKSMERAFNFADNQVLKLYGFSHRGLLSPKIKRIRNETVSPLESVDKFDIRRMHMETKP

SEQ ID NO: 72608 - protein, 549 aa, Arabidopsis thaliana
  peptide (1)..(549): Ceres Seq. ID no. 4939449
  misc_feature (242)..(486): Pfam Name: galactosyl transferase GMA12/MNN10 family Pfam Description: galactosyl transferase GMA12/MNN10 family
  misc_feature (40)..(549): Homolog of NCBI NO: 25349326 NR Description: hypothetical protein F6A14.20 - Arabidopsis >gi|6730715|gb|AAF27110.1|AC011809_19 Similar to
  misc_feature (187)..(549): Homolog of NCBI NO: 15221224 NR Description: putative alpha galactosyltransferase; protein id:
  misc_feature (38)..(157): Homolog of NCBI NO: 15221224 NR Description: putative alpha galactosyltransferase; protein id:
  misc_feature (187)..(542): Homolog of NCBI NO: 15240848 NR Description: alpha galactosyltransferase protein; protein id: [Arabidopsis thaliana] >gi|9716848|emb|CAC01676.1| putative golgi [Arabidopsis thaliana] >gi|9759594|dbj|BAB11451.1| alpha
  misc_feature (42)..(155): Homolog of NCBI NO: 15240848 NR Description: alpha galactosyltransferase protein; protein id: [Arabidopsis thaliana] >gi|9716848|emb|CAC01676.1| putative golgi [Arabidopsis thaliana] >gi|9759594|dbj|BAB11451.1| alpha
  misc_feature (155)..(189): Homolog of NCBI NO: 15221224 NR Description: putative alpha galactosyltransferase; protein id:
  misc_feature (141)..(187): Homolog of NCBI NO: 15240848 NR Description: alpha galactosyltransferase protein; protein id: [Arabidopsis thaliana] >gi|9716848|emb|CAC01676.1| putative golgi [Arabidopsis thaliana] >gi|9759594|dbj|BAB11451.1| alpha
  misc_feature (201)..(540): Homolog of NCBI NO: 18411962 NR Description: putative glycosyltransferase; protein id: supported by cDNA: gi_16209668 [Arabidopsis thaliana]
  misc_feature (201)..(540): Homolog of NCBI NO: 25349323 NR Description: probable glycosyltransferase [imported] - thaliana >gi|3892054|gb|AAC78266.1|AAC78266 putative [Arabidopsis thaliana] >gi|7269010|emb|CAB80743.1| putative
  misc_feature (210)..(540): Homolog of NCBI NO: 15228843 NR Description: alpha galactosyltransferase-like protein; protein At3g62720.1, supported by cDNA: gi_15983425 [Arabidopsis
MGESVGSTHSVSNKKTVFTDYSYKLDRVWIQVPSGGLSPDGSRSSGSGRGLSTTAVSNGGWRTRGFLRGWQIQNTLFNNIKFMILCCFVTILILLGTIRVGNLGSSNADSVNQSFIKETIPILAEIPSDSHSTDLAEPPKADVSPNATYTLEPRIAEIPSDVHSTDLVELPKADISPNATYTLGPRIAEIPSDSHLTDLLEPPKADISPNATYTLGPKITNWDSQRKVWLNQNPEFPNIVNGKARILLLTGSSPGPCDKPIGNYYLLKAVKNKIDYCRLHGIEIVYNMANLDEELSGYWTKLPMIRTLMLSHPEVEWIWWMDSDALFTDILFEIPLPRYENHNLVIHGYPDLLFNQKSWVALNTGIFLLRNCQWSLDLLDAWAPMGPKGKIRDETGKILTAYLKGRPAFEADDQSALIYLLLSQKEKWIEKVYVENQYYLHGFWEGLVDRYEEMIEKYHPGLGDERWPFVTHFVGCKPCGSYADYAVDRCFKSMERAFNFADNQVLKLYGFSHRGLLSPKIKRIRNETVSPLESVDKFDIRRMHMETKP

SEQ ID NO: 72609 - DNA, 1818 bp, Arabidopsis thaliana
  misc_feature (1)..(1818): Ceres Seq. ID no. 4939477
  misc_feature: MA Experiment ID: 20000173 Result: Down-regulated in Transcription
  misc_feature: MA Experiment 20000173 PARAMETER Experiment Name: At_42deg_Heat_P Parameter: Age (day) Value: 14
  misc_feature: MA Experiment 20000173 PARAMETER Experiment Name: At_42deg_Heat_P Parameter: Organism Value: A. thaliana
  misc_feature: MA Experiment 20000173 PARAMETER Experiment Name: At_42deg_Heat_P Parameter: Plant Line Value: WS
  misc_feature: MA Experiment 20000173 PARAMETER Experiment Name: At_42deg_Heat_P Parameter: Temperature (deg C) Value: 42 vs. 22
  misc_feature: MA Experiment 20000173 PARAMETER Experiment Name: At_42deg_Heat_P Parameter: Timepoint (hr) Value: 6
  misc_feature: MA Experiment 20000173 PARAMETER Experiment Name: At_42deg_Heat_P Parameter: Tissue Value: Aerial
  misc_feature: MA Experiment ID: 20000179 Result: Down-regulated in Transcription
  misc_feature: MA Experiment 20000179 PARAMETER Experiment Name: At_Germinating_Seeds_P Parameter: Age (hr) Value: 6 vs. 0
  misc_feature: MA Experiment 20000179 PARAMETER Experiment Name: At_Germinating_Seeds_P Parameter: Tissue Value: Germinating Seeds
  misc_feature: MA Experiment ID: 20000180 Result: Down-regulated in Transcription
  misc_feature: MA Experiment 20000180 PARAMETER Experiment Name: At_Germinating_Seeds_P Parameter: Age (hr) Value: 24 vs. 0
  misc_feature: MA Experiment 20000180 PARAMETER Experiment Name: At_Germinating_Seeds_P Parameter: Tissue Value: Germinating Seeds
  misc_feature: MA Experiment ID: 20000182 Result: Up-regulated in Transcription
  misc_feature: MA Experiment 20000182 PARAMETER Experiment Name: At_2mM_SA_P Parameter: Age (day) Value: 14
  misc_feature: MA Experiment 20000182 PARAMETER Experiment Name: At_2mM_SA_P Parameter: Organism Value: A. thaliana
  misc_feature: MA Experiment 20000182 PARAMETER Experiment Name: At_2mM_SA_P Parameter: Plant Line Value: WS
  misc_feature: MA Experiment 20000182 PARAMETER Experiment Name: At_2mM_SA_P Parameter: Timepoint (hr) Value: 6
  misc_feature: MA Experiment 20000182 PARAMETER Experiment Name: At_2mM_SA_P Parameter: Tissue Value: Aerial
  misc_feature: MA Experiment 20000182 PARAMETER Experiment Name: At_2mM_SA_P Parameter: Treatment Value: 2mM SA vs. No Treatment
  misc_feature: MA Experiment ID: 20000184 Result: Down-regulated in Transcription
  misc_feature: MA Experiment 20000184 PARAMETER Experiment Name: At_Shoots__P Parameter: Age (day) Value: 7
  misc_feature: MA Experiment 20000184 PARAMETER Experiment Name: At_Shoots__P Parameter: Tissue Value: Shoots vs. Whole Plant
  misc_feature: MA Experiment ID: 20000185 Result: Up-regulated in Transcription
  misc_feature: MA Experiment 20000185 PARAMETER Experiment Name: At_Roots__P Parameter: Age (day) Value: 7 vs. 21
  misc_feature: MA Experiment 20000185 PARAMETER Experiment Name: At_Roots__P Parameter: Organism Value: A. thaliana
  misc_feature: MA Experiment 20000185 PARAMETER Experiment Name: At_Roots__P Parameter: Tissue Value: Roots vs. Whole Plant
  misc_feature: MA Experiment ID: 20000234 Result: Down-regulated in Transcription
  misc_feature: MA Experiment 20000234 PARAMETER Experiment Name: At_Siliques_P Parameter: Age (day) Value: 21
  misc_feature: MA Experiment 20000234 PARAMETER Experiment Name: At_Siliques_P Parameter: Organism Value: A. thaliana
  misc_feature: MA Experiment 20000234 PARAMETER Experiment Name: At_Siliques_P Parameter: Plant Line Value: WS
  misc_feature: MA Experiment 20000234 PARAMETER Experiment Name: At_Siliques_P Parameter: Tissue Value: Less Than 5mm Siliques vs. Whole Plant
  misc_feature: MA Experiment ID: 20000235 Result: Down-regulated in Transcription
  misc_feature: MA Experiment 20000235 PARAMETER Experiment Name: At_Siliques_P Parameter: Age (day) Value: 21
  misc_feature: MA Experiment 20000235 PARAMETER Experiment Name: At_Siliques_P Parameter: Organism Value: A. thaliana
  misc_feature: MA Experiment 20000235 PARAMETER Experiment Name: At_Siliques_P Parameter: Plant Line Value: WS
  misc_feature: MA Experiment 20000235 PARAMETER Experiment Name: At_Siliques_P Parameter: Tissue Value: 5-10mm Siliques vs. Whole Plant
  misc_feature: MA Experiment ID: 20000264 Result: Down-regulated in Transcription
  misc_feature: MA Experiment 20000264 PARAMETER Experiment Name: At_Open_Flower_P Parameter: Age (day) Value: 21
  misc_feature: MA Experiment 20000264 PARAMETER Experiment Name: At_Open_Flower_P Parameter: Plant Line Value: WS
  misc_feature: MA Experiment 20000264 PARAMETER Experiment Name: At_Open_Flower_P Parameter: Tissue Value: Open Flower vs. Whole Plant
  misc_feature: MA Experiment ID: 20000265 Result: Down-regulated in Transcription
  misc_feature: MA Experiment 20000265 PARAMETER Experiment Name: At_Open_Flower_P Parameter: Age (day) Value: 21
  misc_feature: MA Experiment 20000265 PARAMETER Experiment Name: At_Open_Flower_P Parameter: Plant Line Value: WS
  misc_feature: MA Experiment 20000265 PARAMETER Experiment Name: At_Open_Flower_P Parameter: Tissue Value: Closed Flower vs. Whole Plant
  misc_feature: MA Experiment ID: 20000286 Result: Down-regulated in Transcription
  misc_feature: MA Experiment 20000286 PARAMETER Experiment Name: At_Open_Flower_P Parameter: Age (day) Value: 21
  misc_feature: MA Experiment 20000286 PARAMETER Experiment Name: At_Open_Flower_P Parameter: Plant Line Value: WS
  misc_feature: MA Experiment 20000286 PARAMETER Experiment Name: At_Open_Flower_P Parameter: Tissue Value: Half Open vs. Whole Plant
  misc_feature: MA Experiment ID: 20000438 Result: Down-regulated in Transcription
  misc_feature: MA Experiment 20000438 PARAMETER Experiment Name: At_Shoots__P Parameter: Age (day) Value: 14
  misc_feature: MA Experiment 20000438 PARAMETER Experiment Name: At_Shoots__P Parameter: Tissue Value: Shoots vs. Whole Plant
  misc_feature: MA Experiment ID: 20000439 Result: Up-regulated in Transcription
  misc_feature: MA Experiment 20000439 PARAMETER Experiment Name: At_Roots__P Parameter: Age (day) Value: 14 vs. 21
  misc_feature: MA Experiment 20000439 PARAMETER Experiment Name: At_Roots__P Parameter: Organism Value: A. thaliana
  misc_feature: MA Experiment 20000439 PARAMETER Experiment Name: At_Roots__P Parameter: Tissue Value: Roots vs. Whole Plant
  misc_feature: MA Experiment ID: 20000794 Result: Down-regulated in Transcription
  misc_feature: MA Experiment 20000794 PARAMETER Experiment Name: At_Petals_P Parameter: Age (day) Value: 23-25 days
  misc_feature: MA Experiment 20000794 PARAMETER Experiment Name: At_Petals_P Parameter: Plant Line Value: WS
  misc_feature: MA Experiment 20000794 PARAMETER Experiment Name: At_Petals_P Parameter: Tissue Value: Petals vs. Whole plant
  misc_feature: MA Experiment ID: 20001248 Result: Up-regulated in Transcription
  misc_feature: MA Experiment 20001248 PARAMETER Experiment Name: At_Far-red-induction_P Parameter: Age (day) Value: 7
  misc_feature: MA Experiment 20001248 PARAMETER Experiment Name: At_Far-red-induction_P Parameter: Light Value: Far-red vs. White
  misc_feature: MA Experiment 20001248 PARAMETER Experiment Name: At_Far-red-induction_P Parameter: Organism Value: A. thaliana
  misc_feature: MA Experiment 20001248 PARAMETER Experiment Name: At_Far-red-induction_P Parameter: Plant Line Value: Columbia
  misc_feature: MA Experiment 20001248 PARAMETER Experiment Name: At_Far-red-induction_P Parameter: Timepoint (hr) Value: 4
  misc_feature: MA Experiment 20001248 PARAMETER Experiment Name: At_Far-red-induction_P Parameter: Tissue Value: Whole Plant
  misc_feature: MA Experiment ID: 20001558 Result: Down-regulated in Transcription
  misc_feature: MA Experiment 20001558 PARAMETER Experiment Name: At_Drought_Soil_Dry_P Parameter: Age (day) Value: 27
  misc_feature: MA Experiment 20001558 PARAMETER Experiment Name: At_Drought_Soil_Dry_P Parameter: Organism Value: A. thaliana
  misc_feature: MA Experiment 20001558 PARAMETER Experiment Name: At_Drought_Soil_Dry_P Parameter: Plant Line Value: WS
  misc_feature: MA Experiment 20001558 PARAMETER Experiment Name: At_Drought_Soil_Dry_P Parameter: Post Timepoint (hr) Value: 6
  misc_feature: MA Experiment 20001558 PARAMETER Experiment Name: At_Drought_Soil_Dry_P Parameter: Post-Treatment Value: Re-Water vs. No Drought
  misc_feature: MA Experiment 20001558 PARAMETER Experiment Name: At_Drought_Soil_Dry_P Parameter: Timepoint (day) Value: 13
  misc_feature: MA Experiment 20001558 PARAMETER Experiment Name: At_Drought_Soil_Dry_P Parameter: Treatment Value: Drought vs. No Drought
  misc_feature: MA Experiment ID: 20001560 Result: Down-regulated in Transcription
  misc_feature: MA Experiment 20001560 PARAMETER Experiment Name: At_Drought_Soil_Dry_P Parameter: Age (day) Value: 28
  misc_feature: MA Experiment 20001560 PARAMETER Experiment Name: At_Drought_Soil_Dry_P Parameter: Organism Value: A. thaliana
  misc_feature: MA Experiment 20001560 PARAMETER Experiment Name: At_Drought_Soil_Dry_P Parameter: Plant Line Value: WS
  misc_feature: MA Experiment 20001560 PARAMETER Experiment Name: At_Drought_Soil_Dry_P Parameter: Post Timepoint (hr) Value: None
  misc_feature: MA Experiment 20001560 PARAMETER Experiment Name: At_Drought_Soil_Dry_P Parameter: Post-Treatment Value: None
  misc_feature: MA Experiment 20001560 PARAMETER Experiment Name: At_Drought_Soil_Dry_P Parameter: Timepoint (day) Value: 14
  misc_feature: MA Experiment 20001560 PARAMETER Experiment Name: At_Drought_Soil_Dry_P Parameter: Treatment Value: Drought vs. No Drought
  misc_feature: MA Experiment ID: 20001905 Result: Up-regulated in Transcription
  misc_feature: MA Experiment 20001905 PARAMETER Experiment Name: At_Drought_Reproduction_P Parameter: Age (day) Value: 40
  misc_feature: MA Experiment 20001905 PARAMETER Experiment Name: At_Drought_Reproduction_P Parameter: Organism Value: A. thaliana
  misc_feature: MA Experiment 20001905 PARAMETER Experiment Name: At_Drought_Reproduction_P Parameter: Plant Line Value: WS
  misc_feature: MA Experiment 20001905 PARAMETER Experiment Name: At_Drought_Reproduction_P Parameter: Timepoint (day) Value: 10
  misc_feature: MA Experiment 20001905 PARAMETER Experiment Name: At_Drought_Reproduction_P Parameter: Tissue Value: Rosettes
  misc_feature: MA Experiment 20001905 PARAMETER Experiment Name: At_Drought_Reproduction_P Parameter: Treatment Value: Drought vs. No Drought
atgaatccttcaactccaagtttactctacacatccatcttcttctacttcacaataatagcaactcaaaccctctctcttgatccaaagttcaaggcttgtgagccgaaatcatgcggcaaaggtccccagatctcctatccattttatctatctggaaagcaagaatctttttgtggttatccaagttttgaactcacttgtgatgatgaagaaaagctccctgttctcgggatctccggtgaggaatatgtcatcaagaacatatcttacttaacacagtcgtttcaggtcgtgaactcaaaggcttctcatgatccatgtcccagaccgctgaacaatcttaccctccataggactcctttctttgtgaacccttctcatatcaacttcactatactttacaattgttccgatcacctgctggaggattttaggacataccctcttacttgtgctcgaaacacgagtcttcttcgatcttttggggtctttgacagaaagaaacttggaaaagagaaacaaattgcatccatgtcgtgccagaaactagtggatgttcctgttttagctagtaatgagtctgatgtgatgggtatgacttatgttgagattttgaagaggggttttgttctgaattggactgcaaacagttgcttccgctgcatcaccagcggcgggagatgtggaactgatcaacaagaattcgtatgcttgtgtcctgatggacctaaacttcatgatacttgcacgaatgcattgcttccaagaaacatctcatcagatccatctgcaaagtcttttgacatcgagaaagcagaggaattattagtcggagttcatattttctcttacgaagaacttgaagaagccactaataacttcgacccatctaaagaactcggtgatggaggctttggtactgtctattacggtaagcttaaagatggacgaagcgtagccgttaaacggttatacgataacaacttcaaaagagcagagcaattcaggaatgaagttgagatcttaacgggtttacgccatccaaacctcgtggctctctttggatgctcctcaaaacagagccgggacttactgctagtgtatgagtatgttgcaaacggcacgttagctgatcatctacatggtccacaggcaaaccctagctcacttccttggtctattcggctcaaaatcgctgttgaaactgcctctgccttgaagtatctccacgcctccaagatcatccaccgtgatgttaaatccaacaacatccttctcgaccaaaacttcaatgtcaaggttgcggattttggactctctagactgtttcctatggataaaacgcacgtatctaccgctccacaaggaactccgggatatgtcgacccggattaccacttatgctatcaactctcaaacaaaagcgacgtgtacagctttgcggtagtgttaatggagcttatctcttcacttccagcagtcgacatcacaagaccgcgccaagagatcaacctctcgaacatggcagtcgttaaaatccagaaccacgagctccgcgacatggtggatccgtcacttgggtttgacacggatacaagagtgagacagacggtgatcgctgtcgctgagctggcgttccaatgcttgcagtcggataaagatcttaggccatgtatgtcgcacgtgcaggatacgttgacgaggatacagaacaatggatttggttcggaaatggatgttgtagatgtgaacaagagtggaccgttggttgcacagtctccagatagtgtcattgtgaaatgggacagtaagtaa

SEQ ID NO: 72610 - protein, 605 aa, Arabidopsis thaliana
  peptide (1)..(605): Ceres Seq. ID no. 4939478
  misc_feature (295)..(490): Pfam Name: Protein kinase domain Pfam Description: Protein kinase domain
  misc_feature (277)..(604): Homolog of NCBI NO: 15408730 NR Description: P0443D08.12 [Oryza sativa (japonica
  misc_feature (33)..(266): Homolog of NCBI NO: 15408730 NR Description: P0443D08.12 [Oryza sativa (japonica
  misc_feature (279)..(585): Homolog of NCBI NO: 10177797 NR Description: contains similarity to protein
  misc_feature (8)..(277): Homolog of NCBI NO: 10177797 NR Description: contains similarity to protein
  misc_feature (279)..(585): Homolog of NCBI NO: 22327431 NR Description: protein kinase - like protein; protein id: supported by cDNA: gi_18175790 [Arabidopsis thaliana] putative protein kinase [Arabidopsis thaliana]
  misc_feature (8)..(261): Homolog of NCBI NO: 22327431 NR Description: protein kinase - like protein; protein id: supported by cDNA: gi_18175790 [Arabidopsis thaliana] putative protein kinase [Arabidopsis thaliana]
  misc_feature (279)..(588): Homolog of NCBI NO: 24417464 NR Description: unknown [Arabidopsis thaliana]
  misc_feature (279)..(588): Homolog of NCBI NO: 25404646 NR Description: probable wall-associated kinase T4O24.5
  misc_feature (279)..(588): Homolog of NCBI NO: 12597754 NR Description: protein kinase, putative [Arabidopsis thaliana]
  misc_feature (279)..(588): Homolog of NCBI NO: 30697422 NR Description: serine/threonine protein kinase family
MNPSTPSLLYTSIFFYFTIIATQTLSLDPKFKACEPKSCGKGPQISYPFYLSGKQESFCGYPSFELTCDDEEKLPVLGISGEEYVIKNISYLTQSFQVVNSKASHDPCPRPLNNLTLHRTPFFVNPSHINFTILYNCSDHLLEDFRTYPLTCARNTSLLRSFGVFDRKKLGKEKQIASMSCQKLVDVPVLASNESDVMGMTYVEILKRGFVLNWTANSCFRCITSGGRCGTDQQEFVCLCPDGPKLHDTCTNALLPRNISSDPSAKSFDIEKAEELLVGVHIFSYEELEEATNNFDPSKELGDGGFGTVYYGKLKDGRSVAVKRLYDNNFKRAEQFRNEVEILTGLRHPNLVALFGCSSKQSRDLLLVYEYVANGTLADHLHGPQANPSSLPWSIRLKIAVETASALKYLHASKIIHRDVKSNNILLDQNFNVKVADFGLSRLFPMDKTHVSTAPQGTPGYVDPDYHLCYQLSNKSDVYSFAVVLMELISSLPAVDITRPRQEINLSNMAVVKIQNHELRDMVDPSLGFDTDTRVRQTVIAVAELAFQCLQSDKDLRPCMSHVQDTLTRIQNNGFGSEMDVVDVNKSGPLVAQSPDSVIVKWDSK

SEQ ID NO: 72611 - protein, 427 aa, Arabidopsis thaliana
  peptide (1)..(427): Ceres Seq. ID no. 4939479
  misc_feature (117)..(312): Pfam Name: Protein kinase domain Pfam Description: Protein kinase domain
  misc_feature (99)..(426): Homolog of NCBI NO: 15408730 NR Description: P0443D08.12 [Oryza sativa (japonica
  misc_feature (1)..(88): Homolog of NCBI NO: 15408730 NR Description: P0443D08.12 [Oryza sativa (japonica
  misc_feature (101)..(407): Homolog of NCBI NO: 10177797 NR Description: contains similarity to protein
  misc_feature (1)..(99): Homolog of NCBI NO: 10177797 NR Description: contains similarity to protein
  misc_feature (101)..(407): Homolog of NCBI NO: 22327431 NR Description: protein kinase - like protein; protein id: supported by cDNA: gi_18175790 [Arabidopsis thaliana] putative protein kinase [Arabidopsis thaliana]
  misc_feature (1)..(83): Homolog of NCBI NO: 22327431 NR Description: protein kinase - like protein; protein id: supported by cDNA: gi_18175790 [Arabidopsis thaliana] putative protein kinase [Arabidopsis thaliana]
  misc_feature (101)..(410): Homolog of NCBI NO: 24417464 NR Description: unknown [Arabidopsis thaliana]
  misc_feature (101)..(410): Homolog of NCBI NO: 25404646 NR Description: probable wall-associated kinase T4O24.5
  misc_feature (101)..(410): Homolog of NCBI NO: 12597754 NR Description: protein kinase, putative [Arabidopsis thaliana]
  misc_feature (101)..(410): Homolog of NCBI NO: 30697422 NR Description: serine/threonine protein kinase family
MSCQKLVDVPVLASNESDVMGMTYVEILKRGFVLNWTANSCFRCITSGGRCGTDQQEFVCLCPDGPKLHDTCTNALLPRNISSDPSAKSFDIEKAEELLVGVHIFSYEELEEATNNFDPSKELGDGGFGTVYYGKLKDGRSVAVKRLYDNNFKRAEQFRNEVEILTGLRHPNLVALFGCSSKQSRDLLLVYEYVANGTLADHLHGPQANPSSLPWSIRLKIAVETASALKYLHASKIIHRDVKSNNILLDQNFNVKVADFGLSRLFPMDKTHVSTAPQGTPGYVDPDYHLCYQLSNKSDVYSFAVVLMELISSLPAVDITRPRQEINLSNMAVVKIQNHELRDMVDPSLGFDTDTRVRQTVIAVAELAFQCLQSDKDLRPCMSHVQDTLTRIQNNGFGSEMDVVDVNKSGPLVAQSPDSVIVKWDSK

SEQ ID NO: 72612 - protein, 408 aa, Arabidopsis thaliana
  peptide (1)..(408): Ceres Seq. ID no. 4939480
  misc_feature (98)..(293): Pfam Name: Protein kinase domain Pfam Description: Protein kinase domain
  misc_feature (80)..(407): Homolog of NCBI NO: 15408730 NR Description: P0443D08.12 [Oryza sativa (japonica
  misc_feature (1)..(69): Homolog of NCBI NO: 15408730 NR Description: P0443D08.12 [Oryza sativa (japonica
  misc_feature (82)..(388): Homolog of NCBI NO: 10177797 NR Description: contains similarity to protein
  misc_feature (1)..(80): Homolog of NCBI NO: 10177797 NR Description: contains similarity to protein
  misc_feature (82)..(388): Homolog of NCBI NO: 22327431 NR Description: protein kinase - like protein; protein id: supported by cDNA: gi_18175790 [Arabidopsis thaliana] putative protein kinase [Arabidopsis thaliana]
  misc_feature (1)..(64): Homolog of NCBI NO: 22327431 NR Description: protein kinase - like protein; protein id: supported by cDNA: gi_18175790 [Arabidopsis thaliana] putative protein kinase [Arabidopsis thaliana]
  misc_feature (82)..(391): Homolog of NCBI NO: 24417464 NR Description: unknown [Arabidopsis thaliana]
  misc_feature (82)..(391): Homolog of NCBI NO: 25404646 NR Description: probable wall-associated kinase T4O24.5
  misc_feature (82)..(391): Homolog of NCBI NO: 12597754 NR Description: protein kinase, putative [Arabidopsis thaliana]
  misc_feature (82)..(391): Homolog of NCBI NO: 30697422 NR Description: serine/threonine protein kinase family
MGMTYVEILKRGFVLNWTANSCFRCITSGGRCGTDQQEFVCLCPDGPKLHDTCTNALLPRNISSDPSAKSFDIEKAEELLVGVHIFSYEELEEATNNFDPSKELGDGGFGTVYYGKLKDGRSVAVKRLYDNNFKRAEQFRNEVEILTGLRHPNLVALFGCSSKQSRDLLLVYEYVANGTLADHLHGPQANPSSLPWSIRLKIAVETASALKYLHASKIIHRDVKSNNILLDQNFNVKVADFGLSRLFPMDKTHVSTAPQGTPGYVDPDYHLCYQLSNKSDVYSFAVVLMELISSLPAVDITRPRQEINLSNMAVVKIQNHELRDMVDPSLGFDTDTRVRQTVIAVAELAFQCLQSDKDLRPCMSHVQDTLTRIQNNGFGSEMDVVDVNKSGPLVAQSPDSVIVKWDSK

SEQ ID NO: 72613 - DNA, 897 bp, Arabidopsis thaliana
  misc_feature (1)..(897): Ceres Seq. ID no. 4939488
  misc_feature: MA Experiment ID: 20000234 Result: Up-regulated in Transcription
  misc_feature: MA Experiment 20000234 PARAMETER Experiment Name: At_Siliques_P Parameter: Age (day) Value: 21
  misc_feature: MA Experiment 20000234 PARAMETER Experiment Name: At_Siliques_P Parameter: Organism Value: A. thaliana
  misc_feature: MA Experiment 20000234 PARAMETER Experiment Name: At_Siliques_P Parameter: Plant Line Value: WS
  misc_feature: MA Experiment 20000234 PARAMETER Experiment Name: At_Siliques_P Parameter: Tissue Value: Less Than 5mm Siliques vs. Whole Plant
  misc_feature: MA Experiment ID: 20000235 Result: Up-regulated in Transcription
  misc_feature: MA Experiment 20000235 PARAMETER Experiment Name: At_Siliques_P Parameter: Age (day) Value: 21
  misc_feature: MA Experiment 20000235 PARAMETER Experiment Name: At_Siliques_P Parameter: Organism Value: A. thaliana
  misc_feature: MA Experiment 20000235 PARAMETER Experiment Name: At_Siliques_P Parameter: Plant Line Value: WS
  misc_feature: MA Experiment 20000235 PARAMETER Experiment Name: At_Siliques_P Parameter: Tissue Value: 5-10mm Siliques vs. Whole Plant
  misc_feature: MA Experiment ID: 20000438 Result: Up-regulated in Transcription
  misc_feature: MA Experiment 20000438 PARAMETER Experiment Name: At_Shoots__P Parameter: Age (day) Value: 14
  misc_feature: MA Experiment 20000438 PARAMETER Experiment Name: At_Shoots__P Parameter: Tissue Value: Shoots vs. Whole Plant
  misc_feature: MA Experiment ID: 20001451 Result: Down-regulated in Transcription
  misc_feature: MA Experiment 20001451 PARAMETER Experiment Name: At_Far-red-induction_P Parameter: Age (day) Value: 7
  misc_feature: MA Experiment 20001451 PARAMETER Experiment Name: At_Far-red-induction_P Parameter: Light Value: Far-red vs. White
  misc_feature: MA Experiment 20001451 PARAMETER Experiment Name: At_Far-red-induction_P Parameter: Organism Value: A. thaliana
  misc_feature: MA Experiment 20001451 PARAMETER Experiment Name: At_Far-red-induction_P Parameter: Plant Line Value: Columbia
  misc_feature: MA Experiment 20001451 PARAMETER Experiment Name: At_Far-red-induction_P Parameter: Timepoint (hr) Value: 24
  misc_feature: MA Experiment 20001451 PARAMETER Experiment Name: At_Far-red-induction_P Parameter: Tissue Value: Whole Plant
atgaaagctgtagcttttcccgctaaaatcgcaaatcttagcttcccttctaactgttgctcactattcttccgatcaccggcgacgtttttatcgccggcattgccttgtcggaagctgacgaaaggaataagaggtctcgaaggcttgatgtctcagtgtttatcatcatcgtcacaatcattgtcattttcatcgaattcattctcctctcaaccggaatcagagttacttcaagctttaccttcttcgaagccaaaatctccgccactgcagctgccatggctcattgttggtttgggtaatcccggcaagaagtaccagggcacgcgccacaacgttggttttgagatggtggacgctttggctgatgcagaaggcatctccatgaacactgttaacttcaaggccttgtttgggaaaggcgttattggaaatataccgattatgctggctaaaccacaaactttcatgaacctaagtggtgagtctgttggacaaatcgtttcattttacaagatcccgttaaagcaagtacttgtggtttacgatgatttagatttgccctttggtaaactacgtttattgccaaaaggtggtcacggaggccacaatgggtacaatgcttttcactctctatctggcctgatgagaagtattatagaccgcctcaaaggtagccgtgattttcctcgactaagaatagggatcggacgtcctccagggaagatggatacagccaattttgttctccgccagttcaatagacaggaacaggaagagttggatcacacattccaaaccgggttagaggcaataaggattcttttgcttgaggggttcaacaaaagtgcaacatttgtcaacactcgaaaatctatggagcaactcagttag

SEQ ID NO: 72614 - protein, 298 aa, Arabidopsis thaliana
  peptide (1)..(298): Ceres Seq. ID no. 4939489
  misc_feature (1)..(298): Homolog of NCBI NO: 30685853 NR Description: expressed protein [Arabidopsis thaliana]
  misc_feature (1)..(298): Homolog of NCBI NO: 26453108 NR Description: unknown protein [Arabidopsis thaliana]
  misc_feature (1)..(165): Homolog of NCBI NO: 25402858 NR Description: protein F15H18.8 [imported] - Arabidopsis >gi|6714302|gb|AAF25998.1|AC013354_17 F15H18.8 [Arabidopsis
  misc_feature (182)..(269): Homolog of NCBI NO: 25402858 NR Description: protein F15H18.8 [imported] - Arabidopsis >gi|6714302|gb|AAF25998.1|AC013354_17 F15H18.8 [Arabidopsis
  misc_feature (94)..(298): Homolog of NCBI NO: 34911418 NR Description: putative CRS2 [Oryza sativa (japonica
  misc_feature (94)..(289): Homolog of NCBI NO: 15237280 NR Description: CRS2-like protein; protein id: At5g16140.1
  misc_feature (94)..(295): Homolog of NCBI NO: 40889732 NR Description: Chain A, Structure Of The Chloroplast Group Ii
  misc_feature (86)..(289): Homolog of NCBI NO: 6752919 NR Description: CRS2 [Zea mays]
  misc_feature (94)..(297): Homolog of NCBI NO: 30687503 NR Description: expressed protein [Arabidopsis thaliana]
  misc_feature (94)..(289): Homolog of NCBI NO: 40889730 NR Description: Chain A, Crystal Structure Of The Chloroplast
MKAVAFPAKIANLSFPSNCCSLFFRSPATFLSPALPCRKLTKGIRGLEGLMSQCLSSSSQSLSFSSNSFSSQPESELLQALPSSKPKSPPLQLPWLIVGLGNPGKKYQGTRHNVGFEMVDALADAEGISMNTVNFKALFGKGVIGNIPIMLAKPQTFMNLSGESVGQIVSFYKIPLKQVLVVYDDLDLPFGKLRLLPKGGHGGHNGYNAFHSLSGLMRSIIDRLKGSRDFPRLRIGIGRPPGKMDTANFVLRQFNRQEQEELDHTFQTGLEAIRILLLEGFNKSATFVNTRKSMEQLS

SEQ ID NO: 72615 - protein, 248 aa, Arabidopsis thaliana
  peptide (1)..(248): Ceres Seq. ID no. 4939490
  misc_feature (1)..(248): Homolog of NCBI NO: 30685853 NR Description: expressed protein [Arabidopsis thaliana]
  misc_feature (1)..(248): Homolog of NCBI NO: 26453108 NR Description: unknown protein [Arabidopsis thaliana]
  misc_feature (1)..(115): Homolog of NCBI NO: 25402858 NR Description: protein F15H18.8 [imported] - Arabidopsis >gi|6714302|gb|AAF25998.1|AC013354_17 F15H18.8 [Arabidopsis
  misc_feature (132)..(219): Homolog of NCBI NO: 25402858 NR Description: protein F15H18.8 [imported] - Arabidopsis >gi|6714302|gb|AAF25998.1|AC013354_17 F15H18.8 [Arabidopsis
  misc_feature (44)..(248): Homolog of NCBI NO: 34911418 NR Description: putative CRS2 [Oryza sativa (japonica
  misc_feature (44)..(239): Homolog of NCBI NO: 15237280 NR Description: CRS2-like protein; protein id: At5g16140.1
  misc_feature (44)..(245): Homolog of NCBI NO: 40889732 NR Description: Chain A, Structure Of The Chloroplast Group Ii
  misc_feature (36)..(239): Homolog of NCBI NO: 6752919 NR Description: CRS2 [Zea mays]
  misc_feature (44)..(247): Homolog of NCBI NO: 30687503 NR Description: expressed protein [Arabidopsis thaliana]
  misc_feature (44)..(239): Homolog of NCBI NO: 40889730 NR Description: Chain A, Crystal Structure Of The Chloroplast
MSQCLSSSSQSLSFSSNSFSSQPESELLQALPSSKPKSPPLQLPWLIVGLGNPGKKYQGTRHNVGFEMVDALADAEGISMNTVNFKALFGKGVIGNIPIMLAKPQTFMNLSGESVGQIVSFYKIPLKQVLVVYDDLDLPFGKLRLLPKGGHGGHNGYNAFHSLSGLMRSIIDRLKGSRDFPRLRIGIGRPPGKMDTANFVLRQFNRQEQEELDHTFQTGLEAIRILLLEGFNKSATFVNTRKSMEQLS

SEQ ID NO: 72616 - protein, 181 aa, Arabidopsis thaliana
  peptide (1)..(181): Ceres Seq. ID no. 4939491
  misc_feature (1)..(181): Homolog of NCBI NO: 30685853 NR Description: expressed protein [Arabidopsis thaliana]
  misc_feature (1)..(181): Homolog of NCBI NO: 26453108 NR Description: unknown protein [Arabidopsis thaliana]
  misc_feature (1)..(48): Homolog of NCBI NO: 25402858 NR Description: protein F15H18.8 [imported] - Arabidopsis >gi|6714302|gb|AAF25998.1|AC013354_17 F15H18.8 [Arabidopsis
  misc_feature (65)..(152): Homolog of NCBI NO: 25402858 NR Description: protein F15H18.8 [imported] - Arabidopsis >gi|6714302|gb|AAF25998.1|AC013354_17 F15H18.8 [Arabidopsis
  misc_feature (1)..(181): Homolog of NCBI NO: 34911418 NR Description: putative CRS2 [Oryza sativa (japonica
  misc_feature (1)..(172): Homolog of NCBI NO: 15237280 NR Description: CRS2-like protein; protein id: At5g16140.1
  misc_feature (1)..(178): Homolog of NCBI NO: 40889732 NR Description: Chain A, Structure Of The Chloroplast Group Ii
  misc_feature (1)..(172): Homolog of NCBI NO: 6752919 NR Description: CRS2 [Zea mays]
  misc_feature (1)..(180): Homolog of NCBI NO: 30687503 NR Description: expressed protein [Arabidopsis thaliana]
  misc_feature (1)..(172): Homolog of NCBI NO: 40889730 NR Description: Chain A, Crystal Structure Of The Chloroplast
MVDALADAEGISMNTVNFKALFGKGVIGNIPIMLAKPQTFMNLSGESVGQIVSFYKIPLKQVLVVYDDLDLPFGKLRLLPKGGHGGHNGYNAFHSLSGLMRSIIDRLKGSRDFPRLRIGIGRPPGKMDTANFVLRQFNRQEQEELDHTFQTGLEAIRILLLEGFNKSATFVNTRKSMEQLS

SEQ ID NO: 72617 - DNA, 1438 bp, Arabidopsis thaliana
  misc_feature (1)..(1438): Ceres Seq. ID no. 4939528
  misc_feature: MA Experiment ID: 20000173 Result: Down-regulated in Transcription
  misc_feature: MA Experiment 20000173 PARAMETER Experiment Name: At_42deg_Heat_P Parameter: Age (day) Value: 14
  misc_feature: MA Experiment 20000173 PARAMETER Experiment Name: At_42deg_Heat_P Parameter: Organism Value: A. thaliana
  misc_feature: MA Experiment 20000173 PARAMETER Experiment Name: At_42deg_Heat_P Parameter: Plant Line Value: WS
  misc_feature: MA Experiment 20000173 PARAMETER Experiment Name: At_42deg_Heat_P Parameter: Temperature (deg C) Value: 42 vs. 22
  misc_feature: MA Experiment 20000173 PARAMETER Experiment Name: At_42deg_Heat_P Parameter: Timepoint (hr) Value: 6
  misc_feature: MA Experiment 20000173 PARAMETER Experiment Name: At_42deg_Heat_P Parameter: Tissue Value: Aerial
  misc_feature: MA Experiment ID: 20000185 Result: Up-regulated in Transcription
  misc_feature: MA Experiment 20000185 PARAMETER Experiment Name: At_Roots__P Parameter: Age (day) Value: 7 vs. 21
  misc_feature: MA Experiment 20000185 PARAMETER Experiment Name: At_Roots__P Parameter: Organism Value: A. thaliana
  misc_feature: MA Experiment 20000185 PARAMETER Experiment Name: At_Roots__P Parameter: Tissue Value: Roots vs. Whole Plant
cgattctctgtttcttctagattgaatttaaaaaccctacttttgaattttcacatgggagaacaatcaccttctcaaccatcgactcaatgccaaagtcatccacaatcacccaaacccgatactcataacctaatcccaccggaatccaccgatgaatgtctcgattcagctggagtttcaggctcaatcgtctcatctaccacaatcgacgctcgacggatcactgaactaggcaatgtatcgtctccgccgtccaaaatccctctccgccctcggaaaatccggaaactcacactcgacggagacgtctccggtgaagattataaggcggaggatatctcctcatctcaagtaaactctccgctcgcgacggatggaaaatctcccggtaaaggtaaattgtcgcacttacgagctataactgtgccgaggatccaagctcgtcctctgacatgtgaaggtgagctcgaaacagcgattcactatctccgtaacgcggatcctttgctcgcggcgttaatcgacgttcatccaccgccgacgtttgagtcttttaagactccgttcttagctctgatacgaaacatcctctaccaacagcttgcaatgaaagctgggaattcaatctacacacgatttgtttctctctgcggcggcgaaaatttggttgtacctgagacggtcttatcattaaatcctcagcagcttcgtcaaattggtgtctcgggacgtaaggcgagttatcttcatgatttagctagaaagtatcaaaacggaatcttgtcggattcggcgattttgaacatggatgagaagtctttgttcacgatgctaacaatggttaatggaattgggtcatggtctgttcatatgttcatgataaattctcttcatcgaccagatgttttgccggttaatgatctcggtgttaggaaaggagtgcagttgctgtatggcttagatgacctgcctcggccatcgcagatggagcagcattgtgctaagtggagaccgtacagatcagtgggttcgtggtacatgtggcggctcattgaagctaagagcacatcaacgagtgctgctgttgcagccggagtgtcattacctccattggaagatattcaacaagaacatcagcagcaacagcttatggaccctcttaatggtgtgttcagtatcggggcttggggacaatcgtagctgttcttccacgttggtcctggatggtctgatggcttacatgagttattttgttctggacttggggtttgtgcctagtaaaaaaaaaactgtgggagaaagaataataaaaggatgtgctagtctgggttccttgagacacaagctgaagtaacagtgaatatgatcttcttagttgagtgaaagagtctgtaatgttaagagtgagtagctaatgacaaagtagtgtcttctt

SEQ ID NO: 72618 - protein, 400 aa, Arabidopsis thaliana
  peptide (1)..(400): Ceres Seq. ID no. 4939529
  misc_feature (194)..(339): Pfam Name: HhH-GPD superfamily base excision DNA repair protein Pfam Description: HhH-GPD superfamily base excision DNA repair
  misc_feature (19)..(400): Homolog of NCBI NO: 18394744 NR Description: Expressed protein; protein id: At1g19480.1,
  misc_feature (19)..(400): Homolog of NCBI NO: 21593178 NR Description: unknown [Arabidopsis thaliana]
  misc_feature (19)..(400): Homolog of NCBI NO: 25402893 NR Description: protein F18O14.25 [imported] - Arabidopsis >gi|8778423|gb|AAF79431.1|AC025808_13 F18O14.25 [Arabidopsis
  misc_feature (19)..(400): Homolog of NCBI NO: 18410802 NR Description: 3-methyladenine DNA glycosylase, putative; id: At1g75230.1, supported by cDNA: gi_13430601, supported by
  misc_feature (19)..(400): Homolog of NCBI NO: 25406423 NR Description: hypothetical protein F22H5.5 [imported] -
  misc_feature (73)..(395): Homolog of NCBI NO: 5091600 NR Description: This gene is a member of PF|01332 Alkylbase DNA
  misc_feature (144)..(357): Homolog of NCBI NO: 15230333 NR Description: putative DNA-3-methyladenine glycosidase; protein
  misc_feature (157)..(353): Homolog of NCBI NO: 37521587 NR Description: probable DNA-3-methyladenine glycosylase violaceus] >gi|35212585|dbj|BAC89959.1| gll2018 [Gloeobacter
  misc_feature (157)..(350): Homolog of NCBI NO: 22971879 NR Description: hypothetical protein [Chloroflexus aurantiacus]
  misc_feature (152)..(351): Homolog of NCBI NO: 23116389 NR Description: hypothetical protein [Desulfitobacterium
RFSVSSRLNLKTLLLNFHMGEQSPSQPSTQCQSHPQSPKPDTHNLIPPESTDECLDSAGVSGSIVSSTTIDARRITELGNVSSPPSKIPLRPRKIRKLTLDGDVSGEDYKAEDISSSQVNSPLATDGKSPGKGKLSHLRAITVPRIQARPLTCEGELETAIHYLRNADPLLAALIDVHPPPTFESFKTPFLALIRNILYQQLAMKAGNSIYTRFVSLCGGENLVVPETVLSLNPQQLRQIGVSGRKASYLHDLARKYQNGILSDSAILNMDEKSLFTMLTMVNGIGSWSVHMFMINSLHRPDVLPVNDLGVRKGVQLLYGLDDLPRPSQMEQHCAKWRPYRSVGSWYMWRLIEAKSTSTSAAVAAGVSLPPLEDIQQEHQQQQLMDPLNGVFSIGAWGQS

SEQ ID NO: 72619 - protein, 382 aa, Arabidopsis thaliana
  peptide (1)..(382): Ceres Seq. ID no. 4939530
  misc_feature (176)..(321): Pfam Name: HhH-GPD superfamily base excision DNA repair protein Pfam Description: HhH-GPD superfamily base excision DNA repair
  misc_feature (1)..(382): Homolog of NCBI NO: 18394744 NR Description: Expressed protein; protein id: At1g19480.1,
  misc_feature (1)..(382): Homolog of NCBI NO: 21593178 NR Description: unknown [Arabidopsis thaliana]
  misc_feature (1)..(382): Homolog of NCBI NO: 25402893 NR Description: protein F18O14.25 [imported] - Arabidopsis >gi|8778423|gb|AAF79431.1|AC025808_13 F18O14.25 [Arabidopsis
  misc_feature (1)..(382): Homolog of NCBI NO: 18410802 NR Description: 3-methyladenine DNA glycosylase, putative; id: At1g75230.1, supported by cDNA: gi_13430601, supported by
  misc_feature (1)..(382): Homolog of NCBI NO: 25406423 NR Description: hypothetical protein F22H5.5 [imported] -
  misc_feature (55)..(377): Homolog of NCBI NO: 5091600 NR Description: This gene is a member of PF|01332 Alkylbase DNA
  misc_feature (126)..(339): Homolog of NCBI NO: 15230333 NR Description: putative DNA-3-methyladenine glycosidase; protein
  misc_feature (139)..(335): Homolog of NCBI NO: 37521587 NR Description: probable DNA-3-methyladenine glycosylase violaceus] >gi|35212585|dbj|BAC89959.1| gll2018 [Gloeobacter
  misc_feature (139)..(332): Homolog of NCBI NO: 22971879 NR Description: hypothetical protein [Chloroflexus aurantiacus]
  misc_feature (134)..(333): Homolog of NCBI NO: 23116389 NR Description: hypothetical protein [Desulfitobacterium
MGEQSPSQPSTQCQSHPQSPKPDTHNLIPPESTDECLDSAGVSGSIVSSTTIDARRITELGNVSSPPSKIPLRPRKIRKLTLDGDVSGEDYKAEDISSSQVNSPLATDGKSPGKGKLSHLRAITVPRIQARPLTCEGELETAIHYLRNADPLLAALIDVHPPPTFESFKTPFLALIRNILYQQLAMKAGNSIYTRFVSLCGGENLVVPETVLSLNPQQLRQIGVSGRKASYLHDLARKYQNGILSDSAILNMDEKSLFTMLTMVNGIGSWSVHMFMINSLHRPDVLPVNDLGVRKGVQLLYGLDDLPRPSQMEQHCAKWRPYRSVGSWYMWRLIEAKSTSTSAAVAAGVSLPPLEDIQQEHQQQQLMDPLNGVFSIGAWGQS

SEQ ID NO: 72620 - DNA, 1279 bp, Arabidopsis thaliana
  misc_feature (1)..(1279): Ceres Seq. ID no. 4939692
  misc_feature: MA Experiment ID: 108461 Result: Down-regulated in Transcription
  misc_feature: MA Experiment 108461 PARAMETER Experiment Name: At_Germinating_Seeds_cDNA_P Parameter: Age (day) Value: 1 vs. 0
  misc_feature: MA Experiment 108461 PARAMETER Experiment Name: At_Germinating_Seeds_cDNA_P Parameter: Tissue Value: Germinating Seeds
  misc_feature: MA Experiment ID: 108501 Result: Down-regulated in Transcription
  misc_feature: MA Experiment 108501 PARAMETER Experiment Name: At_ap2_floral_buds_cDNA_P Parameter: Plant Line Value: ap2 (Ler.)
  misc_feature: MA Experiment 108501 PARAMETER Experiment Name: At_ap2_floral_buds_cDNA_P Parameter: Tissue Value: Closed Flower
  misc_feature: MA Experiment ID: 108572 Result: Down-regulated in Transcription
  misc_feature: MA Experiment 108572 PARAMETER Experiment Name: At_Drought_cDNA_P Parameter: Timepoint (hr) Value: 1
  misc_feature: MA Experiment 108572 PARAMETER Experiment Name: At_Drought_cDNA_P Parameter: Tissue Value: Aerial
  misc_feature: MA Experiment 108572 PARAMETER Experiment Name: At_Drought_cDNA_P Parameter: Treatment Value: Drought vs. No Drought
  misc_feature: MA Experiment ID: 20000286 Result: Up-regulated in Transcription
  misc_feature: MA Experiment 20000286 PARAMETER Experiment Name: At_Open_Flower_P Parameter: Age (day) Value: 21
  misc_feature: MA Experiment 20000286 PARAMETER Experiment Name: At_Open_Flower_P Parameter: Plant Line Value: WS
  misc_feature: MA Experiment 20000286 PARAMETER Experiment Name: At_Open_Flower_P Parameter: Tissue Value: Half Open vs. Whole Plant
  misc_feature: MA Experiment ID: 20001910 Result: Down-regulated in Transcription
  misc_feature: MA Experiment 20001910 PARAMETER Experiment Name: At_Drought_Reproduction_P Parameter: Age (day) Value: 37
  misc_feature: MA Experiment 20001910 PARAMETER Experiment Name: At_Drought_Reproduction_P Parameter: Organism Value: A. thaliana
  misc_feature: MA Experiment 20001910 PARAMETER Experiment Name: At_Drought_Reproduction_P Parameter: Plant Line Value: WS
  misc_feature: MA Experiment 20001910 PARAMETER Experiment Name: At_Drought_Reproduction_P Parameter: Timepoint (day) Value: 7
  misc_feature: MA Experiment 20001910 PARAMETER Experiment Name: At_Drought_Reproduction_P Parameter: Tissue Value: Flowers
  misc_feature: MA Experiment 20001910 PARAMETER Experiment Name: At_Drought_Reproduction_P Parameter: Treatment Value: Drought vs. No Drought
tttccagagattgatgataggtgtagaagaaccatgaaatcgatattaattggatttgttttctttcttttatcatcatttcgtagcttcttcgtgaccactacctattcccaagtgatccatcaccgacgtctacggccatggccaccgccagaatctgggtccggcccatcacctggcccatctccatcaccacataacaaaaccacaccggcagtgtttttctttggggattcgatcatagatacaggaaataataataatctaacaacagaaatgaaatgtaattttagtccttatggtaaggattttccactcggagttgcaactggtagattcagcaacggaaaggtcgtttccgattatatatctgaatatttgggagtaaaaccaattgtaccagcatattttgaccccaatgtacaactagaagatcttctcacgggtgtatcatttgcttcagagagtaaagtcaatgttggagcaattgacatatttccaacgacacatagcgagagtaaagaggttagtaggggaagagaagacggatcaactgttagccaagggcttatccgttgtggtcgcaggcagcaacgatttggctattacatattatggtcatggtgctcaattgctcaaagatgatatccactactttacttcaaagatggcaaattccgcggcaagttttgttatgcaattatacgaatatggagcaagacaaatagcagttctaggaacaccaccacttggctgcgtaccaatactaagaactctaaaaggaggtcttcgtagagagtgtgctcaagatataaactatgcttctcagcttttcaacgtcaaactctccaacattttggaccaattggcaaaaaacctaccaaattccaatctcatttacattgacatatactctgctttcagtcacatcttagaaaattcagcagattatgggtttgaagaaataaagagaggttgttgtggaactggatttgtggaagctggtccactttgcaatcgattcacaacatttgtgtgctccaatgtatctgcttacatgttttgggatagtctccatcctacccaaagattctataaaatcttaaccaaaatactttttgagaaatacatccacaatttaaattgagtagtgtgatcaaatgactcacattgtatgcttttatttttcttaaagcttgtgcagttgttataaattgtacaaaattattgtaagtcactatattgattaccaattgattttaagagaaacttttatcac

SEQ ID NO: 72621 - protein, 223 aa, Arabidopsis thaliana; identical to SEQ ID NO: 35549
  peptide (1)..(223): Ceres Seq. ID no. 4939693
  misc_feature (1)..(214): Pfam Name: GDSL-like Lipase/Acylhydrolase Pfam Description: GDSL-like Lipase/Acylhydrolase
  misc_feature (1)..(159): Homolog of NCBI NO: 25511649 NR Description: T20H2.9 protein - Arabidopsis thaliana
  misc_feature (1)..(159): Homolog of NCBI NO: 15223790 NR Description: anter-specific proline-rich protein APG
  misc_feature (1)..(221): Homolog of NCBI NO: 18394825 NR Description: anter-specific proline-rich protein APG putative; protein id: At1g20120.1, supported by cDNA: 22980.
  misc_feature (1)..(221): Homolog of NCBI NO: 21592372 NR Description: anter-specific proline-rich protein APG
  misc_feature (1)..(220): Homolog of NCBI NO: 728868 NR Description: ANTER-SPECIFIC PROLINE-RICH PROTEIN APG (PROTEIN
  misc_feature (1)..(223): Homolog of NCBI NO: 99694 NR Description: proline-rich protein APG - Arabidopsis thaliana
  misc_feature (1)..(223): Homolog of NCBI NO: 21431729 NR Description: Anter-specific proline-rich protein APG precursor
  misc_feature (1)..(219): Homolog of NCBI NO: 18266041 NR Description: anther-specific proline-rich protein [Brassica
  misc_feature (1)..(198): Homolog of NCBI NO: 15223790 NR Description: anter-specific proline-rich protein APG
  misc_feature (1)..(198): Homolog of NCBI NO: 25511649 NR Description: T20H2.9 protein - Arabidopsis thaliana

SEQ ID NO: 72622 - protein, 214 aa, Arabidopsis thaliana
  peptide (1)..(214): Ceres Seq. ID no. 4939694
  misc_feature (73)..(177): Pfam Name: GDSL-like Lipase/Acylhydrolase Pfam Description: GDSL-like Lipase/Acylhydrolase
  misc_feature (16)..(154): Homolog of NCBI NO: 25511649 NR Description: T20H2.9 protein - Arabidopsis thaliana
  misc_feature (72)..(154): Homolog of NCBI NO: 15223790 NR Description: anter-specific proline-rich protein APG
  misc_feature (46)..(154): Homolog of NCBI NO: 15223790 NR Description: anter-specific proline-rich protein APG
  misc_feature (46)..(154): Homolog of NCBI NO: 25511649 NR Description: T20H2.9 protein - Arabidopsis thaliana
  misc_feature (4)..(154): Homolog of NCBI NO: 18394825 NR Description: anter-specific proline-rich protein APG putative; protein id: At1g20120.1, supported by cDNA: 22980.
  misc_feature (4)..(154): Homolog of NCBI NO: 21592372 NR Description: anter-specific proline-rich protein APG
  misc_feature (47)..(177): Homolog of NCBI NO: 728868 NR Description: ANTER-SPECIFIC PROLINE-RICH PROTEIN APG (PROTEIN
  misc_feature (46)..(154): Homolog of NCBI NO: 99694 NR Description: proline-rich protein APG - Arabidopsis thaliana
  misc_feature (46)..(154): Homolog of NCBI NO: 21431729 NR Description: Anter-specific proline-rich protein APG precursor
  misc_feature (47)..(176): Homolog of NCBI NO: 18266041 NR Description: anther-specific proline-rich protein [Brassica
FPEIDDRCRRTMKSILIGFVFFLLSSFRSFFVTTTYSQVIHHRRLRPWPPPESGSGPSPGPSPSPHNKTTPAVFFFGDSIIDTGNNNNLTTEMKCNFSPYGKDFPLGVATGRFSNGKVVSDYISEYLGVKPIVPAYFDPNVQLEDLLTGVSFASESKVNVGAIDIFPTTHSESKEVSRGREDGSTVSQGLIRCGRRQQRFGYYILWSWCSIAQR

SEQ ID NO: 72623 - protein, 203 aa, Arabidopsis thaliana; identical to SEQ ID NO: 35551
  peptide (1)..(203): Ceres Seq. ID no. 4939695
  misc_feature (62)..(166): Pfam Name: GDSL-like Lipase/Acylhydrolase Pfam Description: GDSL-like Lipase/Acylhydrolase
  misc_feature (5)..(143): Homolog of NCBI NO: 25511649 NR Description: T20H2.9 protein - Arabidopsis thaliana
  misc_feature (61)..(143): Homolog of NCBI NO: 15223790 NR Description: anter-specific proline-rich protein APG
  misc_feature (35)..(143): Homolog of NCBI NO: 15223790 NR Description: anter-specific proline-rich protein APG
  misc_feature (35)..(143): Homolog of NCBI NO: 25511649 NR Description: T20H2.9 protein - Arabidopsis thaliana
  misc_feature (1)..(143): Homolog of NCBI NO: 18394825 NR Description: anter-specific proline-rich protein APG putative; protein id: At1g20120.1, supported by cDNA: 22980.
  misc_feature (1)..(143): Homolog of NCBI NO: 21592372 NR Description: anter-specific proline-rich protein APG
  misc_feature (36)..(166): Homolog of NCBI NO: 728868 NR Description: ANTER-SPECIFIC PROLINE-RICH PROTEIN APG (PROTEIN
  misc_feature (35)..(143): Homolog of NCBI NO: 99694 NR Description: proline-rich protein APG - Arabidopsis thaliana
  misc_feature (35)..(143): Homolog of NCBI NO: 21431729 NR Description: Anter-specific proline-rich protein APG precursor
  misc_feature (36)..(165): Homolog of NCBI NO: 18266041 NR Description: anther-specific proline-rich protein [Brassica

SEQ ID NO: 72624 - DNA, 1439 bp, Arabidopsis thaliana
  misc_feature (1)..(1439): Ceres Seq. ID no. 4939997
  misc_feature: MA Experiment ID: 108435 Result: Down-regulated in Transcription
  misc_feature: MA Experiment 108435 PARAMETER Experiment Name: At_stm_Mutants_cDNA_P Parameter: Plant Line Value: wt Landsburg vs stm
  misc_feature: MA Experiment 108435 PARAMETER Experiment Name: At_stm_Mutants_cDNA_P Parameter: Tissue Value: Shoot Apical Meristem Region
  misc_feature: MA Experiment ID: 108461 Result: Up-regulated in Transcription
  misc_feature: MA Experiment 108461 PARAMETER Experiment Name: At_Germinating_Seeds_cDNA_P Parameter: Age (day) Value: 1 vs. 0
  misc_feature: MA Experiment 108461 PARAMETER Experiment Name: At_Germinating_Seeds_cDNA_P Parameter: Tissue Value: Germinating Seeds
  misc_feature: MA Experiment ID: 108462 Result: Up-regulated in Transcription
  misc_feature: MA Experiment 108462 PARAMETER Experiment Name: At_Germinating_Seeds_cDNA_P Parameter: Age (day) Value: 2 vs. 0
  misc_feature: MA Experiment 108462 PARAMETER Experiment Name: At_Germinating_Seeds_cDNA_P Parameter: Tissue Value: Germinating Seeds
  misc_feature: MA Experiment ID: 108463 Result: Up-regulated in Transcription
  misc_feature: MA Experiment 108463 PARAMETER Experiment Name: At_Germinating_Seeds_cDNA_P Parameter: Age (day) Value: 3 vs. 0
  misc_feature: MA Experiment 108463 PARAMETER Experiment Name: At_Germinating_Seeds_cDNA_P Parameter: Tissue Value: Germinating Seeds
  misc_feature: MA Experiment ID: 108464 Result: Up-regulated in Transcription
  misc_feature: MA Experiment 108464 PARAMETER Experiment Name: At_Germinating_Seeds_cDNA_P Parameter: Age (day) Value: 4 vs. 0
  misc_feature: MA Experiment 108464 PARAMETER Experiment Name: At_Germinating_Seeds_cDNA_P Parameter: Tissue Value: Germinating Seeds
  misc_feature: MA Experiment ID: 108577 Result: Down-regulated in Transcription
  misc_feature: MA Experiment 108577 PARAMETER Experiment Name: At_42deg_Heat_cDNA_P Parameter: Temperature (deg C) Value: 42 vs. 22
  misc_feature: MA Experiment 108577 PARAMETER Experiment Name: At_42deg_Heat_cDNA_P Parameter: Timepoint (hr) Value: 6
  misc_feature: MA Experiment 108577 PARAMETER Experiment Name: At_42deg_Heat_cDNA_P Parameter: Tissue Value: Aerial
  misc_feature: MA Experiment ID: 108585 Result: Down-regulated in Transcription
  misc_feature: MA Experiment 108585 PARAMETER Experiment Name: At_5mM_NaNP_cDNA_P Parameter: Timepoint (hr) Value: 6
  misc_feature: MA Experiment 108585 PARAMETER Experiment Name: At_5mM_NaNP_cDNA_P Parameter: Tissue Value: Aerial
  misc_feature: MA Experiment 108585 PARAMETER Experiment Name: At_5mM_NaNP_cDNA_P Parameter: Treatment Value: null
  misc_feature: MA Experiment ID: 108594 Result: Down-regulated in Transcription
  misc_feature: MA Experiment 108594 PARAMETER Experiment Name: At_Ler-rhl_Root_cDNA_P Parameter: Plant Line Value: null
  misc_feature: MA Experiment ID: 108595 Result: Down-regulated in Transcription
  misc_feature: MA Experiment 108595 PARAMETER Experiment Name: At_Ler-pi_Ovule_cDNA_P Parameter: Plant Line Value: null
  misc_feature: MA Experiment ID: 20000070 Result: Down-regulated in Transcription
  misc_feature: MA Experiment 20000070 PARAMETER Experiment Name: At_100uM_ABA_Mutants_cDNA_P Parameter: Plant Line Value: CS24
  misc_feature: MA Experiment 20000070 PARAMETER Experiment Name: At_100uM_ABA_Mutants_cDNA_P Parameter: Timepoint (hr) Value: 6
  misc_feature: MA Experiment 20000070 PARAMETER Experiment Name: At_100uM_ABA_Mutants_cDNA_P Parameter: Tissue Value: Aerial
  misc_feature: MA Experiment 20000070 PARAMETER Experiment Name: At_100uM_ABA_Mutants_cDNA_P Parameter: Treatment Value: 100uM ABA vs. No Treatment
  misc_feature: MA Experiment ID: 20000071 Result: Down-regulated in Transcription
  misc_feature: MA Experiment 20000071 PARAMETER Experiment Name: At_100uM_ABA_Mutants_cDNA_P Parameter: Plant Line Value: CS8104
  misc_feature: MA Experiment 20000071 PARAMETER Experiment Name: At_100uM_ABA_Mutants_cDNA_P Parameter: Timepoint (hr) Value: 6
  misc_feature: MA Experiment 20000071 PARAMETER Experiment Name: At_100uM_ABA_Mutants_cDNA_P Parameter: Tissue Value: Aerial
  misc_feature: MA Experiment 20000071 PARAMETER Experiment Name: At_100uM_ABA_Mutants_cDNA_P Parameter: Treatment Value: 100uM ABA vs. No Treatment
  misc_feature: MA Experiment ID: 20000111 Result: Down-regulated in Transcription
  misc_feature: MA Experiment 20000111 PARAMETER Experiment Name: At_42deg_Heat_cDNA_P Parameter: Temperature (deg C) Value: 42 vs. 22
  misc_feature: MA Experiment 20000111 PARAMETER Experiment Name: At_42deg_Heat_cDNA_P Parameter: Timepoint (hr) Value: 6
  misc_feature: MA Experiment 20000111 PARAMETER Experiment Name: At_42deg_Heat_cDNA_P Parameter: Tissue Value: Aerial
  misc_feature: MA Experiment ID: 20000112 Result: Down-regulated in Transcription
  misc_feature: MA Experiment 20000112 PARAMETER Experiment Name: At_42deg_Heat_cDNA_P Parameter: Temperature (deg C) Value: 42 vs. 22
  misc_feature: MA Experiment 20000112 PARAMETER Experiment Name: At_42deg_Heat_cDNA_P Parameter: Timepoint (hr) Value: 2
  misc_feature: MA Experiment 20000112 PARAMETER Experiment Name: At_42deg_Heat_cDNA_P Parameter: Tissue Value: Aerial
  misc_feature: MA Experiment ID: 20000113 Result: Down-regulated in Transcription
  misc_feature: MA Experiment 20000113 PARAMETER Experiment Name: At_42deg_Heat_cDNA_P Parameter: Temperature (deg C) Value: 42 vs. 22
  misc_feature: MA Experiment 20000113 PARAMETER Experiment Name: At_42deg_Heat_cDNA_P Parameter: Timepoint (hr) Value: 8
  misc_feature: MA Experiment 20000113 PARAMETER Experiment Name: At_42deg_Heat_cDNA_P Parameter: Tissue Value: Aerial
  misc_feature: MA Experiment ID: 20000117 Result: Down-regulated in Transcription
  misc_feature: MA Experiment 20000117 PARAMETER Experiment Name: At_100uM_ABA_Mutants_cDNA_P Parameter: Plant Line Value: Columbia
  misc_feature: MA Experiment 20000117 PARAMETER Experiment Name: At_100uM_ABA_Mutants_cDNA_P Parameter: Timepoint (hr) Value: 6
  misc_feature: MA Experiment 20000117 PARAMETER Experiment Name: At_100uM_ABA_Mutants_cDNA_P Parameter: Tissue Value: Aerial
  misc_feature: MA Experiment 20000117 PARAMETER Experiment Name: At_100uM_ABA_Mutants_cDNA_P Parameter: Treatment Value: 100uM ABA vs. No Treatment
  misc_feature: MA Experiment ID: 20000173 Result: Down-regulated in Transcription
  misc_feature: MA Experiment 20000173 PARAMETER Experiment Name: At_42deg_Heat_P Parameter: Age (day) Value: 14
  misc_feature: MA Experiment 20000173 PARAMETER Experiment Name: At_42deg_Heat_P Parameter: Organism Value: A. thaliana
  misc_feature: MA Experiment 20000173 PARAMETER Experiment Name: At_42deg_Heat_P Parameter: Plant Line Value: WS
  misc_feature: MA Experiment 20000173 PARAMETER Experiment Name: At_42deg_Heat_P Parameter: Temperature (deg C) Value: 42 vs. 22
  misc_feature: MA Experiment 20000173 PARAMETER Experiment Name: At_42deg_Heat_P Parameter: Timepoint (hr) Value: 6
  misc_feature: MA Experiment 20000173 PARAMETER Experiment Name: At_42deg_Heat_P Parameter: Tissue Value: Aerial
  misc_feature: MA Experiment ID: 20000179 Result: Up-regulated in Transcription
  misc_feature: MA Experiment 20000179 PARAMETER Experiment Name: At_Germinating_Seeds_P Parameter: Age (hr) Value: 6 vs. 0
  misc_feature: MA Experiment 20000179 PARAMETER Experiment Name: At_Germinating_Seeds_P Parameter: Tissue Value: Germinating Seeds
  misc_feature: MA Experiment ID: 20000180 Result: Up-regulated in Transcription
  misc_feature: MA Experiment 20000180 PARAMETER Experiment Name: At_Germinating_Seeds_P Parameter: Age (hr) Value: 24 vs. 0
  misc_feature: MA Experiment 20000180 PARAMETER Experiment Name: At_Germinating_Seeds_P Parameter: Tissue Value: Germinating Seeds
  misc_feature: MA Experiment ID: 20000182 Result: Down-regulated in Transcription
  misc_feature: MA Experiment 20000182 PARAMETER Experiment Name: At_2mM_SA_P Parameter: Age (day) Value: 14
  misc_feature: MA Experiment 20000182 PARAMETER Experiment Name: At_2mM_SA_P Parameter: Organism Value: A. thaliana
  misc_feature: MA Experiment 20000182 PARAMETER Experiment Name: At_2mM_SA_P Parameter: Plant Line Value: WS
  misc_feature: MA Experiment 20000182 PARAMETER Experiment Name: At_2mM_SA_P Parameter: Timepoint (hr) Value: 6
  misc_feature: MA Experiment 20000182 PARAMETER Experiment Name: At_2mM_SA_P Parameter: Tissue Value: Aerial
  misc_feature: MA Experiment 20000182 PARAMETER Experiment Name: At_2mM_SA_P Parameter: Treatment Value: 2mM SA vs. No Treatment
  misc_feature: MA Experiment ID: 20000224 Result: Down-regulated in Transcription
  misc_feature: MA Experiment ID: 20000227 Result: Down-regulated in Transcription
  misc_feature: MA Experiment 20000227 PARAMETER Experiment Name: At_Root-Tips-vs-Tops_P Parameter: Tissue Value: Root Tips vs. Root Tops
  misc_feature: MA Experiment ID: 20000265 Result: Up-regulated in Transcription
  misc_feature: MA Experiment 20000265 PARAMETER Experiment Name: At_Open_Flower_P Parameter: Age (day) Value: 21
  misc_feature: MA Experiment 20000265 PARAMETER Experiment Name: At_Open_Flower_P Parameter: Plant Line Value: WS
  misc_feature: MA Experiment 20000265 PARAMETER Experiment Name: At_Open_Flower_P Parameter: Tissue Value: Closed Flower vs. Whole Plant
  misc_feature: MA Experiment ID: 20000438 Result: Up-regulated in Transcription
  misc_feature: MA Experiment 20000438 PARAMETER Experiment Name: At_Shoots__P Parameter: Age (day) Value: 14
  misc_feature: MA Experiment 20000438 PARAMETER Experiment Name: At_Shoots__P Parameter: Tissue Value: Shoots vs. Whole Plant
  misc_feature: MA Experiment ID: 20000794 Result: Down-regulated in Transcription
  misc_feature: MA Experiment 20000794 PARAMETER Experiment Name: At_Petals_P Parameter: Age (day) Value: 23-25 days
  misc_feature: MA Experiment 20000794 PARAMETER Experiment Name: At_Petals_P Parameter: Plant Line Value: WS
  misc_feature: MA Experiment 20000794 PARAMETER Experiment Name: At_Petals_P Parameter: Tissue Value: Petals vs. Whole plant
  misc_feature: MA Experiment ID: 20001905 Result: Down-regulated in Transcription
  misc_feature: MA Experiment 20001905 PARAMETER Experiment Name: At_Drought_Reproduction_P Parameter: Age (day) Value: 40
  misc_feature: MA Experiment 20001905 PARAMETER Experiment Name: At_Drought_Reproduction_P Parameter: Organism Value: A. thaliana
  misc_feature: MA Experiment 20001905 PARAMETER Experiment Name: At_Drought_Reproduction_P Parameter: Plant Line Value: WS
  misc_feature: MA Experiment 20001905 PARAMETER Experiment Name: At_Drought_Reproduction_P Parameter: Timepoint (day) Value: 10
  misc_feature: MA Experiment 20001905 PARAMETER Experiment Name: At_Drought_Reproduction_P Parameter: Tissue Value: Rosettes
  misc_feature: MA Experiment 20001905 PARAMETER Experiment Name: At_Drought_Reproduction_P Parameter: Treatment Value: Drought vs. No Drought
  misc_feature: Pfam Name: ADH_zinc_N Pfam Description: Zinc-binding dehydrogenase
aaaagataagatacgaagaacaagagccccctctctctctctcgtccactcacctattgtgtatctcatcatcaccatggacaagacatttttctctagcaacgaagggaaaccaattacatgcaaagcagcaatatgtagaaaagcaggagaagcattggtgattgaagacatccacgtggatccaccccaagcttatgaagttaggattaagattttatgtacttctctatgtcacactgatcttactttctggaaactaagctttggaccaatttcaaggtttcctaggattcttggacacgaagcagtcggcataataacatgtatttgctgtttttattgggattttaaaccagtgtggtcgagagcattggtgaaaacgtggacggatttaaacaagatatgccgaagatttcatatcaaacacaagacgatatggaatggcttcaagattcaaagattcttcaggagaagtgattcatcattttctctttgtctcaagtttttccgaatacaccgtcgtggatattgcacatcttgtcaaaatatctcctgaaatccccgttgataaagcggctttgctcagctgcggtgtctccacaggaattggagcagcttggaaggtggctaacgtggaagaaggctccaccattgcaatttttggccttggtgctgttggacttgcggttgcagaaggagccaggctacgaggagccgcaaagattattggtattgataccaattctgataaattcgagctaggtaagaaatttggttttacggatttcatcaatccgaccttatgcggagaaaagaagattagtgaggtcattaaagaaatgacagaaggaggagttgactatagtttcgaatgcgttggcttagcttctttacttaacgaggctttcatcagtacccgcacgggaacaggtaaaactgtaatgttggggatggagaagcatgcagcgccaattagtttgggtagttttgatcttttaagaggcagagttatttgcggaagcttgttcggtggtctgaaatccaaacttgatattcccattctagtggatcattacctaaaaaaggagctcaatctggatagtttcattacacacgaactgaatttcaaagaaattaataaggctttcgctttattagaggaaggaaagtctctccgctgcattctatggatggataagtaactatccagcttcatatttgcactttataatcttctcgtggatcttgtttagattatcttcctttgtctttcaagatgctttgtcttgttaccttgcaatttttgttctttccacacgagctacaaacttatcatttggtagtccaaaccccttaacattgtgttttctgatggttacaaatattatgacaccttgtatttgttgatcaatgatcattatagtactaattgcttc

SEQ ID NO: 72625 - protein, 253 aa, Arabidopsis thaliana; identical to SEQ ID NO: 25702
  peptide (1)..(253): Ceres Seq. ID no. 4939998
  misc_feature: Pfam Name: ADH_zinc_N Pfam Description: Zinc-binding dehydrogenase
  misc_feature (1)..(253): Homolog of NCBI NO: 15219882 NR Description: alcohol dehydrogenase ADH, putative; protein id:
  misc_feature (1)..(253): Homolog of NCBI NO: 18415840 NR Description: alcohol dehydrogenase like protein; protein id:
  misc_feature (1)..(253): Homolog of NCBI NO: 21618210 NR Description: alcohol dehydrogenase like protein [Arabidopsis
  misc_feature (1)..(253): Homolog of NCBI NO: 15219884 NR Description: alcohol dehydrogenase ADH, putative; protein id:
  misc_feature (1)..(253): Homolog of NCBI NO: 11250327 NR Description: probable alcohol dehydrogenase (EC 1.1.1.1)
  misc_feature (3)..(253): Homolog of NCBI NO: 7705214 NR Description: alcohol dehydrogenase ADH [Lycopersicon
  misc_feature (3)..(253): Homolog of NCBI NO: 1076579 NR Description: probable alcohol dehydrogenase (EC 1.1.1.1) ADH3a
  misc_feature (1)..(251): Homolog of NCBI NO: 15238330 NR Description: alcohol dehydrogenase; protein id: At5g42250.1, by cDNA: gi_19698970 [Arabidopsis thaliana] alcohol dehydrogenase [Arabidopsis thaliana]
  misc_feature (3)..(253): Homolog of NCBI NO: 7705215 NR Description: alcohol dehydrogenase ADH [Lycopersicon
  misc_feature (3)..(253): Homolog of NCBI NO: 1076580 NR Description: probable alcohol dehydrogenase (EC 1.1.1.1) ADH3b

SEQ ID NO: 72626 - protein, 185 aa, Arabidopsis thaliana
  peptide (1)..(185): Ceres Seq. ID no. 4939999
  misc_feature: Pfam Name: ADH_zinc_N Pfam Description: Zinc-binding dehydrogenase
  misc_feature (26)..(110): Homolog of NCBI NO: 15219882 NR Description: alcohol dehydrogenase ADH, putative; protein id:
  misc_feature (26)..(110): Homolog of NCBI NO: 18415840 NR Description: alcohol dehydrogenase like protein; protein id:
  misc_feature (31)..(110): Homolog of NCBI NO: 21618210 NR Description: alcohol dehydrogenase like protein [Arabidopsis
  misc_feature (26)..(110): Homolog of NCBI NO: 15219884 NR Description: alcohol dehydrogenase ADH, putative; protein id:
  misc_feature (26)..(110): Homolog of NCBI NO: 11250327 NR Description: probable alcohol dehydrogenase (EC 1.1.1.1)
  misc_feature (28)..(110): Homolog of NCBI NO: 7705214 NR Description: alcohol dehydrogenase ADH [Lycopersicon
  misc_feature (28)..(110): Homolog of NCBI NO: 1076579 NR Description: probable alcohol dehydrogenase (EC 1.1.1.1) ADH3a
  misc_feature (37)..(110): Homolog of NCBI NO: 15238330 NR Description: alcohol dehydrogenase; protein id: At5g42250.1, by cDNA: gi_19698970 [Arabidopsis thaliana] alcohol dehydrogenase [Arabidopsis thaliana]
  misc_feature (32)..(110): Homolog of NCBI NO: 7705215 NR Description: alcohol dehydrogenase ADH [Lycopersicon
  misc_feature (32)..(110): Homolog of NCBI NO: 1076580 NR Description: probable alcohol dehydrogenase (EC 1.1.1.1) ADH3b
KDKIRRTRAPSLSLVHSPIVYLIITMDKTFFSSNEGKPITCKAAICRKAGEALVIEDIHVDPPQAYEVRIKILCTSLCHTDLTFWKLSFGPISRFPRILGHEAVGIITCICCFYWDFKPVWSRALVKTWTDLNKICRRFHIKHKTIWNGFKIQRFFRRSDSSFSLCLKFFRIHRRGYCTSCQNIS

SEQ ID NO: 72627 - protein, 160 aa, Arabidopsis thaliana
  peptide (1)..(160): Ceres Seq. ID no. 4940000
  misc_feature: Pfam Name: ADH_zinc_N Pfam Description: Zinc-binding dehydrogenase
  misc_feature (1)..(85): Homolog of NCBI NO: 15219882 NR Description: alcohol dehydrogenase ADH, putative; protein id:
  misc_feature (1)..(85): Homolog of NCBI NO: 18415840 NR Description: alcohol dehydrogenase like protein; protein id:
  misc_feature (6)..(85): Homolog of NCBI NO: 21618210 NR Description: alcohol dehydrogenase like protein [Arabidopsis
  misc_feature (1)..(85): Homolog of NCBI NO: 15219884 NR Description: alcohol dehydrogenase ADH, putative; protein id:
  misc_feature (1)..(85): Homolog of NCBI NO: 11250327 NR Description: probable alcohol dehydrogenase (EC 1.1.1.1)
  misc_feature (3)..(85): Homolog of NCBI NO: 7705214 NR Description: alcohol dehydrogenase ADH [Lycopersicon
  misc_feature (3)..(85): Homolog of NCBI NO: 1076579 NR Description: probable alcohol dehydrogenase (EC 1.1.1.1) ADH3a
  misc_feature (12)..(85): Homolog of NCBI NO: 15238330 NR Description: alcohol dehydrogenase; protein id: At5g42250.1, by cDNA: gi_19698970 [Arabidopsis thaliana] alcohol dehydrogenase [Arabidopsis thaliana]
  misc_feature (7)..(85): Homolog of NCBI NO: 7705215 NR Description: alcohol dehydrogenase ADH [Lycopersicon
  misc_feature (7)..(85): Homolog of NCBI NO: 1076580 NR Description: probable alcohol dehydrogenase (EC 1.1.1.1) ADH3b
MDKTFFSSNEGKPITCKAAICRKAGEALVIEDIHVDPPQAYEVRIKILCTSLCHTDLTFWKLSFGPISRFPRILGHEAVGIITCICCFYWDFKPVWSRALVKTWTDLNKICRRFHIKHKTIWNGFKIQRFFRRSDSSFSLCLKFFRIHRRGYCTSCQNIS

SEQ ID NO: 72628 - DNA, 1713 bp, Arabidopsis thaliana
  misc_feature (1)..(1713): Ceres Seq. ID no. 4940024
  misc_feature: MA Experiment ID: 20000185 Result: Up-regulated in Transcription
  misc_feature: MA Experiment 20000185 PARAMETER Experiment Name: At_Roots__P Parameter: Age (day) Value: 7 vs. 21
  misc_feature: MA Experiment 20000185 PARAMETER Experiment Name: At_Roots__P Parameter: Organism Value: A. thaliana
  misc_feature: MA Experiment 20000185 PARAMETER Experiment Name: At_Roots__P Parameter: Tissue Value: Roots vs. Whole Plant
  misc_feature: MA Experiment ID: 20000439 Result: Up-regulated in Transcription
  misc_feature: MA Experiment 20000439 PARAMETER Experiment Name: At_Roots__P Parameter: Age (day) Value: 14 vs. 21
  misc_feature: MA Experiment 20000439 PARAMETER Experiment Name: At_Roots__P Parameter: Organism Value: A. thaliana
  misc_feature: MA Experiment 20000439 PARAMETER Experiment Name: At_Roots__P Parameter: Tissue Value: Roots vs. Whole Plant
  misc_feature: MA Experiment ID: 20001451 Result: Down-regulated in Transcription
  misc_feature: MA Experiment 20001451 PARAMETER Experiment Name: At_Far-red-induction_P Parameter: Age (day) Value: 7
  misc_feature: MA Experiment 20001451 PARAMETER Experiment Name: At_Far-red-induction_P Parameter: Light Value: Far-red vs. White
  misc_feature: MA Experiment 20001451 PARAMETER Experiment Name: At_Far-red-induction_P Parameter: Organism Value: A. thaliana
  misc_feature: MA Experiment 20001451 PARAMETER Experiment Name: At_Far-red-induction_P Parameter: Plant Line Value: Columbia
  misc_feature: MA Experiment 20001451 PARAMETER Experiment Name: At_Far-red-induction_P Parameter: Timepoint (hr) Value: 24
  misc_feature: MA Experiment 20001451 PARAMETER Experiment Name: At_Far-red-induction_P Parameter: Tissue Value: Whole Plant
  misc_feature: MA Experiment ID: 20001557 Result: Down-regulated in Transcription
  misc_feature: MA Experiment 20001557 PARAMETER Experiment Name: At_Drought_Soil_Dry_P Parameter: Age (day) Value: 27
  misc_feature: MA Experiment 20001557 PARAMETER Experiment Name: At_Drought_Soil_Dry_P Parameter: Organism Value: A. thaliana
  misc_feature: MA Experiment 20001557 PARAMETER Experiment Name: At_Drought_Soil_Dry_P Parameter: Plant Line Value: WS
  misc_feature: MA Experiment 20001557 PARAMETER Experiment Name: At_Drought_Soil_Dry_P Parameter: Post Timepoint (hr) Value: 3
  misc_feature: MA Experiment 20001557 PARAMETER Experiment Name: At_Drought_Soil_Dry_P Parameter: Post-Treatment Value: Re-Water vs. No Drought
  misc_feature: MA Experiment 20001557 PARAMETER Experiment Name: At_Drought_Soil_Dry_P Parameter: Timepoint (day) Value: 13
  misc_feature: MA Experiment 20001557 PARAMETER Experiment Name: At_Drought_Soil_Dry_P Parameter: Treatment Value: Drought vs. No Drought
  misc_feature: MA Experiment ID: 20001558 Result: Down-regulated in Transcription
  misc_feature: MA Experiment 20001558 PARAMETER Experiment Name: At_Drought_Soil_Dry_P Parameter: Age (day) Value: 27
  misc_feature: MA Experiment 20001558 PARAMETER Experiment Name: At_Drought_Soil_Dry_P Parameter: Organism Value: A. thaliana
  misc_feature: MA Experiment 20001558 PARAMETER Experiment Name: At_Drought_Soil_Dry_P Parameter: Plant Line Value: WS
  misc_feature: MA Experiment 20001558 PARAMETER Experiment Name: At_Drought_Soil_Dry_P Parameter: Post Timepoint (hr) Value: 6
  misc_feature: MA Experiment 20001558 PARAMETER Experiment Name: At_Drought_Soil_Dry_P Parameter: Post-Treatment Value: Re-Water vs. No Drought
  misc_feature: MA Experiment 20001558 PARAMETER Experiment Name: At_Drought_Soil_Dry_P Parameter: Timepoint (day) Value: 13
  misc_feature: MA Experiment 20001558 PARAMETER Experiment Name: At_Drought_Soil_Dry_P Parameter: Treatment Value: Drought vs. No Drought
atgtcgatctccggcgctgttgatgaagctgggactccacttctcgctgtcaccgtcgactacaggaacaaacccgccgtcaaatcttcctccggtggctggagatccgccggattcatcatcggtgtggaggttgctgagcgatttgcttactatgggatatcgtcgaatctgataacgtatttgaccggaccactgggacaatcgacggcggctgcggcggctaacgtgaacgcttggtctggaacggcgtcgttgcttcctctccttggtgcttttgtcgctgactcgtttctaggtcgtttccggacaatcctcgccgcctctgctctctatatagtgatgagtctgaagttgtatagtgatttgattgaacaacaggggctgggtgtattgactttatctgcaatgattccttcagactgcaaagtttcgaatctactctcgtcatgctctcctcgatttcaagtaattacattctttagtgcattgtatctagtggctttagctcaaggtggtcacaagccgtgtgttcaggcttttggagcggatcagtttgatgaaaaggaacctgaagagtgcaaagcaaagagttctttctttaattggtggtattttggtatgtgctttgggacgttaacaactctatgggtgttgaattatatccaagataatctaagttgggcgttaggctttggtattccatgcattgctatggtagttgctttggttgttctcttgcttggaacctgcacttatcggttcagtattcgaagagaagatcaaagtccttttgtgaggattggaaatgtttatgtagcggctgtaaagaactggagtgtttcagctttagatgtagctgctgcagaggagagacttggtcttgtgtcttgcagtagctctcagcaatttagttttctcaacaaagctctggtcgcaaagaatggttcttgtagtatagatgaacttgaagaagcaaaatcagtgcttaggttagctccgatatggttaacatgcttggtttatgcggttgtgtttgcgcagtctccaactttcttcaccaaacaaggagctacaatggagagatcaatcacacctggttacaagatctctccggctaccctccagtccttcatcagcctctctatagtcatcttcatcccaatctacgaccgtgtactaatcccaattgcaagatcatttacacataaaccaggcggaatcacaatgcttcagagaatcggcacaggcatattcctctctttccttgctatggttgtagccgctctagtggagatgaaaaggcttaaaactgctgcggattacgggctcgtagattcacctgacgctacggttccaatgagtgtgtggtggttagttcctcagtatgttctctttggtatcacggatgttttcgcaatggtgggtcttcaagagttcttctatgaccaagtcccgaatgagctgaggagtgtggggttggctctgtacttgagcatattcggtattggtaactttctcagcagtttcatgatatcaatcattgagaaagcgacaagccaatctggtcaagcgagttggttcgcaaacaacctgaaccaagctcatctcgattacttttactggttactcgcttgtctcagcttcattggcttagcctcctacttgtatgttgcaaagtcttacgtctctaaaaggctcgacaccagttaa

SEQ ID NO: 72629 - protein, 570 aa, Arabidopsis thaliana
  peptide (1)..(570): Ceres Seq. ID no. 4940025
  misc_feature (102)..(501): Pfam Name: POT family Pfam Description: POT family
  misc_feature (1)..(570): Homolog of NCBI NO: 25402970 NR Description: Similar to peptide transporter [imported] - thaliana >gi|6587835|gb|AAF18524.1|AC006551_10 Similar to peptide
  misc_feature (1)..(570): Homolog of NCBI NO: 30687920 NR Description: oligopeptide transporter -related [Arabidopsis
  misc_feature (128)..(569): Homolog of NCBI NO: 22330582 NR Description: oligopeptide transporter, putative; protein id: supported by cDNA: gi_19699295 [Arabidopsis thaliana] At1g72130/F28P5.1 [Arabidopsis thaliana]
  misc_feature (28)..(148): Homolog of NCBI NO: 22330582 NR Description: oligopeptide transporter, putative; protein id: supported by cDNA: gi_19699295 [Arabidopsis thaliana] At1g72130/F28P5.1 [Arabidopsis thaliana]
  misc_feature (128)..(569): Homolog of NCBI NO: 25406147 NR Description: probable peptide transporter PTR2-B T9N14.15 - Arabidopsis thaliana >gi|12323655|gb|AAG51788.1|AC067754_4
  misc_feature (28)..(148): Homolog of NCBI NO: 25406147 NR Description: probable peptide transporter PTR2-B T9N14.15 - Arabidopsis thaliana >gi|12323655|gb|AAG51788.1|AC067754_4
  misc_feature (113)..(551): Homolog of NCBI NO: 12322195 NR Description: oligopeptide transporter, putative [Arabidopsis
  misc_feature (28)..(148): Homolog of NCBI NO: 12322195 NR Description: oligopeptide transporter, putative [Arabidopsis
  misc_feature (128)..(569): Homolog of NCBI NO: 26450432 NR Description: putative peptide transporter PTR2-B [Arabidopsis
  misc_feature (45)..(148): Homolog of NCBI NO: 26450432 NR Description: putative peptide transporter PTR2-B [Arabidopsis
MSISGAVDEAGTPLLAVTVDYRNKPAVKSSSGGWRSAGFIIGVEVAERFAYYGISSNLITYLTGPLGQSTAAAAANVNAWSGTASLLPLLGAFVADSFLGRFRTILAASALYIVMSLKLYSDLIEQQGLGVLTLSAMIPSDCKVSNLLSSCSPRFQVITFFSALYLVALAQGGHKPCVQAFGADQFDEKEPEECKAKSSFFNWWYFGMCFGTLTTLWVLNYIQDNLSWALGFGIPCIAMVVALVVLLLGTCTYRFSIRREDQSPFVRIGNVYVAAVKNWSVSALDVAAAEERLGLVSCSSSQQFSFLNKALVAKNGSCSIDELEEAKSVLRLAPIWLTCLVYAVVFAQSPTFFTKQGATMERSITPGYKISPATLQSFISLSIVIFIPIYDRVLIPIARSFTHKPGGITMLQRIGTGIFLSFLAMVVAALVEMKRLKTAADYGLVDSPDATVPMSVWWLVPQYVLFGITDVFAMVGLQEFFYDQVPNELRSVGLALYLSIFGIGNFLSSFMISIIEKATSQSGQASWFANNLNQAHLDYFYWLLACLSFIGLASYLYVAKSYVSKRLDTS

SEQ ID NO: 72630 - protein, 456 aa, Arabidopsis thaliana
  peptide (1)..(456): Ceres Seq. ID no. 4940026
  misc_feature (1)..(387): Pfam Name: POT family Pfam Description: POT family
  misc_feature (1)..(456): Homolog of NCBI NO: 25402970 NR Description: Similar to peptide transporter [imported] - thaliana >gi|6587835|gb|AAF18524.1|AC006551_10 Similar to peptide
  misc_feature (1)..(456): Homolog of NCBI NO: 30687920 NR Description: oligopeptide transporter -related [Arabidopsis
  misc_feature (14)..(455): Homolog of NCBI NO: 22330582 NR Description: oligopeptide transporter, putative; protein id: supported by cDNA: gi_19699295 [Arabidopsis thaliana] At1g72130/F28P5.1 [Arabidopsis thaliana]
  misc_feature (1)..(34): Homolog of NCBI NO: 22330582 NR Description: oligopeptide transporter, putative; protein id: supported by cDNA: gi_19699295 [Arabidopsis thaliana] At1g72130/F28P5.1 [Arabidopsis thaliana]
  misc_feature (14)..(455): Homolog of NCBI NO: 25406147 NR Description: probable peptide transporter PTR2-B T9N14.15 - Arabidopsis thaliana >gi|12323655|gb|AAG51788.1|AC067754_4
  misc_feature (1)..(34): Homolog of NCBI NO: 25406147 NR Description: probable peptide transporter PTR2-B T9N14.15 - Arabidopsis thaliana >gi|12323655|gb|AAG51788.1|AC067754_4
  misc_feature (1)..(437): Homolog of NCBI NO: 12322195 NR Description: oligopeptide transporter, putative [Arabidopsis
  misc_feature (1)..(34): Homolog of NCBI NO: 12322195 NR Description: oligopeptide transporter, putative [Arabidopsis
  misc_feature (14)..(455): Homolog of NCBI NO: 26450432 NR Description: putative peptide transporter PTR2-B [Arabidopsis
  misc_feature (1)..(34): Homolog of NCBI NO: 26450432 NR Description: putative peptide transporter PTR2-B [Arabidopsis
MSLKLYSDLIEQQGLGVLTLSAMIPSDCKVSNLLSSCSPRFQVITFFSALYLVALAQGGHKPCVQAFGADQFDEKEPEECKAKSSFFNWWYFGMCFGTLTTLWVLNYIQDNLSWALGFGIPCIAMVVALVVLLLGTCTYRFSIRREDQSPFVRIGNVYVAAVKNWSVSALDVAAAEERLGLVSCSSSQQFSFLNKALVAKNGSCSIDELEEAKSVLRLAPIWLTCLVYAVVFAQSPTFFTKQGATMERSITPGYKISPATLQSFISLSIVIFIPIYDRVLIPIARSFTHKPGGITMLQRIGTGIFLSFLAMVVAALVEMKRLKTAADYGLVDSPDATVPMSVWWLVPQYVLFGITDVFAMVGLQEFFYDQVPNELRSVGLALYLSIFGIGNFLSSFMISIIEKATSQSGQASWFANNLNQAHLDYFYWLLACLSFIGLASYLYVAKSYVSKRLDTS

SEQ ID NO: 72631 - protein, 434 aa, Arabidopsis thaliana; identical to SEQ ID NO: 70218
  peptide (1)..(434): Ceres Seq. ID no. 4940027
  misc_feature (1)..(365): Pfam Name: POT family Pfam Description: POT family
  misc_feature (1)..(434): Homolog of NCBI NO: 25402970 NR Description: Similar to peptide transporter [imported] - thaliana >gi|6587835|gb|AAF18524.1|AC006551_10 Similar to peptide
  misc_feature (1)..(434): Homolog of NCBI NO: 30687920 NR Description: oligopeptide transporter -related [Arabidopsis
  misc_feature (1)..(433): Homolog of NCBI NO: 22330582 NR Description: oligopeptide transporter, putative; protein id: supported by cDNA: gi_19699295 [Arabidopsis thaliana] At1g72130/F28P5.1 [Arabidopsis thaliana]
  misc_feature (1)..(12): Homolog of NCBI NO: 22330582 NR Description: oligopeptide transporter, putative; protein id: supported by cDNA: gi_19699295 [Arabidopsis thaliana] At1g72130/F28P5.1 [Arabidopsis thaliana]
  misc_feature (1)..(433): Homolog of NCBI NO: 25406147 NR Description: probable peptide transporter PTR2-B T9N14.15 - Arabidopsis thaliana >gi|12323655|gb|AAG51788.1|AC067754_4
  misc_feature (1)..(12): Homolog of NCBI NO: 25406147 NR Description: probable peptide transporter PTR2-B T9N14.15 - Arabidopsis thaliana >gi|12323655|gb|AAG51788.1|AC067754_4
  misc_feature (1)..(415): Homolog of NCBI NO: 12322195 NR Description: oligopeptide transporter, putative [Arabidopsis
  misc_feature (1)..(12): Homolog of NCBI NO: 12322195 NR Description: oligopeptide transporter, putative [Arabidopsis
  misc_feature (1)..(433): Homolog of NCBI NO: 26450432 NR Description: putative peptide transporter PTR2-B [Arabidopsis
  misc_feature (1)..(12): Homolog of NCBI NO: 26450432 NR Description: putative peptide transporter PTR2-B [Arabidopsis

SEQ ID NO: 72632 - DNA, 1363 bp, Arabidopsis thaliana
  misc_feature (1)..(1363): Ceres Seq. ID no. 4940134
  misc_feature: MA Experiment ID: 108501 Result: Up-regulated in Transcription
  misc_feature: MA Experiment 108501 PARAMETER Experiment Name: At_ap2_floral_buds_cDNA_P Parameter: Plant Line Value: ap2 (Ler.)
  misc_feature: MA Experiment 108501 PARAMETER Experiment Name: At_ap2_floral_buds_cDNA_P Parameter: Tissue Value: Closed Flower
  misc_feature: MA Experiment ID: 108569 Result: Up-regulated in Transcription
  misc_feature: MA Experiment 108569 PARAMETER Experiment Name: At_0.001%_MeJA__cDNA_P Parameter: Timepoint (hr) Value: 6
  misc_feature: MA Experiment 108569 PARAMETER Experiment Name: At_0.001%_MeJA__cDNA_P Parameter: Tissue Value: Aerial
  misc_feature: MA Experiment 108569 PARAMETER Experiment Name: At_0.001%_MeJA__cDNA_P Parameter: Treatment Value: 0.001% MeJA vs. No Treatment
  misc_feature: MA Experiment ID: 108572 Result: Up-regulated in Transcription
  misc_feature: MA Experiment 108572 PARAMETER Experiment Name: At_Drought_cDNA_P Parameter: Timepoint (hr) Value: 1
  misc_feature: MA Experiment 108572 PARAMETER Experiment Name: At_Drought_cDNA_P Parameter: Tissue Value: Aerial
  misc_feature: MA Experiment 108572 PARAMETER Experiment Name: At_Drought_cDNA_P Parameter: Treatment Value: Drought vs. No Drought
  misc_feature: MA Experiment ID: 108573 Result: Up-regulated in Transcription
  misc_feature: MA Experiment 108573 PARAMETER Experiment Name: At_Drought_cDNA_P Parameter: Timepoint (hr) Value: 6
  misc_feature: MA Experiment 108573 PARAMETER Experiment Name: At_Drought_cDNA_P Parameter: Tissue Value: Aerial
  misc_feature: MA Experiment 108573 PARAMETER Experiment Name: At_Drought_cDNA_P Parameter: Treatment Value: Drought vs. No Drought
  misc_feature: MA Experiment ID: 108607 Result: Up-regulated in Transcription
  misc_feature: MA Experiment 108607 PARAMETER Experiment Name: At_100uM_ABA_cDNA_P Parameter: Timepoint (hr) Value: 4
  misc_feature: MA Experiment 108607 PARAMETER Experiment Name: At_100uM_ABA_cDNA_P Parameter: Tissue Value: Aerial
  misc_feature: MA Experiment 108607 PARAMETER Experiment Name: At_100uM_ABA_cDNA_P Parameter: Treatment Value: 100uM ABA vs. No Treatment
  misc_feature: MA Experiment ID: 20000111 Result: Down-regulated in Transcription
  misc_feature: MA Experiment 20000111 PARAMETER Experiment Name: At_42deg_Heat_cDNA_P Parameter: Temperature (deg C) Value: 42 vs. 22
  misc_feature: MA Experiment 20000111 PARAMETER Experiment Name: At_42deg_Heat_cDNA_P Parameter: Timepoint (hr) Value: 6
  misc_feature: MA Experiment 20000111 PARAMETER Experiment Name: At_42deg_Heat_cDNA_P Parameter: Tissue Value: Aerial
  misc_feature: MA Experiment ID: 20000144 Result: Down-regulated in Transcription
  misc_feature: MA Experiment 20000144 PARAMETER Experiment Name: At_42deg_Heat_cDNA_P Parameter: Temperature (deg C) Value: 42 vs. 22
  misc_feature: MA Experiment 20000144 PARAMETER Experiment Name: At_42deg_Heat_cDNA_P Parameter: Timepoint (hr) Value: 1
  misc_feature: MA Experiment 20000144 PARAMETER Experiment Name: At_42deg_Heat_cDNA_P Parameter: Tissue Value: Aerial
atattaaccccttgtgtctctcacaatcccactagtactgaaacatagagatagacttagctcaagataagctaatttgttttcactctaatatagagagagagagaaagagatcggagaggaaaaaatggcgggaggaatagggctgggagacacgacatacacgaaggtgtttgtgggaggattagcttgggagacgcataaggagacgatgaagaagcactttgagcagtttggagagattttggaagccgtagtcatcaccgacaaggcctccggtagatccaagggctacggattcgtgacattcagggaagcggaggcggcgaggagtgcttgtgtggatgctactccggtgatcgacgggagaagagcaaattgcaacctcgcctctctcggtcttcaaagatccaaaccctccactcctaaccatggaggaggaggcaggattaacaatatgagagtgatgatgagcacaatgcagactggttttggaccacctccaccaccacaaccacccaccttcactcactatccccatctccctctcaatctctttgggtactctccatactcgccagactactcatcattccctacgaacttatacggcatgtacggctgcacttctggaggacaatacggagtctatggaaacagaaacagcggaggcggtggactaaccgcagcagccgcatccgctactcctttttatccttgtggtggaggacatggtggggtccagttctctcaaccacaaccattttatcatcacttgtcttcttataaccctcaccattactctcctccgaccttttctatgcaacaagtgtgttttgttgtgccacaggcgtaacaggctttccgcttcaaccacctcttattccttaccgttaaagaagcttagagtctttggtagctatcaagcttcatatcatcatcttcttcttctcaggtcaagagccattctatggtttaaaggatgctcctggctaatctcagcacttagtttctctccctctgctctaaaagctaccccattttatggaatttggaggtggctttttaagcagatcccaatgggatctcctgtttcagatggtgatcatgtcgtatttgtcatctctcaccttcttgcaattgcatcttctcgagagaatgggtttctctttgagagatattgctaatggagcatcatcatcatcaatcactcatgtgccaatctcaagctgatgcatgtatcagcttaattagtttatgttgttttagcctaaggatggctaatcaacaagacaaagaaaatgtctgttaggataatgtaaaaaaaaaatcaagcaccaaaacaattttctgtttgaaagac

SEQ ID NO: 72633 - protein, 242 aa, Arabidopsis thaliana
  peptide (1)..(242): Ceres Seq. ID no. 4940135
  misc_feature (15)..(70): Pfam Name: RNA recognition motif. (a.k.a. RRM, RBD, or RNP domain) Pfam Description: RNA recognition motif. (a.k.a. RRM, RBD, or RNP
  misc_feature (1)..(206): Homolog of NCBI NO: 25518372 NR Description: hypothetical protein F19G10.13 - Arabidopsis
  misc_feature (1)..(234): Homolog of NCBI NO: 18395177 NR Description: RRM-containing protein; protein id: At1g22910.1, by cDNA: gi_13605870, supported by cDNA: gi_16323281 [Arabidopsis >gi|13605871|gb|AAK32921.1|AF367334_1 At1g22910/F19G10_13
  misc_feature (5)..(197): Homolog of NCBI NO: 34907334 NR Description: P0698A10.29 [Oryza sativa (japonica
  misc_feature (9)..(242): Homolog of NCBI NO: 14532532 NR Description: At1g33470/F10C21_14 [Arabidopsis thaliana]
  misc_feature (3)..(201): Homolog of NCBI NO: 34905758 NR Description: similar to RNA-binding protein [Oryza sativa
  misc_feature (8)..(222): Homolog of NCBI NO: 15010636 NR Description: At1g20880/F9H16_14 [Arabidopsis thaliana]
  misc_feature (8)..(240): Homolog of NCBI NO: 18394923 NR Description: RRM-containing protein; protein id: At1g20880.1,
  misc_feature (8)..(240): Homolog of NCBI NO: 23505939 NR Description: At1g20880/F9H16_14 [Arabidopsis thaliana]
  misc_feature (8)..(230): Homolog of NCBI NO: 18411885 NR Description: RRM-containing protein; protein id: At1g78260.1, by cDNA: 123429. [Arabidopsis thaliana]
  misc_feature (8)..(234): Homolog of NCBI NO: 25518109 NR Description: T16E15.6 protein - Arabidopsis thaliana Contains similarity to seb4D protein from Mus musculus gb|X75316
MAGGIGLGDTTYTKVFVGGLAWETHKETMKKHFEQFGEILEAVVITDKASGRSKGYGFVTFREAEAARSACVDATPVIDGRRANCNLASLGLQRSKPSTPNHGGGGRINNMRVMMSTMQTGFGPPPPPQPPTFTHYPHLPLNLFGYSPYSPDYSSFPTNLYGMYGCTSGGQYGVYGNRNSGGGGLTAAAASATPFYPCGGGHGGVQFSQPQPFYHHLSSYNPHHYSPPTFSMQQVCFVVPQA

SEQ ID NO: 72634 - protein, 214 aa, Arabidopsis thaliana; identical to SEQ ID NO: 24359
  peptide (1)..(214): Ceres Seq. ID no. 4940136
  misc_feature (1)..(42): Pfam Name: RNA recognition motif. (a.k.a. RRM, RBD, or RNP domain) Pfam Description: RNA recognition motif. (a.k.a. RRM, RBD, or RNP
  misc_feature (1)..(178): Homolog of NCBI NO: 25518372 NR Description: hypothetical protein F19G10.13 - Arabidopsis
  misc_feature (1)..(206): Homolog of NCBI NO: 18395177 NR Description: RRM-containing protein; protein id: At1g22910.1, by cDNA: gi_13605870, supported by cDNA: gi_16323281 [Arabidopsis >gi|13605871|gb|AAK32921.1|AF367334_1 At1g22910/F19G10_13
  misc_feature (1)..(169): Homolog of NCBI NO: 34907334 NR Description: P0698A10.29 [Oryza sativa (japonica
  misc_feature (1)..(214): Homolog of NCBI NO: 14532532 NR Description: At1g33470/F10C21_14 [Arabidopsis thaliana]
  misc_feature (1)..(173): Homolog of NCBI NO: 34905758 NR Description: similar to RNA-binding protein [Oryza sativa
  misc_feature (1)..(194): Homolog of NCBI NO: 15010636 NR Description: At1g20880/F9H16_14 [Arabidopsis thaliana]
  misc_feature (1)..(212): Homolog of NCBI NO: 18394923 NR Description: RRM-containing protein; protein id: At1g20880.1,
  misc_feature (1)..(212): Homolog of NCBI NO: 23505939 NR Description: At1g20880/F9H16_14 [Arabidopsis thaliana]
  misc_feature (1)..(202): Homolog of NCBI NO: 18411885 NR Description: RRM-containing protein; protein id: At1g78260.1, by cDNA: 123429. [Arabidopsis thaliana]
  misc_feature (1)..(206): Homolog of NCBI NO: 25518109 NR Description: T16E15.6 protein - Arabidopsis thaliana Contains similarity to seb4D protein from Mus musculus gb|X75316

SEQ ID NO: 72635 - protein, 151 aa, Arabidopsis thaliana
  peptide (1)..(151): Ceres Seq. ID no. 4940137
  misc_feature (40)..(151): Homolog of NCBI NO: 25518372 NR Description: hypothetical protein F19G10.13 - Arabidopsis
MVGSSSLNHNHFIITCLLITLTITLLRPFLCNKCVLLCHRRNRLSASTTSYSLPLKKLRVFGSYQASYHHLLLLRSRAILWFKGCSWLISALSFSPSALKATPFYGIWRWLFKQIPMGSPVSDGDHVVFVISHLLAIASSRENGFLFERYC

SEQ ID NO: 72636 - DNA, 1180 bp, Arabidopsis thaliana
  misc_feature (1)..(1180): Ceres Seq. ID no. 4940146
  misc_feature: MA Experiment ID: 108434 Result: Up-regulated in Transcription
  misc_feature: MA Experiment 108434 PARAMETER Experiment Name: At_Root_Tips_cDNA_P Parameter: Tissue Value: Root Tips
  misc_feature: MA Experiment ID: 108461 Result: Up-regulated in Transcription
  misc_feature: MA Experiment 108461 PARAMETER Experiment Name: At_Germinating_Seeds_cDNA_P Parameter: Age (day) Value: 1 vs. 0
  misc_feature: MA Experiment 108461 PARAMETER Experiment Name: At_Germinating_Seeds_cDNA_P Parameter: Tissue Value: Germinating Seeds
  misc_feature: MA Experiment ID: 20000180 Result: Up-regulated in Transcription
  misc_feature: MA Experiment 20000180 PARAMETER Experiment Name: At_Germinating_Seeds_P Parameter: Age (hr) Value: 24 vs. 0
  misc_feature: MA Experiment 20000180 PARAMETER Experiment Name: At_Germinating_Seeds_P Parameter: Tissue Value: Germinating Seeds
  misc_feature: MA Experiment ID: 20000224 Result: Down-regulated in Transcription
attttaatttttcatgttactctctccttcttcttcacttgttctctttctcatcgcctcttgattcacgcgaacgagaaagcgacgatcgtaaccaccggcgctgaccaaaaagtaatcgattctcttcccgagctgatctctcagcttcaggtgtcttgaatctgaatctgtggctatatttggtgctcggtggtgagcaggaagggagggggatattgtcagggttttaatgtacgtcagatgaatagagcaactaatgttactggcagtagaaggagggggtttattctcagcgtccgcgtctgggtatagtaagggattgacccttcttttctctggtgataaagacgtagataggcccatgagagttgtcccgtggaatcactaccaggtggttgaccaagagcctgaggctgaccctgttcttcagctggattctattaagaaccgagtttcccgcggttgcgctgcttccttcagttgttttggtggcgcttccgcgggacttgagaccccttctcctcttaaagttgaacctgtgcagcagcagcatcgtgaaatatcatcaccagagtctgttgttgttgtttctgaaaagggtaaagaccaaataagtgaagctgataatggcagcagcaaagaagctttcaaactctcgttgaggagtagcttgaagaggccctctgttgcggaatcacgctctctagaagatataaaagaatacgagacgttgagtgtggatggtagcgatctcactggtgacatggcaaggcggaaagttcagtggcctgatgcttgtggtagtgaactcactcaagttagagaatttgagccgagtgagatgggattatcagatgaagaatgggaggtaggacgacaaagaacatgttcgtgtgtgatcatgtaaattcagaaatcatcggtatcactctttactcatgtcttgtgtgcattgctcatatatttaaagtgtatctgttattacaaaagttctcttcaaggttttggcttgtacattattccctttgttttgagtggcaacttgttccgggtttctgttttctaaaaacgataagacaacatccaaatcgatgcaaagtggaagagagtggcaataactcttgttcttgtaacgctctcaaccacattacgtacgtgtacaacaaaactagaatgc

SEQ ID NO: 72637 - protein, 216 aa, Arabidopsis thaliana; identical to SEQ ID NO: 38101
  peptide (1)..(216): Ceres Seq. ID no. 4940147
  misc_feature (1)..(216): Homolog of NCBI NO: 18395162 NR Description: expressed protein; protein id: At1g22790.1, by cDNA: 94230. [Arabidopsis thaliana] unknown [Arabidopsis thaliana] >gi|27754683|gb|AAO22785.1|
  misc_feature (6)..(193): Homolog of NCBI NO: 7452500 NR Description: hypothetical protein T22J18.4 - Arabidopsis >gi|3287680|gb|AAC25508.1|AAC25508 T22J18.4 [Arabidopsis
  misc_feature (1)..(193): Homolog of NCBI NO: 2505872 NR Description: hypothetical protein [Arabidopsis thaliana]
  misc_feature (1)..(215): Homolog of NCBI NO: 34912224 NR Description: P0415C01.14 [Oryza sativa (japonica
  misc_feature (1)..(165): Homolog of NCBI NO: 30692973 NR Description: expressed protein [Arabidopsis thaliana]
  misc_feature (1)..(157): Homolog of NCBI NO: 10092447 NR Description: unknown protein; 15226-14726 [Arabidopsis
  misc_feature (1)..(157): Homolog of NCBI NO: 25334118 NR Description: F12G12.17 protein - Arabidopsis thaliana
  misc_feature (112)..(216): Homolog of NCBI NO: 30692973 NR Description: expressed protein [Arabidopsis thaliana]

SEQ ID NO: 72638 - protein, 181 aa, Arabidopsis thaliana; identical to SEQ ID NO: 38102
  peptide (1)..(181): Ceres Seq. ID no. 4940148
  misc_feature (1)..(181): Homolog of NCBI NO: 18395162 NR Description: expressed protein; protein id: At1g22790.1, by cDNA: 94230. [Arabidopsis thaliana] unknown [Arabidopsis thaliana] >gi|27754683|gb|AAO22785.1|
  misc_feature (1)..(158): Homolog of NCBI NO: 7452500 NR Description: hypothetical protein T22J18.4 - Arabidopsis >gi|3287680|gb|AAC25508.1|AAC25508 T22J18.4 [Arabidopsis
  misc_feature (1)..(158): Homolog of NCBI NO: 2505872 NR Description: hypothetical protein [Arabidopsis thaliana]
  misc_feature (1)..(180): Homolog of NCBI NO: 34912224 NR Description: P0415C01.14 [Oryza sativa (japonica
  misc_feature (1)..(130): Homolog of NCBI NO: 30692973 NR Description: expressed protein [Arabidopsis thaliana]
  misc_feature (1)..(122): Homolog of NCBI NO: 10092447 NR Description: unknown protein; 15226-14726 [Arabidopsis
  misc_feature (1)..(122): Homolog of NCBI NO: 25334118 NR Description: F12G12.17 protein - Arabidopsis thaliana
  misc_feature (77)..(181): Homolog of NCBI NO: 30692973 NR Description: expressed protein [Arabidopsis thaliana]

SEQ ID NO: 72639 - DNA, 1269 bp, Arabidopsis thaliana
  misc_feature (1)..(1269): Ceres Seq. ID no. 4940181
atgaatcttgttgttctgctaatcctaacattactccttttcattgtttcttatgtagtagacgcaggccaagtcattttggttgattccaacataactcgctcttttgtcgacatggaagctgatttctctccatcagtgactacggtggaaaccggagtggtttatgtagctgagcctctcaacgcttgccgaaacttgaggaataaaccggagcagagcccttatggtacttcccctcttgtgttgatcataagaggaggctgcagttttgagtacaaagtcagaaacgcgcagagaagcggtttcaaggctgccattgtctatgacaatgtggaccgcaacttcttatccgcaatggggggagactcggacggtataaagattcaagcggtttttgtgatgaagagagccggagaaatgctcaagaagtacgcgggttcggaggaaatggaagtcatgttggttcctcctaatacagaggactcggtgtggtcattgtacgcttccatagcattgatcttgtcgctggctattttttgtgttatggttacttgtgtcttcttctatagatattgctcaacaattagaaactctacatctcaattcaatgggatgtgccgtagaacggtgaaagcaatgccgagtgttacattcacttgtgcaaaaatagacaacactacaggtttctcttgcgctatctgccttgaagactacattgttggagacaagctcagggtcttaccttgcagtcacaagtttcatgtcgcttgcgtagactcgtggcttatatcatggagaacgttttgtccagtgtgtaaacgggatgcgagaacgaccgcagatgagccactagctacagagagcacaccgtttctcagttcttccattgcaacatcatctctagtgtgtatagactctcctcctttgggatcctcagtttctttctctccagcgcatgtgagctcgtccttcattcatcaatttgtcaggtcttcgccaatgaatggcagccgtatctcagagaatcttaggcgacaagcctcaccattacagtcatcatcacagcgatcacacctctctatgaagtcttcccattcactgggttattcgaccatgtcacctctcaacgcgatgggcatgtcaccataccggccatacccaagcaatgcatcgcctggattattcagttcaacaaatcatctgctttccaattatacagcaaatacattctctcatttcgcctctgcacactcgcttccggactag

SEQ ID NO: 72640 - protein, 422 aa, Arabidopsis thaliana
  peptide (1)..(422): Ceres Seq. ID no. 4940182
  misc_feature (45)..(146): Pfam Name: PA domain Pfam Description: PA domain
  misc_feature (1)..(422): Homolog of NCBI NO: 15219930 NR Description: putative RING zinc finger protein; protein id:
  misc_feature (1)..(375): Homolog of NCBI NO: 7487358 NR Description: hypothetical protein T22J18.16 - Arabidopsis >gi|3287691|gb|AAC25519.1|AAC25519 Contains similarity to RING finger protein gb|X95455 from Gallus gallus. [Arabidopsis
  misc_feature (9)..(417): Homolog of NCBI NO: 22330577 NR Description: unknown protein; protein id: At1g71980.1, by cDNA: gi_17529199 [Arabidopsis thaliana] unknown protein [Arabidopsis thaliana]
  misc_feature (30)..(417): Homolog of NCBI NO: 25406132 NR Description: unknown protein F17M19.13 [imported] -
  misc_feature (9)..(417): Homolog of NCBI NO: 6942149 NR Description: ReMembR-H2 protein JR702 [Arabidopsis thaliana]
  misc_feature (253)..(422): Homolog of NCBI NO: 7487358 NR Description: hypothetical protein T22J18.16 - Arabidopsis >gi|3287691|gb|AAC25519.1|AAC25519 Contains similarity to RING finger protein gb|X95455 from Gallus gallus. [Arabidopsis
  misc_feature (4)..(410): Homolog of NCBI NO: 19071633 NR Description: putative integral membrane protein [Oryza sativa
  misc_feature (12)..(384): Homolog of NCBI NO: 38637053 NR Description: putative ReMembR-H2 protein [Oryza sativa
  misc_feature (6)..(407): Homolog of NCBI NO: 15233945 NR Description: putative protein; protein id: At4g09560.1
  misc_feature (9)..(296): Homolog of NCBI NO: 15219670 NR Description: integral membrane protein, putative; protein id:
MNLVVLLILTLLLFIVSYVVDAGQVILVDSNITRSFVDMEADFSPSVTTVETGVVYVAEPLNACRNLRNKPEQSPYGTSPLVLIIRGGCSFEYKVRNAQRSGFKAAIVYDNVDRNFLSAMGGDSDGIKIQAVFVMKRAGEMLKKYAGSEEMEVMLVPPNTEDSVWSLYASIALILSLAIFCVMVTCVFFYRYCSTIRNSTSQFNGMCRRTVKAMPSVTFTCAKIDNTTGFSCAICLEDYIVGDKLRVLPCSHKFHVACVDSWLISWRTFCPVCKRDARTTADEPLATESTPFLSSSIATSSLVCIDSPPLGSSVSFSPAHVSSSFIHQFVRSSPMNGSRISENLRRQASPLQSSSQRSHLSMKSSHSLGYSTMSPLNAMGMSPYRPYPSNASPGLFSSTNHLLSNYTANTFSHFASAHSLPD

SEQ ID NO: 72641 - protein, 384 aa, Arabidopsis thaliana
  peptide (1)..(384): Ceres Seq. ID no. 4940183
  misc_feature (7)..(108): Pfam Name: PA domain Pfam Description: PA domain
  misc_feature (1)..(384): Homolog of NCBI NO: 15219930 NR Description: putative RING zinc finger protein; protein id:
  misc_feature (1)..(337): Homolog of NCBI NO: 7487358 NR Description: hypothetical protein T22J18.16 - Arabidopsis >gi|3287691|gb|AAC25519.1|AAC25519 Contains similarity to RING finger protein gb|X95455 from Gallus gallus. [Arabidopsis
  misc_feature (1)..(379): Homolog of NCBI NO: 22330577 NR Description: unknown protein; protein id: At1g71980.1, by cDNA: gi_17529199 [Arabidopsis thaliana] unknown protein [Arabidopsis thaliana]
  misc_feature (1)..(379): Homolog of NCBI NO: 25406132 NR Description: unknown protein F17M19.13 [imported] -
  misc_feature (1)..(379): Homolog of NCBI NO: 6942149 NR Description: ReMembR-H2 protein JR702 [Arabidopsis thaliana]
  misc_feature (215)..(384): Homolog of NCBI NO: 7487358 NR Description: hypothetical protein T22J18.16 - Arabidopsis >gi|3287691|gb|AAC25519.1|AAC25519 Contains similarity to RING finger protein gb|X95455 from Gallus gallus. [Arabidopsis
  misc_feature (1)..(372): Homolog of NCBI NO: 19071633 NR Description: putative integral membrane protein [Oryza sativa
  misc_feature (1)..(346): Homolog of NCBI NO: 38637053 NR Description: putative ReMembR-H2 protein [Oryza sativa
  misc_feature (1)..(369): Homolog of NCBI NO: 15233945 NR Description: putative protein; protein id: At4g09560.1
  misc_feature (1)..(258): Homolog of NCBI NO: 15219670 NR Description: integral membrane protein, putative; protein id:
MEADFSPSVTTVETGVVYVAEPLNACRNLRNKPEQSPYGTSPLVLIIRGGCSFEYKVRNAQRSGFKAAIVYDNVDRNFLSAMGGDSDGIKIQAVFVMKRAGEMLKKYAGSEEMEVMLVPPNTEDSVWSLYASIALILSLAIFCVMVTCVFFYRYCSTIRNSTSQFNGMCRRTVKAMPSVTFTCAKIDNTTGFSCAICLEDYIVGDKLRVLPCSHKFHVACVDSWLISWRTFCPVCKRDARTTADEPLATESTPFLSSSIATSSLVCIDSPPLGSSVSFSPAHVSSSFIHQFVRSSPMNGSRISENLRRQASPLQSSSQRSHLSMKSSHSLGYSTMSPLNAMGMSPYRPYPSNASPGLFSSTNHLLSNYTANTFSHFASAHSLPD

SEQ ID NO: 72642 - protein, 303 aa, Arabidopsis thaliana
  peptide (1)..(303): Ceres Seq. ID no. 4940184
  misc_feature (113)..(154): Pfam Name: Zinc finger, C3HC4 type (RING finger) Pfam Description: Zinc finger, C3HC4 type (RING finger)
  misc_feature (1)..(303): Homolog of NCBI NO: 15219930 NR Description: putative RING zinc finger protein; protein id:
  misc_feature (1)..(256): Homolog of NCBI NO: 7487358 NR Description: hypothetical protein T22J18.16 - Arabidopsis >gi|3287691|gb|AAC25519.1|AAC25519 Contains similarity to RING finger protein gb|X95455 from Gallus gallus. [Arabidopsis
  misc_feature (1)..(298): Homolog of NCBI NO: 22330577 NR Description: unknown protein; protein id: At1g71980.1, by cDNA: gi_17529199 [Arabidopsis thaliana] unknown protein [Arabidopsis thaliana]
  misc_feature (1)..(298): Homolog of NCBI NO: 25406132 NR Description: unknown protein F17M19.13 [imported] -
  misc_feature (1)..(298): Homolog of NCBI NO: 6942149 NR Description: ReMembR-H2 protein JR702 [Arabidopsis thaliana]
  misc_feature (134)..(303): Homolog of NCBI NO: 7487358 NR Description: hypothetical protein T22J18.16 - Arabidopsis >gi|3287691|gb|AAC25519.1|AAC25519 Contains similarity to RING finger protein gb|X95455 from Gallus gallus. [Arabidopsis
  misc_feature (1)..(291): Homolog of NCBI NO: 19071633 NR Description: putative integral membrane protein [Oryza sativa
  misc_feature (1)..(265): Homolog of NCBI NO: 38637053 NR Description: putative ReMembR-H2 protein [Oryza sativa
  misc_feature (1)..(288): Homolog of NCBI NO: 15233945 NR Description: putative protein; protein id: At4g09560.1
  misc_feature (1)..(177): Homolog of NCBI NO: 15219670 NR Description: integral membrane protein, putative; protein id:
MGGDSDGIKIQAVFVMKRAGEMLKKYAGSEEMEVMLVPPNTEDSVWSLYASIALILSLAIFCVMVTCVFFYRYCSTIRNSTSQFNGMCRRTVKAMPSVTFTCAKIDNTTGFSCAICLEDYIVGDKLRVLPCSHKFHVACVDSWLISWRTFCPVCKRDARTTADEPLATESTPFLSSSIATSSLVCIDSPPLGSSVSFSPAHVSSSFIHQFVRSSPMNGSRISENLRRQASPLQSSSQRSHLSMKSSHSLGYSTMSPLNAMGMSPYRPYPSNASPGLFSSTNHLLSNYTANTFSHFASAHSLPD

SEQ ID NO: 72643 - DNA, 929 bp, Arabidopsis thaliana
  misc_feature (1)..(929): Ceres Seq. ID no. 4940501
  misc_feature: MA Experiment ID: 108434 Result: Up-regulated in Transcription
  misc_feature: MA Experiment 108434 PARAMETER Experiment Name: At_Root_Tips_cDNA_P Parameter: Tissue Value: Root Tips
  misc_feature: MA Experiment ID: 108573 Result: Down-regulated in Transcription
  misc_feature: MA Experiment 108573 PARAMETER Experiment Name: At_Drought_cDNA_P Parameter: Timepoint (hr) Value: 6
  misc_feature: MA Experiment 108573 PARAMETER Experiment Name: At_Drought_cDNA_P Parameter: Tissue Value: Aerial
  misc_feature: MA Experiment 108573 PARAMETER Experiment Name: At_Drought_cDNA_P Parameter: Treatment Value: Drought vs. No Drought
  misc_feature: MA Experiment ID: 20000090 Result: Up-regulated in Transcription
  misc_feature: MA Experiment ID: 20000113 Result: Down-regulated in Transcription
  misc_feature: MA Experiment 20000113 PARAMETER Experiment Name: At_42deg_Heat_cDNA_P Parameter: Temperature (deg C) Value: 42 vs. 22
  misc_feature: MA Experiment 20000113 PARAMETER Experiment Name: At_42deg_Heat_cDNA_P Parameter: Timepoint (hr) Value: 8
  misc_feature: MA Experiment 20000113 PARAMETER Experiment Name: At_42deg_Heat_cDNA_P Parameter: Tissue Value: Aerial
  misc_feature: MA Experiment ID: 20000180 Result: Up-regulated in Transcription
  misc_feature: MA Experiment 20000180 PARAMETER Experiment Name: At_Germinating_Seeds_P Parameter: Age (hr) Value: 24 vs. 0
  misc_feature: MA Experiment 20000180 PARAMETER Experiment Name: At_Germinating_Seeds_P Parameter: Tissue Value: Germinating Seeds
  misc_feature: MA Experiment ID: 20000184 Result: Down-regulated in Transcription
  misc_feature: MA Experiment 20000184 PARAMETER Experiment Name: At_Shoots__P Parameter: Age (day) Value: 7
  misc_feature: MA Experiment 20000184 PARAMETER Experiment Name: At_Shoots__P Parameter: Tissue Value: Shoots vs. Whole Plant
  misc_feature: MA Experiment ID: 20000495 Result: Up-regulated in Transcription
  misc_feature: MA Experiment 20000495 PARAMETER Experiment Name: At_Guard_Cells_P Parameter: Harvest Date Value: 8/2/2002
  misc_feature: MA Experiment 20000495 PARAMETER Experiment Name: At_Guard_Cells_P Parameter: Organism Value: A. thaliana
  misc_feature: MA Experiment 20000495 PARAMETER Experiment Name: At_Guard_Cells_P Parameter: Tissue Value: Guard Cells vs. Leaves
aaaatttctctgccggtgttgacttcaaactctctttgattagatcggcgccaacttctaaacgcaaatgggaatcacgagaaacttgatcctgggtttggcttgtttagcctttgtctccattgctaaagctctgcctcatgaaccagaacttggctcggctcgtgtcgtcttccagactagttatggagatatcgaatttgggttctatcccactgtggcacccaagacagtggatcacatcttcaagcttgttcgtttaggaggatacaacactaatcatttcttcagggttgataaaggttttgttgctcaagttgcggatgtggcgagtggacgatcagctccaatgaatgaggagcaaaggaaagaagctgagaagaaaattgtgggagagttcagtgatgttaagcatgtcagaggtactctttccatgggaagatatgacgatccaaacagtgcacaatcttcattttcgatgcttcttggcaatgctcctcatcttgatcgccagtatgctgtgtttggtaaagttactaaaggagatgaaacattgagtaagctagaagaagttcccactcgccgcgaggggatttttgttatgccgacggagcggatcacgattttgtcgacatactattacgacactaaaatggagagctgtgaagaagagagatctgtcctgaaaagaaggcttcaagcatcttttgtggaggtcgaaagacagagaatgaagtgcttcccgtgaatgaagttaacacataagaaactgttcaacaaaagccttaaaacgccagggaacacaaaggtaaatgtatgtctagtaaaaaaactcagaatgctagacagtttatgagtggtttatcagtgtgagagattgtagttaacagtgtaaacagtttgagacattgaatcatggattgtttcct

SEQ ID NO: 72644 - protein, 226 aa, Arabidopsis thaliana; identical to SEQ ID NO: 30726
  peptide (1)..(226): Ceres Seq. ID no. 4940502
  misc_feature (1)..(226): Homolog of NCBI NO: 18396122 NR Description: expressed protein; protein id: At1g26940.1, by cDNA: 19020. [Arabidopsis thaliana] unknown [Arabidopsis thaliana] >gi|26451588|dbj|BAC42891.1|
  misc_feature (34)..(220): Homolog of NCBI NO: 25518514 NR Description: hypothetical protein T2P11.13 - Arabidopsis
  misc_feature (1)..(203): Homolog of NCBI NO: 18310549 NR Description: probable peptidyl-prolyl cis-trans isomerase B
  misc_feature (11)..(195): Homolog of NCBI NO: 23501972 NR Description: peptidyl-prolyl cis-trans isomerase,
  misc_feature (34)..(167): Homolog of NCBI NO: 17987171 NR Description: PEPTIDYL-PROLYL CIS-TRANS ISOMERASE A [Brucella
  misc_feature (34)..(167): Homolog of NCBI NO: 23501971 NR Description: peptidyl-prolyl cis-trans isomerase,
  misc_feature (34)..(172): Homolog of NCBI NO: 15965337 NR Description: PUTATIVE PEPTIDYL-PROLYL CIS-TRANS ISOMERASE B
  misc_feature (7)..(188): Homolog of NCBI NO: 22982921 NR Description: hypothetical protein [Burkholderia fungorum]
  misc_feature (34)..(195): Homolog of NCBI NO: 17987170 NR Description: PEPTIDYL-PROLYL CIS-TRANS ISOMERASE [Brucella
  misc_feature (34)..(167): Homolog of NCBI NO: 15888985 NR Description: AGR_C_3088p [Agrobacterium tumefaciens]

SEQ ID NO: 72645 - protein, 132 aa, Arabidopsis thaliana; identical to SEQ ID NO: 30727
  peptide (1)..(132): Ceres Seq. ID no. 4940503
  misc_feature (1)..(132): Homolog of NCBI NO: 18396122 NR Description: expressed protein; protein id: At1g26940.1, by cDNA: 19020. [Arabidopsis thaliana] unknown [Arabidopsis thaliana] >gi|26451588|dbj|BAC42891.1|
  misc_feature (1)..(126): Homolog of NCBI NO: 25518514 NR Description: hypothetical protein T2P11.13 - Arabidopsis
  misc_feature (1)..(109): Homolog of NCBI NO: 18310549 NR Description: probable peptidyl-prolyl cis-trans isomerase B
  misc_feature (1)..(101): Homolog of NCBI NO: 23501972 NR Description: peptidyl-prolyl cis-trans isomerase,
  misc_feature (1)..(73): Homolog of NCBI NO: 17987171 NR Description: PEPTIDYL-PROLYL CIS-TRANS ISOMERASE A [Brucella
  misc_feature (1)..(73): Homolog of NCBI NO: 23501971 NR Description: peptidyl-prolyl cis-trans isomerase,
  misc_feature (1)..(78): Homolog of NCBI NO: 15965337 NR Description: PUTATIVE PEPTIDYL-PROLYL CIS-TRANS ISOMERASE B
  misc_feature (1)..(94): Homolog of NCBI NO: 22982921 NR Description: hypothetical protein [Burkholderia fungorum]
  misc_feature (1)..(101): Homolog of NCBI NO: 17987170 NR Description: PEPTIDYL-PROLYL CIS-TRANS ISOMERASE [Brucella
  misc_feature (1)..(73): Homolog of NCBI NO: 15888985 NR Description: AGR_C_3088p [Agrobacterium tumefaciens]

SEQ ID NO: 72646 - DNA, 1428 bp, Arabidopsis thaliana
  misc_feature (1)..(1428): Ceres Seq. ID no. 4940877
  misc_feature: MA Experiment ID: 20000179 Result: Down-regulated in Transcription
  misc_feature: MA Experiment 20000179 PARAMETER Experiment Name: At_Germinating_Seeds_P Parameter: Age (hr) Value: 6 vs. 0
  misc_feature: MA Experiment 20000179 PARAMETER Experiment Name: At_Germinating_Seeds_P Parameter: Tissue Value: Germinating Seeds
  misc_feature: MA Experiment ID: 20000180 Result: Down-regulated in Transcription
  misc_feature: MA Experiment 20000180 PARAMETER Experiment Name: At_Germinating_Seeds_P Parameter: Age (hr) Value: 24 vs. 0
  misc_feature: MA Experiment 20000180 PARAMETER Experiment Name: At_Germinating_Seeds_P Parameter: Tissue Value: Germinating Seeds
  misc_feature: MA Experiment ID: 20000182 Result: Up-regulated in Transcription
  misc_feature: MA Experiment 20000182 PARAMETER Experiment Name: At_2mM_SA_P Parameter: Age (day) Value: 14
  misc_feature: MA Experiment 20000182 PARAMETER Experiment Name: At_2mM_SA_P Parameter: Organism Value: A. thaliana
  misc_feature: MA Experiment 20000182 PARAMETER Experiment Name: At_2mM_SA_P Parameter: Plant Line Value: WS
  misc_feature: MA Experiment 20000182 PARAMETER Experiment Name: At_2mM_SA_P Parameter: Timepoint (hr) Value: 6
  misc_feature: MA Experiment 20000182 PARAMETER Experiment Name: At_2mM_SA_P Parameter: Tissue Value: Aerial
  misc_feature: MA Experiment 20000182 PARAMETER Experiment Name: At_2mM_SA_P Parameter: Treatment Value: 2mM SA vs. No Treatment
  misc_feature: MA Experiment ID: 20000234 Result: Down-regulated in Transcription
  misc_feature: MA Experiment 20000234 PARAMETER Experiment Name: At_Siliques_P Parameter: Age (day) Value: 21
  misc_feature: MA Experiment 20000234 PARAMETER Experiment Name: At_Siliques_P Parameter: Organism Value: A. thaliana
  misc_feature: MA Experiment 20000234 PARAMETER Experiment Name: At_Siliques_P Parameter: Plant Line Value: WS
  misc_feature: MA Experiment 20000234 PARAMETER Experiment Name: At_Siliques_P Parameter: Tissue Value: Less Than 5mm Siliques vs. Whole Plant
  misc_feature: MA Experiment ID: 20000235 Result: Down-regulated in Transcription
  misc_feature: MA Experiment 20000235 PARAMETER Experiment Name: At_Siliques_P Parameter: Age (day) Value: 21
  misc_feature: MA Experiment 20000235 PARAMETER Experiment Name: At_Siliques_P Parameter: Organism Value: A. thaliana
  misc_feature: MA Experiment 20000235 PARAMETER Experiment Name: At_Siliques_P Parameter: Plant Line Value: WS
  misc_feature: MA Experiment 20000235 PARAMETER Experiment Name: At_Siliques_P Parameter: Tissue Value: 5-10mm Siliques vs. Whole Plant
  misc_feature: MA Experiment ID: 20000265 Result: Down-regulated in Transcription
  misc_feature: MA Experiment 20000265 PARAMETER Experiment Name: At_Open_Flower_P Parameter: Age (day) Value: 21
  misc_feature: MA Experiment 20000265 PARAMETER Experiment Name: At_Open_Flower_P Parameter: Plant Line Value: WS
  misc_feature: MA Experiment 20000265 PARAMETER Experiment Name: At_Open_Flower_P Parameter: Tissue Value: Closed Flower vs. Whole Plant
  misc_feature: MA Experiment ID: 20000286 Result: Down-regulated in Transcription
  misc_feature: MA Experiment 20000286 PARAMETER Experiment Name: At_Open_Flower_P Parameter: Age (day) Value: 21
  misc_feature: MA Experiment 20000286 PARAMETER Experiment Name: At_Open_Flower_P Parameter: Plant Line Value: WS
  misc_feature: MA Experiment 20000286 PARAMETER Experiment Name: At_Open_Flower_P Parameter: Tissue Value: Half Open vs. Whole Plant
  misc_feature: MA Experiment ID: 20000438 Result: Up-regulated in Transcription
  misc_feature: MA Experiment 20000438 PARAMETER Experiment Name: At_Shoots__P Parameter: Age (day) Value: 14
  misc_feature: MA Experiment 20000438 PARAMETER Experiment Name: At_Shoots__P Parameter: Tissue Value: Shoots vs. Whole Plant
  misc_feature: MA Experiment ID: 20000439 Result: Up-regulated in Transcription
  misc_feature: MA Experiment 20000439 PARAMETER Experiment Name: At_Roots__P Parameter: Age (day) Value: 14 vs. 21
  misc_feature: MA Experiment 20000439 PARAMETER Experiment Name: At_Roots__P Parameter: Organism Value: A. thaliana
  misc_feature: MA Experiment 20000439 PARAMETER Experiment Name: At_Roots__P Parameter: Tissue Value: Roots vs. Whole Plant
  misc_feature: MA Experiment ID: 20000441 Result: Up-regulated in Transcription
  misc_feature: MA Experiment 20000441 PARAMETER Experiment Name: At_1uM_BR-BRZ__P Parameter: Tissue Value: Shoot Apices
  misc_feature: MA Experiment 20000441 PARAMETER Experiment Name: At_1uM_BR-BRZ__P Parameter: Treatment Value: 1uM BR vs. No Treatment
  misc_feature: MA Experiment ID: 20000443 Result: Up-regulated in Transcription
  misc_feature: MA Experiment 20000443 PARAMETER Experiment Name: At_1uM_BR-BRZ__P Parameter: Tissue Value: Shoot Apices
  misc_feature: MA Experiment 20000443 PARAMETER Experiment Name: At_1uM_BR-BRZ__P Parameter: Treatment Value: 1uM BRZ vs. No Treatment
  misc_feature: MA Experiment ID: 20000496 Result: Down-regulated in Transcription
  misc_feature: MA Experiment 20000496 PARAMETER Experiment Name: At_Guard_Cells_P Parameter: Harvest Date Value: 7/19/2002
  misc_feature: MA Experiment 20000496 PARAMETER Experiment Name: At_Guard_Cells_P Parameter: Organism Value: Canola
  misc_feature: MA Experiment 20000496 PARAMETER Experiment Name: At_Guard_Cells_P Parameter: Tissue Value: Guard Cells vs. Leaves
  misc_feature: MA Experiment ID: 20000709 Result: Up-regulated in Transcription
  misc_feature: MA Experiment 20000709 PARAMETER Experiment Name: At_15mM_NH4NO3_L-to-H_P Parameter: Age (hr) Value: 14
  misc_feature: MA Experiment 20000709 PARAMETER Experiment Name: At_15mM_NH4NO3_L-to-H_P Parameter: Organism Value: A. thaliana
  misc_feature: MA Experiment 20000709 PARAMETER Experiment Name: At_15mM_NH4NO3_L-to-H_P Parameter: Plant Line Value: WS
  misc_feature: MA Experiment 20000709 PARAMETER Experiment Name: At_15mM_NH4NO3_L-to-H_P Parameter: Timepoint (hr) Value: 4
  misc_feature: MA Experiment 20000709 PARAMETER Experiment Name: At_15mM_NH4NO3_L-to-H_P Parameter: Tissue Value: Aerial
  misc_feature: MA Experiment 20000709 PARAMETER Experiment Name: At_15mM_NH4NO3_L-to-H_P Parameter: Treatment Value: 15mM NH4NO3 vs. 30mM Mannitol
  misc_feature: MA Experiment ID: 20001247 Result: Up-regulated in Transcription
  misc_feature: MA Experiment 20001247 PARAMETER Experiment Name: At_Far-red-induction_P Parameter: Age (day) Value: 7
  misc_feature: MA Experiment 20001247 PARAMETER Experiment Name: At_Far-red-induction_P Parameter: Light Value: Far-red vs. White
  misc_feature: MA Experiment 20001247 PARAMETER Experiment Name: At_Far-red-induction_P Parameter: Organism Value: A. thaliana
  misc_feature: MA Experiment 20001247 PARAMETER Experiment Name: At_Far-red-induction_P Parameter: Plant Line Value: Columbia
  misc_feature: MA Experiment 20001247 PARAMETER Experiment Name: At_Far-red-induction_P Parameter: Timepoint (hr) Value: 1
  misc_feature: MA Experiment 20001247 PARAMETER Experiment Name: At_Far-red-induction_P Parameter: Tissue Value: Whole Plant
  misc_feature: MA Experiment ID: 20001906 Result: Up-regulated in Transcription
  misc_feature: MA Experiment 20001906 PARAMETER Experiment Name: At_Drought_Reproduction_P Parameter: Age (day) Value: 35
  misc_feature: MA Experiment 20001906 PARAMETER Experiment Name: At_Drought_Reproduction_P Parameter: Organism Value: A. thaliana
  misc_feature: MA Experiment 20001906 PARAMETER Experiment Name: At_Drought_Reproduction_P Parameter: Plant Line Value: WS
  misc_feature: MA Experiment 20001906 PARAMETER Experiment Name: At_Drought_Reproduction_P Parameter: Timepoint (day) Value: 5
  misc_feature: MA Experiment 20001906 PARAMETER Experiment Name: At_Drought_Reproduction_P Parameter: Tissue Value: Siliques
  misc_feature: MA Experiment 20001906 PARAMETER Experiment Name: At_Drought_Reproduction_P Parameter: Treatment Value: Drought vs. No Drought
  misc_feature: Pfam Name: MatE Pfam Description: MatE
atggccggaagaggaggagagctcacggaggctctggtgaaaaagaccggcagagaagaagaggatgagttggggatgaaggagaaggtttggattgaatcaaagaaactgtgggttgtggcggcgccagcgatcttcacaagatactctacgttcggagtttcaatggtaactcaagctttcattggccatcttggcccaaccgagttggccgcttactctatcaccttcaccattctcctccgtttcagtaatggtatcttgttaggtatggccggtgcactaggaacattatgtggtcaagcctacggagccaaacaataccagatgctcgggatctacctccaaaggtcatggatcgtcctcacaggtggtaccatttgcctcatgcccgtcttcatctttgcgggccctatcctcttagctttaggtcaagaggaacgcattgttcgtgtggctcgggtcttagccctatgggtcataggcatcaacttctccttcgtgccctccttcacttgccaaatgtttctccaagctcagagcaagaacaagattatttcctacgtgactgctgtctccttagggctccatgtcttcttctcgtggctcctagtggctcatttcaattttgggatcactggtgcgatgacctctatgctaattgcgttctggttgcctatcattgtgcagctcttgtatgtaacatgtggtggatgtaaggatacatggagaggattctctatgttggccttcaaagatttgtggcccgtcttaaaactatctttgtcttccggtggaatgctttgcttggagttatggtacaactcggtattggtattgctcactggaaatttgaaaaacgcagaggtggctcttgatgcactagcaatctgcatcagcataaatgcactggagatgatgatagcacttgggtttttggcagcagtaagtgtaagagtgtccaacgagctcggtagtggaaaccccaaaggagccaagtttgcaacattgatagcggttttcacgggaagaatttcctacattttcactacaagtgaagctgtcgcggccgaagttgctgatctttctccacttttagcattttccatcctcttgaacagtgttcaacctgttctctctggagtggcaatcggagcgggatggcaaggatatgtggcttacgttaaccttgcttgctattaccttgtcggaattcctattggtgttatccttggttatgttgttggtttgcaagtgaaaggtgtatggataggaatgctttttggaatattcgttcagacttgtgtgctcaccgtcatgactctcagaacagattgggatcaacaggtatctacgtcgttgagaaatataaaccggtgggttgtaccagaatctagagatgcaaatcaaatttcatcagaggaataa

SEQ ID NO: 72647 - protein, 475 aa, Arabidopsis thaliana
  peptide (1)..(475): Ceres Seq. ID no. 4940878
  misc_feature: Pfam Name: MatE Pfam Description: MatE
  misc_feature (1)..(475): Homolog of NCBI NO: 15223394 NR Description: unknown protein; protein id: At1g33100.1
  misc_feature (1)..(475): Homolog of NCBI NO: 15223391 NR Description: hypothetical protein; protein id: At1g33090.1
  misc_feature (1)..(475): Homolog of NCBI NO: 15223402 NR Description: unknown protein; protein id: At1g33110.1, by cDNA: gi_17065359 [Arabidopsis thaliana] Unknown protein [Arabidopsis thaliana]
  misc_feature (1)..(475): Homolog of NCBI NO: 22329916 NR Description: hypothetical protein; protein id: At1g33080.1, by cDNA: gi_19423993 [Arabidopsis thaliana] unknown protein [Arabidopsis thaliana]
  misc_feature (1)..(475): Homolog of NCBI NO: 6910584 NR Description: CDS [Arabidopsis thaliana]
  misc_feature (142)..(454): Homolog of NCBI NO: 25518156 NR Description: T9L6.1 protein - Arabidopsis thaliana
  misc_feature (1)..(87): Homolog of NCBI NO: 25518156 NR Description: T9L6.1 protein - Arabidopsis thaliana
  misc_feature (1)..(392): Homolog of NCBI NO: 6910588 NR Description: CDS [Arabidopsis thaliana]
  misc_feature (7)..(449): Homolog of NCBI NO: 15238161 NR Description: putative protein; protein id: At5g10420.1
  misc_feature (5)..(429): Homolog of NCBI NO: 15238439 NR Description: putative protein; protein id: At5g65380.1, by cDNA: gi_14030730 [Arabidopsis thaliana] emb|CAB89401.1~gene_id:MNA5.11~strong similarity to unknown
MAGRGGELTEALVKKTGREEEDELGMKEKVWIESKKLWVVAAPAIFTRYSTFGVSMVTQAFIGHLGPTELAAYSITFTILLRFSNGILLGMAGALGTLCGQAYGAKQYQMLGIYLQRSWIVLTGGTICLMPVFIFAGPILLALGQEERIVRVARVLALWVIGINFSFVPSFTCQMFLQAQSKNKIISYVTAVSLGLHVFFSWLLVAHFNFGITGAMTSMLIAFWLPIIVQLLYVTCGGCKDTWRGFSMLAFKDLWPVLKLSLSSGGMLCLELWYNSVLVLLTGNLKNAEVALDALAICISINALEMMIALGFLAAVSVRVSNELGSGNPKGAKFATLIAVFTGRISYIFTTSEAVAAEVADLSPLLAFSILLNSVQPVLSGVAIGAGWQGYVAYVNLACYYLVGIPIGVILGYVVGLQVKGVWIGMLFGIFVQTCVLTVMTLRTDWDQQVSTSLRNINRWVVPESRDANQISSEE

SEQ ID NO: 72648 - protein, 450 aa, Arabidopsis thaliana
  peptide (1)..(450): Ceres Seq. ID no. 4940879
  misc_feature: Pfam Name: MatE Pfam Description: MatE
  misc_feature (1)..(450): Homolog of NCBI NO: 15223394 NR Description: unknown protein; protein id: At1g33100.1
  misc_feature (1)..(450): Homolog of NCBI NO: 15223391 NR Description: hypothetical protein; protein id: At1g33090.1
  misc_feature (1)..(450): Homolog of NCBI NO: 15223402 NR Description: unknown protein; protein id: At1g33110.1, by cDNA: gi_17065359 [Arabidopsis thaliana] Unknown protein [Arabidopsis thaliana]
  misc_feature (1)..(450): Homolog of NCBI NO: 22329916 NR Description: hypothetical protein; protein id: At1g33080.1, by cDNA: gi_19423993 [Arabidopsis thaliana] unknown protein [Arabidopsis thaliana]
  misc_feature (1)..(450): Homolog of NCBI NO: 6910584 NR Description: CDS [Arabidopsis thaliana]
  misc_feature (117)..(429): Homolog of NCBI NO: 25518156 NR Description: T9L6.1 protein - Arabidopsis thaliana
  misc_feature (1)..(62): Homolog of NCBI NO: 25518156 NR Description: T9L6.1 protein - Arabidopsis thaliana
  misc_feature (1)..(367): Homolog of NCBI NO: 6910588 NR Description: CDS [Arabidopsis thaliana]
  misc_feature (1)..(424): Homolog of NCBI NO: 15238161 NR Description: putative protein; protein id: At5g10420.1
  misc_feature (1)..(404): Homolog of NCBI NO: 15238439 NR Description: putative protein; protein id: At5g65380.1, by cDNA: gi_14030730 [Arabidopsis thaliana] emb|CAB89401.1~gene_id:MNA5.11~strong similarity to unknown
MKEKVWIESKKLWVVAAPAIFTRYSTFGVSMVTQAFIGHLGPTELAAYSITFTILLRFSNGILLGMAGALGTLCGQAYGAKQYQMLGIYLQRSWIVLTGGTICLMPVFIFAGPILLALGQEERIVRVARVLALWVIGINFSFVPSFTCQMFLQAQSKNKIISYVTAVSLGLHVFFSWLLVAHFNFGITGAMTSMLIAFWLPIIVQLLYVTCGGCKDTWRGFSMLAFKDLWPVLKLSLSSGGMLCLELWYNSVLVLLTGNLKNAEVALDALAICISINALEMMIALGFLAAVSVRVSNELGSGNPKGAKFATLIAVFTGRISYIFTTSEAVAAEVADLSPLLAFSILLNSVQPVLSGVAIGAGWQGYVAYVNLACYYLVGIPIGVILGYVVGLQVKGVWIGMLFGIFVQTCVLTVMTLRTDWDQQVSTSLRNINRWVVPESRDANQISSEE

SEQ ID NO: 72649 - protein, 420 aa, Arabidopsis thaliana
  peptide (1)..(420): Ceres Seq. ID no. 4940880
  misc_feature: Pfam Name: MatE Pfam Description: MatE
  misc_feature (1)..(420): Homolog of NCBI NO: 15223394 NR Description: unknown protein; protein id: At1g33100.1
  misc_feature (1)..(420): Homolog of NCBI NO: 15223391 NR Description: hypothetical protein; protein id: At1g33090.1
  misc_feature (1)..(420): Homolog of NCBI NO: 15223402 NR Description: unknown protein; protein id: At1g33110.1, by cDNA: gi_17065359 [Arabidopsis thaliana] Unknown protein [Arabidopsis thaliana]
  misc_feature (1)..(420): Homolog of NCBI NO: 22329916 NR Description: hypothetical protein; protein id: At1g33080.1, by cDNA: gi_19423993 [Arabidopsis thaliana] unknown protein [Arabidopsis thaliana]
  misc_feature (1)..(420): Homolog of NCBI NO: 6910584 NR Description: CDS [Arabidopsis thaliana]
  misc_feature (87)..(399): Homolog of NCBI NO: 25518156 NR Description: T9L6.1 protein - Arabidopsis thaliana
  misc_feature (1)..(32): Homolog of NCBI NO: 25518156 NR Description: T9L6.1 protein - Arabidopsis thaliana
  misc_feature (1)..(337): Homolog of NCBI NO: 6910588 NR Description: CDS [Arabidopsis thaliana]
  misc_feature (1)..(394): Homolog of NCBI NO: 15238161 NR Description: putative protein; protein id: At5g10420.1
  misc_feature (1)..(374): Homolog of NCBI NO: 15238439 NR Description: putative protein; protein id: At5g65380.1, by cDNA: gi_14030730 [Arabidopsis thaliana] emb|CAB89401.1~gene_id:MNA5.11~strong similarity to unknown
MVTQAFIGHLGPTELAAYSITFTILLRFSNGILLGMAGALGTLCGQAYGAKQYQMLGIYLQRSWIVLTGGTICLMPVFIFAGPILLALGQEERIVRVARVLALWVIGINFSFVPSFTCQMFLQAQSKNKIISYVTAVSLGLHVFFSWLLVAHFNFGITGAMTSMLIAFWLPIIVQLLYVTCGGCKDTWRGFSMLAFKDLWPVLKLSLSSGGMLCLELWYNSVLVLLTGNLKNAEVALDALAICISINALEMMIALGFLAAVSVRVSNELGSGNPKGAKFATLIAVFTGRISYIFTTSEAVAAEVADLSPLLAFSILLNSVQPVLSGVAIGAGWQGYVAYVNLACYYLVGIPIGVILGYVVGLQVKGVWIGMLFGIFVQTCVLTVMTLRTDWDQQVSTSLRNINRWVVPESRDANQISSEE

SEQ ID NO: 72650 - DNA, 1200 bp, Arabidopsis thaliana
  misc_feature (1)..(1200): Ceres Seq. ID no. 4940912
  misc_feature: MA Experiment ID: 20000184 Result: Down-regulated in Transcription
  misc_feature: MA Experiment 20000184 PARAMETER Experiment Name: At_Shoots__P Parameter: Age (day) Value: 7
  misc_feature: MA Experiment 20000184 PARAMETER Experiment Name: At_Shoots__P Parameter: Tissue Value: Shoots vs. Whole Plant
  misc_feature: MA Experiment ID: 20000234 Result: Up-regulated in Transcription
  misc_feature: MA Experiment 20000234 PARAMETER Experiment Name: At_Siliques_P Parameter: Age (day) Value: 21
  misc_feature: MA Experiment 20000234 PARAMETER Experiment Name: At_Siliques_P Parameter: Organism Value: A. thaliana
  misc_feature: MA Experiment 20000234 PARAMETER Experiment Name: At_Siliques_P Parameter: Plant Line Value: WS
  misc_feature: MA Experiment 20000234 PARAMETER Experiment Name: At_Siliques_P Parameter: Tissue Value: Less Than 5mm Siliques vs. Whole Plant
  misc_feature: MA Experiment ID: 20000495 Result: Up-regulated in Transcription
  misc_feature: MA Experiment 20000495 PARAMETER Experiment Name: At_Guard_Cells_P Parameter: Harvest Date Value: 8/2/2002
  misc_feature: MA Experiment 20000495 PARAMETER Experiment Name: At_Guard_Cells_P Parameter: Organism Value: A. thaliana
  misc_feature: MA Experiment 20000495 PARAMETER Experiment Name: At_Guard_Cells_P Parameter: Tissue Value: Guard Cells vs. Leaves
atgggaatgggaaggtatcagaaatctgcaacttctggtgtttcagctagatgggtttttgttctctgtatttctagcttccttcttggtgttcttgtcgttaacaggcttttggcaagttttgaaaccgtagatggcattgagagagcttcacctgagcaaaatgatcaatctagatcacttaatcctcttgttgattgtgagagcaaggaaggagacattctatctcgagtttcgcatactcatgatgttatcaagacattagacaagacaatttcttctcttgaggtagaactagctacagctcgagcagcaagatctgatggtagagatggatctccagctgttgcaaaaacagtagcagaccaatcgaagattcggcctcggatgttctttgtgatgggaatcatgactgctttcagtagcagaaaacgaagagactccataagaggaacttggcttcctaaaggggatgaattgaaaagattagagacagagaagggaatcattatgagatttgttataggtcacagttcttctcctggaggagtcttggaccacaccattgaagctgaagaagaacaacacaaagacttctttcgactgaatcacatagaaggttatcatgaattatcatctaaaacccaaatatacttctcatctgctgttgcaaaatgggatgcagacttctacatcaaagtggatgatgatgttcacgtaaatctcggaatgcttggttctacattggctcgccacagatcaaaaccgcgagtgtacattggttgcatgaagtctggacctgtccttgctcaaaaaggagtcaaataccatgagccagaatattggaagtttggtgaagaaggaaacaaatacttcagacatgcaactggacaaatctatgcaatctccaaagatttagcaacttatatctcagttaaccggcaactacttcacaagtatgcaaatgaagatgtctctttaggttcttggttcattggtctcgatgttgaacatatcgacgatagaagcctctgctgtggaacacctttagattgtgagtggaagggtcaagcaggaaacccttgcgcagcatcgttcgattggagctgtagtggaatctgcaaatccgtagatagaatgcttgaagtacatcaacgttgtggtgaaggcgatggagcaatttggcatagtagtttctaa

SEQ ID NO: 72651 - protein, 399 aa, Arabidopsis thaliana
  peptide (1)..(399): Ceres Seq. ID no. 4940913
  misc_feature (144)..(342): Pfam Name: Galactosyltransferase Pfam Description: Galactosyltransferase
  misc_feature (1)..(399): Homolog of NCBI NO: 15223337 NR Description: Avr9 elicitor response protein, putative; protein At1g32930.1 [Arabidopsis thaliana] >gi|25370618|pir||H86453 avr9
  misc_feature (4)..(399): Homolog of NCBI NO: 15220440 NR Description: putative AVR9 elicitor response protein; protein At1g05170.1, supported by cDNA: gi_14488077 [Arabidopsis
  misc_feature (9)..(399): Homolog of NCBI NO: 18416895 NR Description: Avr9 elicitor response like protein; protein id:
  misc_feature (9)..(399): Homolog of NCBI NO: 7485336 NR Description: hypothetical protein F10M23.280 - Arabidopsis >gi|4455217|emb|CAB36540.1| Avr9 elicitor response like protein thaliana] >gi|7269547|emb|CAB79549.1| Avr9 elicitor response like
  misc_feature (14)..(399): Homolog of NCBI NO: 4138265 NR Description: Avr9 elicitor response protein [Nicotiana tabacum]
  misc_feature (14)..(399): Homolog of NCBI NO: 15225684 NR Description: unknown protein; protein id: At2g32430.1
  misc_feature (15)..(391): Homolog of NCBI NO: 15217544 NR Description: elicitor response protein, putative; protein id: [Arabidopsis thaliana] >gi|25370623|pir||A86458 probasble
  misc_feature (14)..(397): Homolog of NCBI NO: 12323294 NR Description: putative (Avr9) elicitor response protein;
  misc_feature (19)..(395): Homolog of NCBI NO: 34907342 NR Description: putative elicitor response protein [Oryza sativa
  misc_feature (14)..(397): Homolog of NCBI NO: 30699558 NR Description: Avr9 elicitor response protein -related
MGMGRYQKSATSGVSARWVFVLCISSFLLGVLVVNRLLASFETVDGIERASPEQNDQSRSLNPLVDCESKEGDILSRVSHTHDVIKTLDKTISSLEVELATARAARSDGRDGSPAVAKTVADQSKIRPRMFFVMGIMTAFSSRKRRDSIRGTWLPKGDELKRLETEKGIIMRFVIGHSSSPGGVLDHTIEAEEEQHKDFFRLNHIEGYHELSSKTQIYFSSAVAKWDADFYIKVDDDVHVNLGMLGSTLARHRSKPRVYIGCMKSGPVLAQKGVKYHEPEYWKFGEEGNKYFRHATGQIYAISKDLATYISVNRQLLHKYANEDVSLGSWFIGLDVEHIDDRSLCCGTPLDCEWKGQAGNPCAASFDWSCSGICKSVDRMLEVHQRCGEGDGAIWHSSF

SEQ ID NO: 72652 - protein, 397 aa, Arabidopsis thaliana
  peptide (1)..(397): Ceres Seq. ID no. 4940914
  misc_feature (142)..(340): Pfam Name: Galactosyltransferase Pfam Description: Galactosyltransferase
  misc_feature (1)..(397): Homolog of NCBI NO: 15223337 NR Description: Avr9 elicitor response protein, putative; protein At1g32930.1 [Arabidopsis thaliana] >gi|25370618|pir||H86453 avr9
  misc_feature (2)..(397): Homolog of NCBI NO: 15220440 NR Description: putative AVR9 elicitor response protein; protein At1g05170.1, supported by cDNA: gi_14488077 [Arabidopsis
  misc_feature (7)..(397): Homolog of NCBI NO: 18416895 NR Description: Avr9 elicitor response like protein; protein id:
  misc_feature (7)..(397): Homolog of NCBI NO: 7485336 NR Description: hypothetical protein F10M23.280 - Arabidopsis >gi|4455217|emb|CAB36540.1| Avr9 elicitor response like protein thaliana] >gi|7269547|emb|CAB79549.1| Avr9 elicitor response like
  misc_feature (12)..(397): Homolog of NCBI NO: 4138265 NR Description: Avr9 elicitor response protein [Nicotiana tabacum]
  misc_feature (12)..(397): Homolog of NCBI NO: 15225684 NR Description: unknown protein; protein id: At2g32430.1
  misc_feature (13)..(389): Homolog of NCBI NO: 15217544 NR Description: elicitor response protein, putative; protein id: [Arabidopsis thaliana] >gi|25370623|pir||A86458 probasble
  misc_feature (12)..(395): Homolog of NCBI NO: 12323294 NR Description: putative (Avr9) elicitor response protein;
  misc_feature (17)..(393): Homolog of NCBI NO: 34907342 NR Description: putative elicitor response protein [Oryza sativa
  misc_feature (12)..(395): Homolog of NCBI NO: 30699558 NR Description: Avr9 elicitor response protein -related
MGRYQKSATSGVSARWVFVLCISSFLLGVLVVNRLLASFETVDGIERASPEQNDQSRSLNPLVDCESKEGDILSRVSHTHDVIKTLDKTISSLEVELATARAARSDGRDGSPAVAKTVADQSKIRPRMFFVMGIMTAFSSRKRRDSIRGTWLPKGDELKRLETEKGIIMRFVIGHSSSPGGVLDHTIEAEEEQHKDFFRLNHIEGYHELSSKTQIYFSSAVAKWDADFYIKVDDDVHVNLGMLGSTLARHRSKPRVYIGCMKSGPVLAQKGVKYHEPEYWKFGEEGNKYFRHATGQIYAISKDLATYISVNRQLLHKYANEDVSLGSWFIGLDVEHIDDRSLCCGTPLDCEWKGQAGNPCAASFDWSCSGICKSVDRMLEVHQRCGEGDGAIWHSSF

SEQ ID NO: 72653 - protein, 270 aa, Arabidopsis thaliana
  peptide (1)..(270): Ceres Seq. ID no. 4940915
  misc_feature (15)..(213): Pfam Name: Galactosyltransferase Pfam Description: Galactosyltransferase
  misc_feature (1)..(270): Homolog of NCBI NO: 15223337 NR Description: Avr9 elicitor response protein, putative; protein At1g32930.1 [Arabidopsis thaliana] >gi|25370618|pir||H86453 avr9
  misc_feature (1)..(270): Homolog of NCBI NO: 15220440 NR Description: putative AVR9 elicitor response protein; protein At1g05170.1, supported by cDNA: gi_14488077 [Arabidopsis
  misc_feature (1)..(270): Homolog of NCBI NO: 18416895 NR Description: Avr9 elicitor response like protein; protein id:
  misc_feature (1)..(270): Homolog of NCBI NO: 7485336 NR Description: hypothetical protein F10M23.280 - Arabidopsis >gi|4455217|emb|CAB36540.1| Avr9 elicitor response like protein thaliana] >gi|7269547|emb|CAB79549.1| Avr9 elicitor response like
  misc_feature (1)..(270): Homolog of NCBI NO: 4138265 NR Description: Avr9 elicitor response protein [Nicotiana tabacum]
  misc_feature (1)..(270): Homolog of NCBI NO: 15225684 NR Description: unknown protein; protein id: At2g32430.1
  misc_feature (1)..(262): Homolog of NCBI NO: 15217544 NR Description: elicitor response protein, putative; protein id: [Arabidopsis thaliana] >gi|25370623|pir||A86458 probasble
  misc_feature (1)..(268): Homolog of NCBI NO: 12323294 NR Description: putative (Avr9) elicitor response protein;
  misc_feature (1)..(266): Homolog of NCBI NO: 34907342 NR Description: putative elicitor response protein [Oryza sativa
  misc_feature (1)..(268): Homolog of NCBI NO: 30699558 NR Description: Avr9 elicitor response protein -related
MFFVMGIMTAFSSRKRRDSIRGTWLPKGDELKRLETEKGIIMRFVIGHSSSPGGVLDHTIEAEEEQHKDFFRLNHIEGYHELSSKTQIYFSSAVAKWDADFYIKVDDDVHVNLGMLGSTLARHRSKPRVYIGCMKSGPVLAQKGVKYHEPEYWKFGEEGNKYFRHATGQIYAISKDLATYISVNRQLLHKYANEDVSLGSWFIGLDVEHIDDRSLCCGTPLDCEWKGQAGNPCAASFDWSCSGICKSVDRMLEVHQRCGEGDGAIWHSSF

SEQ ID NO: 72654 - DNA, 2985 bp, Arabidopsis thaliana
  misc_feature (1)..(2985): Ceres Seq. ID no. 4942550
  misc_feature: MA Experiment ID: 20000184 Result: Down-regulated in Transcription
  misc_feature: MA Experiment 20000184 PARAMETER Experiment Name: At_Shoots__P Parameter: Age (day) Value: 7
  misc_feature: MA Experiment 20000184 PARAMETER Experiment Name: At_Shoots__P Parameter: Tissue Value: Shoots vs. Whole Plant
atgaaggccatggagactatacaggatctgatcgaagaagctaaagtacgagccgtatggtggtgcttgtgcatcttctccgtcacctatttcttgacccatacaagtatctattggtggctgaatttgccaattgcaatcctcatttgtggcggtgcgcggtttttttttaaccattttgagttcagatggaaagttccggcgactcctaggcagagtcagttgtcttatcttgagaagaagcagttgtctgtgaatgatccacgtctttctggtatcccacctcctccaaggtggaagaagaaaatagattctcctgttgtggaagctgcgattaatgattttattgacaagatccttaatgatttcgtggtgaatttgtggtactctttgattactcctgataaagaagcgcctgaacttatacgtgcagtgatcatggatgctcttggtgagatttcagttagggtgaaagagatcaatattgttgacttgttaaccagggatatagttgatctgataggtgatcatttggaaagttttagaagaaaccaagctgctataggtactgatgtgatgaaaactttgtcatctgaggagagagatgaaagattgaaataccatcttatggcttctggggaactctatcctgcactcgtgtcacctgagagtgaatacaaggttcttcagaaaatagttgctggcatattatctgtggttctcagaccacgagaagctcagtgccctcttgttcgaacaatagctagagagattgttacttgcttggtaattcaacctcttttgaatttagcatgccccgagcgtatcaatgaagtgtttgagatcattatcaatcttattaaagaaggaaactttgagcagtttacggcggaagagcagaatgtaaattctgccccattgtcagccttcgatagtcaagcaaaaaatatgaatttgacaaaagctattgagcagaaatcaccaaacataaatgacagacacccagatctacacgttcaacagcactctgctgattgggctcggtcgctagaggttgcgacgcaaaggagaacagaggttcttagacctgaaaaccttgaaaacatgtggacgaaaggaaggaactatcaaaagaaggagtacaaaaaatctctgaaaaagggttcttctactggagcaaaagaaaacgcagtggcgcagttaccccctaaagtgagcactgataagcagtcacaagcacagatggctgaggaatttagtaaatcatctttacatgatggagggcaccagatttatgaggctgatgttagaaaggaatctcgttcagatggaaataaaaataggcttaaaagatccaatagtacatcagatcttaatctacgtcctgaaacgagtctagcactcttaggagtcagtgaggggccgctaatcacagaattttacaccacagattttatcaagcacaatgataactacataagtgataataaatcccaaagcattgttcttcacaaagagggtcagcactgcctgaagctcaaatgtcgcgttcttggagcttattttgagaagcaaggatcaaaatcatttgcagtatattctattgcggtgacagatgtggaaaacaaaacttggtttgttaagagaagatacagtaattttgagcgattacatcgtcaactcaaagaaatcccgaactacaatttacagttgcctcccaagcgtattttctcatcaagcaccgaagatgcttttgttcatcgtcgctgtattcagctggacaagtatctacaagatctcttgtgtatagctaatgttgctgaacagcatgaagtttgggattttctaagcgcagcctctaagaattattcttttggaaagtcttcatcagtgatgaaaactcttgcagtcaatgttgatgatgccatggacgatattgtacgtcagttcaaaggtgtctcagatggccttatgcgcaaggttgtaggatctccacttgatgaacatgatcatgctcctacccgccacctctcctggagtgtaaatgaaataagcactcagctctctagggaaagcgcaactgaatctatgcacagcagcatttctgatactgaagacatcgacaaacttggagagaacactcaaggggaaggtagatttgattcagaagccaatgggtggcactcagataatgaattggactctaagtatgttccaccgagagtggttagacgtcttggagagcctgagagttcgccctcagagaaggaaaatgattttaaggcaaaatctcaagttagggggtccaccgattttcagcatgctgatccattgacagctttagtccaaaatccccatggcatacccgagtggatgccacccaatgtcagtgtgccaattttgaacttagttgataaagtgtttcagttaaatagaagaggttggttaaggaggcaagttttctggatatcaaagcaaatattacaattagttatggaagatgctgtggatgacttgctcatgagggagatatgttggctgcggaatgaagacacaattgctcaaggaattcgttgggctcaagatattctatggccaaatggtgtattctttaccagattgaatgatagtcaagaggcatcagatgagaccgaccctagtgaaaaaacttaccaaatggcaggccaacttggtggcatgaaggtgactaaacccagttcctttgagcagcaactcgaggcttttcgtagagctagtgaaataaaaaaattccttttcgatggcgccccaacagccttagtgagtttggtagggcacaatcagtacaggagatgtgcaagagacattttctatttcactcagtcaaacatatgcataaagcaactcacatttgcaatactggagctgctactccgatcggtattccccgagctgcaagatcttctaagagacataagggagaatccgcaaggtcggtcagagtaa

SEQ ID NO: 72655 - protein, 994 aa, Arabidopsis thaliana
  peptide (1)..(994): Ceres Seq. ID no. 4942551
  misc_feature (105)..(291): Pfam Name: PXA domain Pfam Description: PXA domain
  misc_feature (2)..(356): Homolog of NCBI NO: 25518623 NR Description: hypothetical protein F9L1.19 [imported] - thaliana >gi|5103823|gb|AAD39653.1|AC007591_18 Contains PF|00787
  misc_feature (512)..(742): Homolog of NCBI NO: 25518623 NR Description: hypothetical protein F9L1.19 [imported] - thaliana >gi|5103823|gb|AAD39653.1|AC007591_18 Contains PF|00787
  misc_feature (330)..(423): Homolog of NCBI NO: 25518623 NR Description: hypothetical protein F9L1.19 [imported] - thaliana >gi|5103823|gb|AAD39653.1|AC007591_18 Contains PF|00787
  misc_feature (2)..(356): Homolog of NCBI NO: 30684254 NR Description: expressed protein [Arabidopsis thaliana] unknown protein [Arabidopsis thaliana]
  misc_feature (330)..(423): Homolog of NCBI NO: 30684254 NR Description: expressed protein [Arabidopsis thaliana] unknown protein [Arabidopsis thaliana]
  misc_feature (512)..(598): Homolog of NCBI NO: 30684254 NR Description: expressed protein [Arabidopsis thaliana] unknown protein [Arabidopsis thaliana]
  misc_feature (743)..(889): Homolog of NCBI NO: 25518623 NR Description: hypothetical protein F9L1.19 [imported] - thaliana >gi|5103823|gb|AAD39653.1|AC007591_18 Contains PF|00787
  misc_feature (77)..(331): Homolog of NCBI NO: 38614111 NR Description: Unknown (protein for MGC:73414) [Mus musculus]
  misc_feature (741)..(869): Homolog of NCBI NO: 38614111 NR Description: Unknown (protein for MGC:73414) [Mus musculus]
  misc_feature (77)..(331): Homolog of NCBI NO: 3882147 NR Description: KIAA0713 protein [Homo sapiens]
MKAMETIQDLIEEAKVRAVWWCLCIFSVTYFLTHTSIYWWLNLPIAILICGGARFFFNHFEFRWKVPATPRQSQLSYLEKKQLSVNDPRLSGIPPPPRWKKKIDSPVVEAAINDFIDKILNDFVVNLWYSLITPDKEAPELIRAVIMDALGEISVRVKEINIVDLLTRDIVDLIGDHLESFRRNQAAIGTDVMKTLSSEERDERLKYHLMASGELYPALVSPESEYKVLQKIVAGILSVVLRPREAQCPLVRTIAREIVTCLVIQPLLNLACPERINEVFEIIINLIKEGNFEQFTAEEQNVNSAPLSAFDSQAKNMNLTKAIEQKSPNINDRHPDLHVQQHSADWARSLEVATQRRTEVLRPENLENMWTKGRNYQKKEYKKSLKKGSSTGAKENAVAQLPPKVSTDKQSQAQMAEEFSKSSLHDGGHQIYEADVRKESRSDGNKNRLKRSNSTSDLNLRPETSLALLGVSEGPLITEFYTTDFIKHNDNYISDNKSQSIVLHKEGQHCLKLKCRVLGAYFEKQGSKSFAVYSIAVTDVENKTWFVKRRYSNFERLHRQLKEIPNYNLQLPPKRIFSSSTEDAFVHRRCIQLDKYLQDLLCIANVAEQHEVWDFLSAASKNYSFGKSSSVMKTLAVNVDDAMDDIVRQFKGVSDGLMRKVVGSPLDEHDHAPTRHLSWSVNEISTQLSRESATESMHSSISDTEDIDKLGENTQGEGRFDSEANGWHSDNELDSKYVPPRVVRRLGEPESSPSEKENDFKAKSQVRGSTDFQHADPLTALVQNPHGIPEWMPPNVSVPILNLVDKVFQLNRRGWLRRQVFWISKQILQLVMEDAVDDLLMREICWLRNEDTIAQGIRWAQDILWPNGVFFTRLNDSQEASDETDPSEKTYQMAGQLGGMKVTKPSSFEQQLEAFRRASEIKKFLFDGAPTALVSLVGHNQYRRCARDIFYFTQSNICIKQLTFAILELLLRSVFPELQDLLRDIRENPQGRSE

SEQ ID NO: 72656 - protein, 991 aa, Arabidopsis thaliana
  peptide (1)..(991): Ceres Seq. ID no. 4942552
  misc_feature (102)..(288): Pfam Name: PXA domain Pfam Description: PXA domain
  misc_feature (1)..(353): Homolog of NCBI NO: 25518623 NR Description: hypothetical protein F9L1.19 [imported] - thaliana >gi|5103823|gb|AAD39653.1|AC007591_18 Contains PF|00787
  misc_feature (509)..(739): Homolog of NCBI NO: 25518623 NR Description: hypothetical protein F9L1.19 [imported] - thaliana >gi|5103823|gb|AAD39653.1|AC007591_18 Contains PF|00787
  misc_feature (327)..(420): Homolog of NCBI NO: 25518623 NR Description: hypothetical protein F9L1.19 [imported] - thaliana >gi|5103823|gb|AAD39653.1|AC007591_18 Contains PF|00787
  misc_feature (1)..(353): Homolog of NCBI NO: 30684254 NR Description: expressed protein [Arabidopsis thaliana] unknown protein [Arabidopsis thaliana]
  misc_feature (327)..(420): Homolog of NCBI NO: 30684254 NR Description: expressed protein [Arabidopsis thaliana] unknown protein [Arabidopsis thaliana]
  misc_feature (509)..(595): Homolog of NCBI NO: 30684254 NR Description: expressed protein [Arabidopsis thaliana] unknown protein [Arabidopsis thaliana]
  misc_feature (740)..(886): Homolog of NCBI NO: 25518623 NR Description: hypothetical protein F9L1.19 [imported] - thaliana >gi|5103823|gb|AAD39653.1|AC007591_18 Contains PF|00787
  misc_feature (74)..(328): Homolog of NCBI NO: 38614111 NR Description: Unknown (protein for MGC:73414) [Mus musculus]
  misc_feature (738)..(866): Homolog of NCBI NO: 38614111 NR Description: Unknown (protein for MGC:73414) [Mus musculus]
  misc_feature (74)..(328): Homolog of NCBI NO: 3882147 NR Description: KIAA0713 protein [Homo sapiens]
METIQDLIEEAKVRAVWWCLCIFSVTYFLTHTSIYWWLNLPIAILICGGARFFFNHFEFRWKVPATPRQSQLSYLEKKQLSVNDPRLSGIPPPPRWKKKIDSPVVEAAINDFIDKILNDFVVNLWYSLITPDKEAPELIRAVIMDALGEISVRVKEINIVDLLTRDIVDLIGDHLESFRRNQAAIGTDVMKTLSSEERDERLKYHLMASGELYPALVSPESEYKVLQKIVAGILSVVLRPREAQCPLVRTIAREIVTCLVIQPLLNLACPERINEVFEIIINLIKEGNFEQFTAEEQNVNSAPLSAFDSQAKNMNLTKAIEQKSPNINDRHPDLHVQQHSADWARSLEVATQRRTEVLRPENLENMWTKGRNYQKKEYKKSLKKGSSTGAKENAVAQLPPKVSTDKQSQAQMAEEFSKSSLHDGGHQIYEADVRKESRSDGNKNRLKRSNSTSDLNLRPETSLALLGVSEGPLITEFYTTDFIKHNDNYISDNKSQSIVLHKEGQHCLKLKCRVLGAYFEKQGSKSFAVYSIAVTDVENKTWFVKRRYSNFERLHRQLKEIPNYNLQLPPKRIFSSSTEDAFVHRRCIQLDKYLQDLLCIANVAEQHEVWDFLSAASKNYSFGKSSSVMKTLAVNVDDAMDDIVRQFKGVSDGLMRKVVGSPLDEHDHAPTRHLSWSVNEISTQLSRESATESMHSSISDTEDIDKLGENTQGEGRFDSEANGWHSDNELDSKYVPPRVVRRLGEPESSPSEKENDFKAKSQVRGSTDFQHADPLTALVQNPHGIPEWMPPNVSVPILNLVDKVFQLNRRGWLRRQVFWISKQILQLVMEDAVDDLLMREICWLRNEDTIAQGIRWAQDILWPNGVFFTRLNDSQEASDETDPSEKTYQMAGQLGGMKVTKPSSFEQQLEAFRRASEIKKFLFDGAPTALVSLVGHNQYRRCARDIFYFTQSNICIKQLTFAILELLLRSVFPELQDLLRDIRENPQGRSE

SEQ ID NO: 72657 - protein, 848 aa, Arabidopsis thaliana
  peptide (1)..(848): Ceres Seq. ID no. 4942553
  misc_feature (1)..(145): Pfam Name: PXA domain Pfam Description: PXA domain
  misc_feature (1)..(210): Homolog of NCBI NO: 25518623 NR Description: hypothetical protein F9L1.19 [imported] - thaliana >gi|5103823|gb|AAD39653.1|AC007591_18 Contains PF|00787
  misc_feature (366)..(596): Homolog of NCBI NO: 25518623 NR Description: hypothetical protein F9L1.19 [imported] - thaliana >gi|5103823|gb|AAD39653.1|AC007591_18 Contains PF|00787
  misc_feature (184)..(277): Homolog of NCBI NO: 25518623 NR Description: hypothetical protein F9L1.19 [imported] - thaliana >gi|5103823|gb|AAD39653.1|AC007591_18 Contains PF|00787
  misc_feature (1)..(210): Homolog of NCBI NO: 30684254 NR Description: expressed protein [Arabidopsis thaliana] unknown protein [Arabidopsis thaliana]
  misc_feature (184)..(277): Homolog of NCBI NO: 30684254 NR Description: expressed protein [Arabidopsis thaliana] unknown protein [Arabidopsis thaliana]
  misc_feature (366)..(452): Homolog of NCBI NO: 30684254 NR Description: expressed protein [Arabidopsis thaliana] unknown protein [Arabidopsis thaliana]
  misc_feature (597)..(743): Homolog of NCBI NO: 25518623 NR Description: hypothetical protein F9L1.19 [imported] - thaliana >gi|5103823|gb|AAD39653.1|AC007591_18 Contains PF|00787
  misc_feature (1)..(185): Homolog of NCBI NO: 38614111 NR Description: Unknown (protein for MGC:73414) [Mus musculus]
  misc_feature (595)..(723): Homolog of NCBI NO: 38614111 NR Description: Unknown (protein for MGC:73414) [Mus musculus]
  misc_feature (1)..(185): Homolog of NCBI NO: 3882147 NR Description: KIAA0713 protein [Homo sapiens]
MDALGEISVRVKEINIVDLLTRDIVDLIGDHLESFRRNQAAIGTDVMKTLSSEERDERLKYHLMASGELYPALVSPESEYKVLQKIVAGILSVVLRPREAQCPLVRTIAREIVTCLVIQPLLNLACPERINEVFEIIINLIKEGNFEQFTAEEQNVNSAPLSAFDSQAKNMNLTKAIEQKSPNINDRHPDLHVQQHSADWARSLEVATQRRTEVLRPENLENMWTKGRNYQKKEYKKSLKKGSSTGAKENAVAQLPPKVSTDKQSQAQMAEEFSKSSLHDGGHQIYEADVRKESRSDGNKNRLKRSNSTSDLNLRPETSLALLGVSEGPLITEFYTTDFIKHNDNYISDNKSQSIVLHKEGQHCLKLKCRVLGAYFEKQGSKSFAVYSIAVTDVENKTWFVKRRYSNFERLHRQLKEIPNYNLQLPPKRIFSSSTEDAFVHRRCIQLDKYLQDLLCIANVAEQHEVWDFLSAASKNYSFGKSSSVMKTLAVNVDDAMDDIVRQFKGVSDGLMRKVVGSPLDEHDHAPTRHLSWSVNEISTQLSRESATESMHSSISDTEDIDKLGENTQGEGRFDSEANGWHSDNELDSKYVPPRVVRRLGEPESSPSEKENDFKAKSQVRGSTDFQHADPLTALVQNPHGIPEWMPPNVSVPILNLVDKVFQLNRRGWLRRQVFWISKQILQLVMEDAVDDLLMREICWLRNEDTIAQGIRWAQDILWPNGVFFTRLNDSQEASDETDPSEKTYQMAGQLGGMKVTKPSSFEQQLEAFRRASEIKKFLFDGAPTALVSLVGHNQYRRCARDIFYFTQSNICIKQLTFAILELLLRSVFPELQDLLRDIRENPQGRSE

SEQ ID NO: 72658 - DNA, 633 bp, Arabidopsis thaliana
  misc_feature (1)..(633): Ceres Seq. ID no. 4942847
  misc_feature: MA Experiment ID: 108434 Result: Down-regulated in Transcription
  misc_feature: MA Experiment 108434 PARAMETER Experiment Name: At_Root_Tips_cDNA_P Parameter: Tissue Value: Root Tips
  misc_feature: MA Experiment ID: 108489 Result: Down-regulated in Transcription
  misc_feature: MA Experiment ID: 108501 Result: Down-regulated in Transcription
  misc_feature: MA Experiment 108501 PARAMETER Experiment Name: At_ap2_floral_buds_cDNA_P Parameter: Plant Line Value: ap2 (Ler.)
  misc_feature: MA Experiment 108501 PARAMETER Experiment Name: At_ap2_floral_buds_cDNA_P Parameter: Tissue Value: Closed Flower
  misc_feature: MA Experiment ID: 108574 Result: Down-regulated in Transcription
  misc_feature: MA Experiment 108574 PARAMETER Experiment Name: At_Wounding__cDNA_P Parameter: Timepoint (hr) Value: 1
  misc_feature: MA Experiment 108574 PARAMETER Experiment Name: At_Wounding__cDNA_P Parameter: Tissue Value: Aerial
  misc_feature: MA Experiment 108574 PARAMETER Experiment Name: At_Wounding__cDNA_P Parameter: Treatment Value: Wounding vs. No Wounding
  misc_feature: MA Experiment ID: 108579 Result: Down-regulated in Transcription
  misc_feature: MA Experiment 108579 PARAMETER Experiment Name: At_4deg_Cold_cDNA_P Parameter: Temperature (deg C) Value: 4 vs. 22
  misc_feature: MA Experiment 108579 PARAMETER Experiment Name: At_4deg_Cold_cDNA_P Parameter: Timepoint (hr) Value: 6
  misc_feature: MA Experiment 108579 PARAMETER Experiment Name: At_4deg_Cold_cDNA_P Parameter: Tissue Value: Aerial
  misc_feature: MA Experiment ID: 108595 Result: Up-regulated in Transcription
  misc_feature: MA Experiment 108595 PARAMETER Experiment Name: At_Ler-pi_Ovule_cDNA_P Parameter: Plant Line Value: null
  misc_feature: MA Experiment ID: 108607 Result: Down-regulated in Transcription
  misc_feature: MA Experiment 108607 PARAMETER Experiment Name: At_100uM_ABA_cDNA_P Parameter: Timepoint (hr) Value: 4
  misc_feature: MA Experiment 108607 PARAMETER Experiment Name: At_100uM_ABA_cDNA_P Parameter: Tissue Value: Aerial
  misc_feature: MA Experiment 108607 PARAMETER Experiment Name: At_100uM_ABA_cDNA_P Parameter: Treatment Value: 100uM ABA vs. No Treatment
  misc_feature: MA Experiment ID: 20000113 Result: Down-regulated in Transcription
  misc_feature: MA Experiment 20000113 PARAMETER Experiment Name: At_42deg_Heat_cDNA_P Parameter: Temperature (deg C) Value: 42 vs. 22
  misc_feature: MA Experiment 20000113 PARAMETER Experiment Name: At_42deg_Heat_cDNA_P Parameter: Timepoint (hr) Value: 8
  misc_feature: MA Experiment 20000113 PARAMETER Experiment Name: At_42deg_Heat_cDNA_P Parameter: Tissue Value: Aerial
  misc_feature: MA Experiment ID: 20000224 Result: Down-regulated in Transcription
  misc_feature: MA Experiment ID: 20000265 Result: Down-regulated in Transcription
  misc_feature: MA Experiment 20000265 PARAMETER Experiment Name: At_Open_Flower_P Parameter: Age (day) Value: 21
  misc_feature: MA Experiment 20000265 PARAMETER Experiment Name: At_Open_Flower_P Parameter: Plant Line Value: WS
  misc_feature: MA Experiment 20000265 PARAMETER Experiment Name: At_Open_Flower_P Parameter: Tissue Value: Closed Flower vs. Whole Plant
  misc_feature: MA Experiment ID: 20000438 Result: Down-regulated in Transcription
  misc_feature: MA Experiment 20000438 PARAMETER Experiment Name: At_Shoots__P Parameter: Age (day) Value: 14
  misc_feature: MA Experiment 20000438 PARAMETER Experiment Name: At_Shoots__P Parameter: Tissue Value: Shoots vs. Whole Plant
  misc_feature: MA Experiment ID: 20000794 Result: Up-regulated in Transcription
  misc_feature: MA Experiment 20000794 PARAMETER Experiment Name: At_Petals_P Parameter: Age (day) Value: 23-25 days
  misc_feature: MA Experiment 20000794 PARAMETER Experiment Name: At_Petals_P Parameter: Plant Line Value: WS
  misc_feature: MA Experiment 20000794 PARAMETER Experiment Name: At_Petals_P Parameter: Tissue Value: Petals vs. Whole plant
  misc_feature: MA Experiment ID: 20001555 Result: Down-regulated in Transcription
  misc_feature: MA Experiment 20001555 PARAMETER Experiment Name: At_Drought_Soil_Dry_P Parameter: Age (day) Value: 24
  misc_feature: MA Experiment 20001555 PARAMETER Experiment Name: At_Drought_Soil_Dry_P Parameter: Organism Value: A. thaliana
  misc_feature: MA Experiment 20001555 PARAMETER Experiment Name: At_Drought_Soil_Dry_P Parameter: Plant Line Value: WS
  misc_feature: MA Experiment 20001555 PARAMETER Experiment Name: At_Drought_Soil_Dry_P Parameter: Post Timepoint (hr) Value: None
  misc_feature: MA Experiment 20001555 PARAMETER Experiment Name: At_Drought_Soil_Dry_P Parameter: Post-Treatment Value: None
  misc_feature: MA Experiment 20001555 PARAMETER Experiment Name: At_Drought_Soil_Dry_P Parameter: Timepoint (day) Value: 10
  misc_feature: MA Experiment 20001555 PARAMETER Experiment Name: At_Drought_Soil_Dry_P Parameter: Treatment Value: Drought vs. No Drought
  misc_feature: MA Experiment ID: 20001556 Result: Down-regulated in Transcription
  misc_feature: MA Experiment 20001556 PARAMETER Experiment Name: At_Drought_Soil_Dry_P Parameter: Age (day) Value: 26
  misc_feature: MA Experiment 20001556 PARAMETER Experiment Name: At_Drought_Soil_Dry_P Parameter: Organism Value: A. thaliana
  misc_feature: MA Experiment 20001556 PARAMETER Experiment Name: At_Drought_Soil_Dry_P Parameter: Plant Line Value: WS
  misc_feature: MA Experiment 20001556 PARAMETER Experiment Name: At_Drought_Soil_Dry_P Parameter: Post Timepoint (hr) Value: None
  misc_feature: MA Experiment 20001556 PARAMETER Experiment Name: At_Drought_Soil_Dry_P Parameter: Post-Treatment Value: None
  misc_feature: MA Experiment 20001556 PARAMETER Experiment Name: At_Drought_Soil_Dry_P Parameter: Timepoint (day) Value: 12
  misc_feature: MA Experiment 20001556 PARAMETER Experiment Name: At_Drought_Soil_Dry_P Parameter: Treatment Value: Drought vs. No Drought
  misc_feature: MA Experiment ID: 20001558 Result: Down-regulated in Transcription
  misc_feature: MA Experiment 20001558 PARAMETER Experiment Name: At_Drought_Soil_Dry_P Parameter: Age (day) Value: 27
  misc_feature: MA Experiment 20001558 PARAMETER Experiment Name: At_Drought_Soil_Dry_P Parameter: Organism Value: A. thaliana
  misc_feature: MA Experiment 20001558 PARAMETER Experiment Name: At_Drought_Soil_Dry_P Parameter: Plant Line Value: WS
  misc_feature: MA Experiment 20001558 PARAMETER Experiment Name: At_Drought_Soil_Dry_P Parameter: Post Timepoint (hr) Value: 6
  misc_feature: MA Experiment 20001558 PARAMETER Experiment Name: At_Drought_Soil_Dry_P Parameter: Post-Treatment Value: Re-Water vs. No Drought
  misc_feature: MA Experiment 20001558 PARAMETER Experiment Name: At_Drought_Soil_Dry_P Parameter: Timepoint (day) Value: 13
  misc_feature: MA Experiment 20001558 PARAMETER Experiment Name: At_Drought_Soil_Dry_P Parameter: Treatment Value: Drought vs. No Drought
  misc_feature: MA Experiment ID: 20001559 Result: Down-regulated in Transcription
  misc_feature: MA Experiment 20001559 PARAMETER Experiment Name: At_Drought_Soil_Dry_P Parameter: Age (day) Value: 28
  misc_feature: MA Experiment 20001559 PARAMETER Experiment Name: At_Drought_Soil_Dry_P Parameter: Organism Value: A. thaliana
  misc_feature: MA Experiment 20001559 PARAMETER Experiment Name: At_Drought_Soil_Dry_P Parameter: Plant Line Value: WS
  misc_feature: MA Experiment 20001559 PARAMETER Experiment Name: At_Drought_Soil_Dry_P Parameter: Post Timepoint (hr) Value: 29
  misc_feature: MA Experiment 20001559 PARAMETER Experiment Name: At_Drought_Soil_Dry_P Parameter: Post-Treatment Value: Re-Water vs. No Drought
  misc_feature: MA Experiment 20001559 PARAMETER Experiment Name: At_Drought_Soil_Dry_P Parameter: Timepoint (day) Value: 14
  misc_feature: MA Experiment 20001559 PARAMETER Experiment Name: At_Drought_Soil_Dry_P Parameter: Treatment Value: Drought vs. No Drought
  misc_feature: MA Experiment ID: 20001757 Result: Down-regulated in Transcription
  misc_feature: MA Experiment 20001757 PARAMETER Experiment Name: At_50mM_NH4NO3_L-to-H_P Parameter: Timepoint (hr) Value: 6
  misc_feature: MA Experiment 20001757 PARAMETER Experiment Name: At_50mM_NH4NO3_L-to-H_P Parameter: Tissue Value: Leaf
  misc_feature: MA Experiment 20001757 PARAMETER Experiment Name: At_50mM_NH4NO3_L-to-H_P Parameter: Treatment Value: 50mM NH4NO3 vs 100mM Mannitol
  misc_feature: MA Experiment ID: 20001773 Result: Up-regulated in Transcription
  misc_feature: MA Experiment 20001773 PARAMETER Experiment Name: At_Far-red-enriched-adult_P Parameter: Age (day) Value: 30
  misc_feature: MA Experiment 20001773 PARAMETER Experiment Name: At_Far-red-enriched-adult_P Parameter: Light Value: Far-red enriched vs. White
  misc_feature: MA Experiment 20001773 PARAMETER Experiment Name: At_Far-red-enriched-adult_P Parameter: Organism Value: A. thaliana
  misc_feature: MA Experiment 20001773 PARAMETER Experiment Name: At_Far-red-enriched-adult_P Parameter: Plant Line Value: Columbia
  misc_feature: MA Experiment 20001773 PARAMETER Experiment Name: At_Far-red-enriched-adult_P Parameter: Timepoint (hr) Value: 48
  misc_feature: MA Experiment 20001773 PARAMETER Experiment Name: At_Far-red-enriched-adult_P Parameter: Tissue Value: Aerial
  misc_feature: MA Experiment ID: 20001905 Result: Down-regulated in Transcription
  misc_feature: MA Experiment 20001905 PARAMETER Experiment Name: At_Drought_Reproduction_P Parameter: Age (day) Value: 40
  misc_feature: MA Experiment 20001905 PARAMETER Experiment Name: At_Drought_Reproduction_P Parameter: Organism Value: A. thaliana
  misc_feature: MA Experiment 20001905 PARAMETER Experiment Name: At_Drought_Reproduction_P Parameter: Plant Line Value: WS
  misc_feature: MA Experiment 20001905 PARAMETER Experiment Name: At_Drought_Reproduction_P Parameter: Timepoint (day) Value: 10
  misc_feature: MA Experiment 20001905 PARAMETER Experiment Name: At_Drought_Reproduction_P Parameter: Tissue Value: Rosettes
  misc_feature: MA Experiment 20001905 PARAMETER Experiment Name: At_Drought_Reproduction_P Parameter: Treatment Value: Drought vs. No Drought
gaaaggtagacgtagacgttggatacttatttggtaggctcttaagaatcttaggtgtatctctttagtttgaagggatatggatcaagaaagatcgatggagacagcataaccaataaacagatcaagaagttctggagacagaagcagatcattgaagaggatcatctctattctgctattaaggctgcagctcgtgtcagagctcgtaatctctctgatgaggactacaaacgctttgaagaaagcttggacatggaggacctggaaaccgaagatcatcagggattgaaagactggtggacaaagagcaaatacgcgtacttgaaccagccggctcttggatctgcagattcactgaagagaaagaggttttcgacttatacaccaaactgtttctcgttcaagccttgcaatcctctctacgcaacttcgctcaatgtcttttgaaccatgagcagcaaactctgcaagatcaatcgtcttgcatatatgtatatatttgttcgtgtgtgtctctgtacatgtcatgtgttattgcttctatattaatggatctggactttggtgtggttgttgatttgtaactgttgaataaaatctttctatggaacactaatttcttcttgttcc

SEQ ID NO: 72659 - protein, 64 aa, Arabidopsis thaliana; identical to SEQ ID NO: 21695
  peptide (1)..(64): Ceres Seq. ID no. 4942848
  misc_feature (1)..(64): Homolog of NCBI NO: 18398508 NR Description: expressed protein; protein id: At2g17710.1, by cDNA: 1011., supported by cDNA: gi_17933280, supported by gi_20453390 [Arabidopsis thaliana]
  misc_feature (1)..(64): Homolog of NCBI NO: 21618216 NR Description: unknown [Arabidopsis thaliana]
  misc_feature (1)..(64): Homolog of NCBI NO: 25371275 NR Description: hypothetical protein At2g17710 [imported] -
  misc_feature (6)..(50): Homolog of NCBI NO: 38345846 NR Description: OSJNBa0084K11.10 [Oryza sativa (japonica

SEQ ID NO: 72660 - protein, 32 aa, Arabidopsis thaliana; identical to SEQ ID NO: 21696
  peptide (1)..(32): Ceres Seq. ID no. 4942849

SEQ ID NO: 72661 - DNA, 1424 bp, Arabidopsis thaliana
  misc_feature (1)..(1424): Ceres Seq. ID no. 4943199
  misc_feature: MA Experiment ID: 108461 Result: Up-regulated in Transcription
  misc_feature: MA Experiment 108461 PARAMETER Experiment Name: At_Germinating_Seeds_cDNA_P Parameter: Age (day) Value: 1 vs. 0
  misc_feature: MA Experiment 108461 PARAMETER Experiment Name: At_Germinating_Seeds_cDNA_P Parameter: Tissue Value: Germinating Seeds
  misc_feature: MA Experiment ID: 108462 Result: Up-regulated in Transcription
  misc_feature: MA Experiment 108462 PARAMETER Experiment Name: At_Germinating_Seeds_cDNA_P Parameter: Age (day) Value: 2 vs. 0
  misc_feature: MA Experiment 108462 PARAMETER Experiment Name: At_Germinating_Seeds_cDNA_P Parameter: Tissue Value: Germinating Seeds
  misc_feature: MA Experiment ID: 108463 Result: Up-regulated in Transcription
  misc_feature: MA Experiment 108463 PARAMETER Experiment Name: At_Germinating_Seeds_cDNA_P Parameter: Age (day) Value: 3 vs. 0
  misc_feature: MA Experiment 108463 PARAMETER Experiment Name: At_Germinating_Seeds_cDNA_P Parameter: Tissue Value: Germinating Seeds
  misc_feature: MA Experiment ID: 108464 Result: Up-regulated in Transcription
  misc_feature: MA Experiment 108464 PARAMETER Experiment Name: At_Germinating_Seeds_cDNA_P Parameter: Age (day) Value: 4 vs. 0
  misc_feature: MA Experiment 108464 PARAMETER Experiment Name: At_Germinating_Seeds_cDNA_P Parameter: Tissue Value: Germinating Seeds
  misc_feature: MA Experiment ID: 108488 Result: Up-regulated in Transcription
  misc_feature: MA Experiment ID: 108574 Result: Down-regulated in Transcription
  misc_feature: MA Experiment 108574 PARAMETER Experiment Name: At_Wounding__cDNA_P Parameter: Timepoint (hr) Value: 1
  misc_feature: MA Experiment 108574 PARAMETER Experiment Name: At_Wounding__cDNA_P Parameter: Tissue Value: Aerial
  misc_feature: MA Experiment 108574 PARAMETER Experiment Name: At_Wounding__cDNA_P Parameter: Treatment Value: Wounding vs. No Wounding
  misc_feature: MA Experiment ID: 108576 Result: Down-regulated in Transcription
  misc_feature: MA Experiment 108576 PARAMETER Experiment Name: At_42deg_Heat_cDNA_P Parameter: Temperature (deg C) Value: 42 vs. 22
  misc_feature: MA Experiment 108576 PARAMETER Experiment Name: At_42deg_Heat_cDNA_P Parameter: Timepoint (hr) Value: 1
  misc_feature: MA Experiment 108576 PARAMETER Experiment Name: At_42deg_Heat_cDNA_P Parameter: Tissue Value: Aerial
  misc_feature: MA Experiment ID: 108577 Result: Down-regulated in Transcription
  misc_feature: MA Experiment 108577 PARAMETER Experiment Name: At_42deg_Heat_cDNA_P Parameter: Temperature (deg C) Value: 42 vs. 22
  misc_feature: MA Experiment 108577 PARAMETER Experiment Name: At_42deg_Heat_cDNA_P Parameter: Timepoint (hr) Value: 6
  misc_feature: MA Experiment 108577 PARAMETER Experiment Name: At_42deg_Heat_cDNA_P Parameter: Tissue Value: Aerial
  misc_feature: MA Experiment ID: 108579 Result: Down-regulated in Transcription
  misc_feature: MA Experiment 108579 PARAMETER Experiment Name: At_4deg_Cold_cDNA_P Parameter: Temperature (deg C) Value: 4 vs. 22
  misc_feature: MA Experiment 108579 PARAMETER Experiment Name: At_4deg_Cold_cDNA_P Parameter: Timepoint (hr) Value: 6
  misc_feature: MA Experiment 108579 PARAMETER Experiment Name: At_4deg_Cold_cDNA_P Parameter: Tissue Value: Aerial
  misc_feature: MA Experiment ID: 108585 Result: Down-regulated in Transcription
  misc_feature: MA Experiment 108585 PARAMETER Experiment Name: At_5mM_NaNP_cDNA_P Parameter: Timepoint (hr) Value: 6
  misc_feature: MA Experiment 108585 PARAMETER Experiment Name: At_5mM_NaNP_cDNA_P Parameter: Tissue Value: Aerial
  misc_feature: MA Experiment 108585 PARAMETER Experiment Name: At_5mM_NaNP_cDNA_P Parameter: Treatment Value: null
  misc_feature: MA Experiment ID: 108594 Result: Down-regulated in Transcription
  misc_feature: MA Experiment 108594 PARAMETER Experiment Name: At_Ler-rhl_Root_cDNA_P Parameter: Plant Line Value: null
  misc_feature: MA Experiment ID: 108595 Result: Down-regulated in Transcription
  misc_feature: MA Experiment 108595 PARAMETER Experiment Name: At_Ler-pi_Ovule_cDNA_P Parameter: Plant Line Value: null
  misc_feature: MA Experiment ID: 108668 Result: Down-regulated in Transcription
  misc_feature: MA Experiment 108668 PARAMETER Experiment Name: At_2mM_SA_cDNA_P Parameter: Plant Line Value: WS
  misc_feature: MA Experiment 108668 PARAMETER Experiment Name: At_2mM_SA_cDNA_P Parameter: Timepoint (hr) Value: 6
  misc_feature: MA Experiment 108668 PARAMETER Experiment Name: At_2mM_SA_cDNA_P Parameter: Treatment Value: 2mM SA vs. No Treatment
  misc_feature: MA Experiment ID: 20000068 Result: Down-regulated in Transcription
  misc_feature: MA Experiment ID: 20000069 Result: Up-regulated in Transcription
  misc_feature: MA Experiment 20000069 PARAMETER Experiment Name: At_100uM_ABA_Mutants_cDNA_P Parameter: Plant Line Value: CS23
  misc_feature: MA Experiment 20000069 PARAMETER Experiment Name: At_100uM_ABA_Mutants_cDNA_P Parameter: Timepoint (hr) Value: 6
  misc_feature: MA Experiment 20000069 PARAMETER Experiment Name: At_100uM_ABA_Mutants_cDNA_P Parameter: Tissue Value: Aerial
  misc_feature: MA Experiment 20000069 PARAMETER Experiment Name: At_100uM_ABA_Mutants_cDNA_P Parameter: Treatment Value: 100uM ABA vs. No Treatment
  misc_feature: MA Experiment ID: 20000070 Result: Up-regulated in Transcription
  misc_feature: MA Experiment 20000070 PARAMETER Experiment Name: At_100uM_ABA_Mutants_cDNA_P Parameter: Plant Line Value: CS24
  misc_feature: MA Experiment 20000070 PARAMETER Experiment Name: At_100uM_ABA_Mutants_cDNA_P Parameter: Timepoint (hr) Value: 6
  misc_feature: MA Experiment 20000070 PARAMETER Experiment Name: At_100uM_ABA_Mutants_cDNA_P Parameter: Tissue Value: Aerial
  misc_feature: MA Experiment 20000070 PARAMETER Experiment Name: At_100uM_ABA_Mutants_cDNA_P Parameter: Treatment Value: 100uM ABA vs. No Treatment
  misc_feature: MA Experiment ID: 20000087 Result: Down-regulated in Transcription
  misc_feature: MA Experiment 20000087 PARAMETER Experiment Name: At_100uM_ABA_Mutants_cDNA_P Parameter: Plant Line Value: WS
  misc_feature: MA Experiment 20000087 PARAMETER Experiment Name: At_100uM_ABA_Mutants_cDNA_P Parameter: Timepoint (hr) Value: 6
  misc_feature: MA Experiment 20000087 PARAMETER Experiment Name: At_100uM_ABA_Mutants_cDNA_P Parameter: Tissue Value: Aerial
  misc_feature: MA Experiment 20000087 PARAMETER Experiment Name: At_100uM_ABA_Mutants_cDNA_P Parameter: Treatment Value: 100uM ABA vs. No Treatment
  misc_feature: MA Experiment ID: 20000111 Result: Down-regulated in Transcription
  misc_feature: MA Experiment 20000111 PARAMETER Experiment Name: At_42deg_Heat_cDNA_P Parameter: Temperature (deg C) Value: 42 vs. 22
  misc_feature: MA Experiment 20000111 PARAMETER Experiment Name: At_42deg_Heat_cDNA_P Parameter: Timepoint (hr) Value: 6
  misc_feature: MA Experiment 20000111 PARAMETER Experiment Name: At_42deg_Heat_cDNA_P Parameter: Tissue Value: Aerial
  misc_feature: MA Experiment ID: 20000112 Result: Down-regulated in Transcription
  misc_feature: MA Experiment 20000112 PARAMETER Experiment Name: At_42deg_Heat_cDNA_P Parameter: Temperature (deg C) Value: 42 vs. 22
  misc_feature: MA Experiment 20000112 PARAMETER Experiment Name: At_42deg_Heat_cDNA_P Parameter: Timepoint (hr) Value: 2
  misc_feature: MA Experiment 20000112 PARAMETER Experiment Name: At_42deg_Heat_cDNA_P Parameter: Tissue Value: Aerial
  misc_feature: MA Experiment ID: 20000113 Result: Down-regulated in Transcription
  misc_feature: MA Experiment 20000113 PARAMETER Experiment Name: At_42deg_Heat_cDNA_P Parameter: Temperature (deg C) Value: 42 vs. 22
  misc_feature: MA Experiment 20000113 PARAMETER Experiment Name: At_42deg_Heat_cDNA_P Parameter: Timepoint (hr) Value: 8
  misc_feature: MA Experiment 20000113 PARAMETER Experiment Name: At_42deg_Heat_cDNA_P Parameter: Tissue Value: Aerial
  misc_feature: MA Experiment ID: 20000173 Result: Down-regulated in Transcription
  misc_feature: MA Experiment 20000173 PARAMETER Experiment Name: At_42deg_Heat_P Parameter: Age (day) Value: 14
  misc_feature: MA Experiment 20000173 PARAMETER Experiment Name: At_42deg_Heat_P Parameter: Organism Value: A. thaliana
  misc_feature: MA Experiment 20000173 PARAMETER Experiment Name: At_42deg_Heat_P Parameter: Plant Line Value: WS
  misc_feature: MA Experiment 20000173 PARAMETER Experiment Name: At_42deg_Heat_P Parameter: Temperature (deg C) Value: 42 vs. 22
  misc_feature: MA Experiment 20000173 PARAMETER Experiment Name: At_42deg_Heat_P Parameter: Timepoint (hr) Value: 6
  misc_feature: MA Experiment 20000173 PARAMETER Experiment Name: At_42deg_Heat_P Parameter: Tissue Value: Aerial
  misc_feature: MA Experiment ID: 20000182 Result: Down-regulated in Transcription
  misc_feature: MA Experiment 20000182 PARAMETER Experiment Name: At_2mM_SA_P Parameter: Age (day) Value: 14
  misc_feature: MA Experiment 20000182 PARAMETER Experiment Name: At_2mM_SA_P Parameter: Organism Value: A. thaliana
  misc_feature: MA Experiment 20000182 PARAMETER Experiment Name: At_2mM_SA_P Parameter: Plant Line Value: WS
  misc_feature: MA Experiment 20000182 PARAMETER Experiment Name: At_2mM_SA_P Parameter: Timepoint (hr) Value: 6
  misc_feature: MA Experiment 20000182 PARAMETER Experiment Name: At_2mM_SA_P Parameter: Tissue Value: Aerial
  misc_feature: MA Experiment 20000182 PARAMETER Experiment Name: At_2mM_SA_P Parameter: Treatment Value: 2mM SA vs. No Treatment
  misc_feature: MA Experiment ID: 20000184 Result: Down-regulated in Transcription
  misc_feature: MA Experiment 20000184 PARAMETER Experiment Name: At_Shoots__P Parameter: Age (day) Value: 7
  misc_feature: MA Experiment 20000184 PARAMETER Experiment Name: At_Shoots__P Parameter: Tissue Value: Shoots vs. Whole Plant
  misc_feature: MA Experiment ID: 20000185 Result: Down-regulated in Transcription
  misc_feature: MA Experiment 20000185 PARAMETER Experiment Name: At_Roots__P Parameter: Age (day) Value: 7 vs. 21
  misc_feature: MA Experiment 20000185 PARAMETER Experiment Name: At_Roots__P Parameter: Organism Value: A. thaliana
  misc_feature: MA Experiment 20000185 PARAMETER Experiment Name: At_Roots__P Parameter: Tissue Value: Roots vs. Whole Plant
  misc_feature: MA Experiment ID: 20000439 Result: Down-regulated in Transcription
  misc_feature: MA Experiment 20000439 PARAMETER Experiment Name: At_Roots__P Parameter: Age (day) Value: 14 vs. 21
  misc_feature: MA Experiment 20000439 PARAMETER Experiment Name: At_Roots__P Parameter: Organism Value: A. thaliana
  misc_feature: MA Experiment 20000439 PARAMETER Experiment Name: At_Roots__P Parameter: Tissue Value: Roots vs. Whole Plant
  misc_feature: MA Experiment ID: 20000527 Result: Up-regulated in Transcription
  misc_feature: MA Experiment 20000527 PARAMETER Experiment Name: At_10percent_PEG_P Parameter: Age (day) Value: 20
  misc_feature: MA Experiment 20000527 PARAMETER Experiment Name: At_10percent_PEG_P Parameter: Organism Value: A. thaliana
  misc_feature: MA Experiment 20000527 PARAMETER Experiment Name: At_10percent_PEG_P Parameter: Plant Line Value: WS
  misc_feature: MA Experiment 20000527 PARAMETER Experiment Name: At_10percent_PEG_P Parameter: Timepoint (day) Value: 20
  misc_feature: MA Experiment 20000527 PARAMETER Experiment Name: At_10percent_PEG_P Parameter: Tissue Value: Whole Plant
  misc_feature: MA Experiment 20000527 PARAMETER Experiment Name: At_10percent_PEG_P Parameter: Treatment Value: 10percent PEG vs. No Treatment
  misc_feature: MA Experiment ID: 20001248 Result: Up-regulated in Transcription
  misc_feature: MA Experiment 20001248 PARAMETER Experiment Name: At_Far-red-induction_P Parameter: Age (day) Value: 7
  misc_feature: MA Experiment 20001248 PARAMETER Experiment Name: At_Far-red-induction_P Parameter: Light Value: Far-red vs. White
  misc_feature: MA Experiment 20001248 PARAMETER Experiment Name: At_Far-red-induction_P Parameter: Organism Value: A. thaliana
  misc_feature: MA Experiment 20001248 PARAMETER Experiment Name: At_Far-red-induction_P Parameter: Plant Line Value: Columbia
  misc_feature: MA Experiment 20001248 PARAMETER Experiment Name: At_Far-red-induction_P Parameter: Timepoint (hr) Value: 4
  misc_feature: MA Experiment 20001248 PARAMETER Experiment Name: At_Far-red-induction_P Parameter: Tissue Value: Whole Plant
  misc_feature: MA Experiment ID: 20001450 Result: Up-regulated in Transcription
  misc_feature: MA Experiment 20001450 PARAMETER Experiment Name: At_Far-red-induction_P Parameter: Age (day) Value: 7
  misc_feature: MA Experiment 20001450 PARAMETER Experiment Name: At_Far-red-induction_P Parameter: Light Value: Far-red vs. White
  misc_feature: MA Experiment 20001450 PARAMETER Experiment Name: At_Far-red-induction_P Parameter: Organism Value: A. thaliana
  misc_feature: MA Experiment 20001450 PARAMETER Experiment Name: At_Far-red-induction_P Parameter: Plant Line Value: Columbia
  misc_feature: MA Experiment 20001450 PARAMETER Experiment Name: At_Far-red-induction_P Parameter: Timepoint (hr) Value: 8
  misc_feature: MA Experiment 20001450 PARAMETER Experiment Name: At_Far-red-induction_P Parameter: Tissue Value: Whole Plant
  misc_feature: MA Experiment ID: 20001451 Result: Up-regulated in Transcription
  misc_feature: MA Experiment 20001451 PARAMETER Experiment Name: At_Far-red-induction_P Parameter: Age (day) Value: 7
  misc_feature: MA Experiment 20001451 PARAMETER Experiment Name: At_Far-red-induction_P Parameter: Light Value: Far-red vs. White
  misc_feature: MA Experiment 20001451 PARAMETER Experiment Name: At_Far-red-induction_P Parameter: Organism Value: A. thaliana
  misc_feature: MA Experiment 20001451 PARAMETER Experiment Name: At_Far-red-induction_P Parameter: Plant Line Value: Columbia
  misc_feature: MA Experiment 20001451 PARAMETER Experiment Name: At_Far-red-induction_P Parameter: Timepoint (hr) Value: 24
  misc_feature: MA Experiment 20001451 PARAMETER Experiment Name: At_Far-red-induction_P Parameter: Tissue Value: Whole Plant
  misc_feature: MA Experiment ID: 20001557 Result: Down-regulated in Transcription
  misc_feature: MA Experiment 20001557 PARAMETER Experiment Name: At_Drought_Soil_Dry_P Parameter: Age (day) Value: 27
  misc_feature: MA Experiment 20001557 PARAMETER Experiment Name: At_Drought_Soil_Dry_P Parameter: Organism Value: A. thaliana
  misc_feature: MA Experiment 20001557 PARAMETER Experiment Name: At_Drought_Soil_Dry_P Parameter: Plant Line Value: WS
  misc_feature: MA Experiment 20001557 PARAMETER Experiment Name: At_Drought_Soil_Dry_P Parameter: Post Timepoint (hr) Value: 3
  misc_feature: MA Experiment 20001557 PARAMETER Experiment Name: At_Drought_Soil_Dry_P Parameter: Post-Treatment Value: Re-Water vs. No Drought
  misc_feature: MA Experiment 20001557 PARAMETER Experiment Name: At_Drought_Soil_Dry_P Parameter: Timepoint (day) Value: 13
  misc_feature: MA Experiment 20001557 PARAMETER Experiment Name: At_Drought_Soil_Dry_P Parameter: Treatment Value: Drought vs. No Drought
  misc_feature: MA Experiment ID: 20001558 Result: Down-regulated in Transcription
  misc_feature: MA Experiment 20001558 PARAMETER Experiment Name: At_Drought_Soil_Dry_P Parameter: Age (day) Value: 27
  misc_feature: MA Experiment 20001558 PARAMETER Experiment Name: At_Drought_Soil_Dry_P Parameter: Organism Value: A. thaliana
  misc_feature: MA Experiment 20001558 PARAMETER Experiment Name: At_Drought_Soil_Dry_P Parameter: Plant Line Value: WS
  misc_feature: MA Experiment 20001558 PARAMETER Experiment Name: At_Drought_Soil_Dry_P Parameter: Post Timepoint (hr) Value: 6
  misc_feature: MA Experiment 20001558 PARAMETER Experiment Name: At_Drought_Soil_Dry_P Parameter: Post-Treatment Value: Re-Water vs. No Drought
  misc_feature: MA Experiment 20001558 PARAMETER Experiment Name: At_Drought_Soil_Dry_P Parameter: Timepoint (day) Value: 13
  misc_feature: MA Experiment 20001558 PARAMETER Experiment Name: At_Drought_Soil_Dry_P Parameter: Treatment Value: Drought vs. No Drought
  misc_feature: MA Experiment ID: 20001560 Result: Down-regulated in Transcription
  misc_feature: MA Experiment 20001560 PARAMETER Experiment Name: At_Drought_Soil_Dry_P Parameter: Age (day) Value: 28
  misc_feature: MA Experiment 20001560 PARAMETER Experiment Name: At_Drought_Soil_Dry_P Parameter: Organism Value: A. thaliana
  misc_feature: MA Experiment 20001560 PARAMETER Experiment Name: At_Drought_Soil_Dry_P Parameter: Plant Line Value: WS
  misc_feature: MA Experiment 20001560 PARAMETER Experiment Name: At_Drought_Soil_Dry_P Parameter: Post Timepoint (hr) Value: None
  misc_feature: MA Experiment 20001560 PARAMETER Experiment Name: At_Drought_Soil_Dry_P Parameter: Post-Treatment Value: None
  misc_feature: MA Experiment 20001560 PARAMETER Experiment Name: At_Drought_Soil_Dry_P Parameter: Timepoint (day) Value: 14
  misc_feature: MA Experiment 20001560 PARAMETER Experiment Name: At_Drought_Soil_Dry_P Parameter: Treatment Value: Drought vs. No Drought
  misc_feature: MA Experiment ID: 20001905 Result: Down-regulated in Transcription
  misc_feature: MA Experiment 20001905 PARAMETER Experiment Name: At_Drought_Reproduction_P Parameter: Age (day) Value: 40
  misc_feature: MA Experiment 20001905 PARAMETER Experiment Name: At_Drought_Reproduction_P Parameter: Organism Value: A. thaliana
  misc_feature: MA Experiment 20001905 PARAMETER Experiment Name: At_Drought_Reproduction_P Parameter: Plant Line Value: WS
  misc_feature: MA Experiment 20001905 PARAMETER Experiment Name: At_Drought_Reproduction_P Parameter: Timepoint (day) Value: 10
  misc_feature: MA Experiment 20001905 PARAMETER Experiment Name: At_Drought_Reproduction_P Parameter: Tissue Value: Rosettes
  misc_feature: MA Experiment 20001905 PARAMETER Experiment Name: At_Drought_Reproduction_P Parameter: Treatment Value: Drought vs. No Drought
  misc_feature: MA Experiment ID: 20001906 Result: Down-regulated in Transcription
  misc_feature: MA Experiment 20001906 PARAMETER Experiment Name: At_Drought_Reproduction_P Parameter: Age (day) Value: 35
  misc_feature: MA Experiment 20001906 PARAMETER Experiment Name: At_Drought_Reproduction_P Parameter: Organism Value: A. thaliana
  misc_feature: MA Experiment 20001906 PARAMETER Experiment Name: At_Drought_Reproduction_P Parameter: Plant Line Value: WS
  misc_feature: MA Experiment 20001906 PARAMETER Experiment Name: At_Drought_Reproduction_P Parameter: Timepoint (day) Value: 5
  misc_feature: MA Experiment 20001906 PARAMETER Experiment Name: At_Drought_Reproduction_P Parameter: Tissue Value: Siliques
  misc_feature: MA Experiment 20001906 PARAMETER Experiment Name: At_Drought_Reproduction_P Parameter: Treatment Value: Drought vs. No Drought
  misc_feature: MA Experiment ID: 20001908 Result: Down-regulated in Transcription
  misc_feature: MA Experiment 20001908 PARAMETER Experiment Name: At_Drought_Reproduction_P Parameter: Age (day) Value: 40
  misc_feature: MA Experiment 20001908 PARAMETER Experiment Name: At_Drought_Reproduction_P Parameter: Organism Value: A. thaliana
  misc_feature: MA Experiment 20001908 PARAMETER Experiment Name: At_Drought_Reproduction_P Parameter: Plant Line Value: WS
  misc_feature: MA Experiment 20001908 PARAMETER Experiment Name: At_Drought_Reproduction_P Parameter: Timepoint (day) Value: 10
  misc_feature: MA Experiment 20001908 PARAMETER Experiment Name: At_Drought_Reproduction_P Parameter: Tissue Value: Siliques
  misc_feature: MA Experiment 20001908 PARAMETER Experiment Name: At_Drought_Reproduction_P Parameter: Treatment Value: Drought vs. No Drought
aaatgattttagaaactaaagtaaaatgagcttgacactagagtttctgcttcttctgattgtacttatcttgagtcaccatgctcattctggctctattgtcaaattccttcctggttttgaaggcccccttccttttgaactcgaaaccgggtacattggtattggtgaggaagaggaagtgcaattattctactatttcatcaaatctgagaagaatccagaagaagaccctcttcttctatggttaagtggaggacctggatgttcctctcttactggccttctttttgagaatggaccggtggctttgaagttcgaggtttacaatggaagtgttccatctttggtctctactacatattcatggacaaaggtaaaaatggcgaacataatattcttggatcagccagttggatctggcttctcctattcaagaactccacttgttgataaaattagtgacactggtgaagttaagaggatttatgagtttcttcaaaagtggttaagcaaacatcaacaatttttttccaaccctttttacgttggtggagattcttattcaggtatgattgttccacccctagttcaagaaatcggaaaaggaaattatcaaataaatctacagggttatatcctcggaaacccgataacagatactgaatctgaacaaaactatcagattccatatgctcatggaatggcattaatctctgatgaactatacaagtcaatggagagaatctgcaaaggaaattatgtgaaagtggattcacttaacacaaaatgctataaactaatcaaagattatcaaaagtgtattcataaactgaataagtatcatatattattacctgactgcgatataacatctcctgattgctttttatataggtatactctcataaccttttgggccaacaacaagagcgttcgcgaagctctgcaagtcaataagggaagtataggaaaatgggtacaatgtaactataaaaatatttcctacaattacgatatcaagagcagcgtcgcataccatatgaagaatagtattgatggctaccgatctcttatctacaatggtgaccatgatatgatggtgcctttccttgcaactcaagcctggataagatctctcaattattccatcactgatgattggaagccttggatgataaacgatcaaattgctggatacacgagaagttattccaataagatgacatttgctactatcaaaggaagtggacacacagcagagtataaaccaaaagagacctctatcatgttcaaaagatggatcagtgcccagcctttgtaaaagaggatgatggtctttgcgtatgtagaataaaactatgtaacataaaaaatgtttgtatacaatataatcatctacttggtaattaagtactaccgct

SEQ ID NO: 72662 - protein, 432 aa, Arabidopsis thaliana
  peptide (1)..(432): Ceres Seq. ID no. 4943200
  misc_feature (30)..(429): Pfam Name: Serine carboxypeptidase Pfam Description: Serine carboxypeptidase
  misc_feature (1)..(408): Homolog of NCBI NO: 24417488 NR Description: unknown [Arabidopsis thaliana]
  misc_feature (1)..(432): Homolog of NCBI NO: 15227769 NR Description: putative serine carboxypeptidase II; protein id:
  misc_feature (8)..(432): Homolog of NCBI NO: 15227765 NR Description: putative serine carboxypeptidase I; protein id: [Arabidopsis thaliana] >gi|25289780|pir||E84618 probable serine
  misc_feature (8)..(432): Homolog of NCBI NO: 15228300 NR Description: putative glucose acyltransferase; protein id: [Arabidopsis thaliana] >gi|8567775|gb|AAF76347.1| glucose putative [Arabidopsis thaliana]
  misc_feature (1)..(432): Homolog of NCBI NO: 15227773 NR Description: putative serine carboxypeptidase I; protein id: [Arabidopsis thaliana] >gi|25289775|pir||E84619 probable serine
  misc_feature (1)..(432): Homolog of NCBI NO: 15227772 NR Description: putative serine carboxypeptidase I; protein id: supported by cDNA: 33165. [Arabidopsis thaliana]
  misc_feature (1)..(432): Homolog of NCBI NO: 18400137 NR Description: putative serine carboxypeptidase I; protein id: [Arabidopsis thaliana] >gi|20197128|gb|AAC17816.2| putative carboxypeptidase I [Arabidopsis thaliana]
  misc_feature (5)..(432): Homolog of NCBI NO: 15219429 NR Description: putative serine carboxypeptidase; protein id: [Arabidopsis thaliana] >gi|25289788|pir||A96759 protein serine
  misc_feature (1)..(432): Homolog of NCBI NO: 30681910 NR Description: serine carboxypeptidase -related [Arabidopsis
  misc_feature (1)..(432): Homolog of NCBI NO: 8777303 NR Description: serine carboxypeptidase [Arabidopsis thaliana]
MSLTLEFLLLLIVLILSHHAHSGSIVKFLPGFEGPLPFELETGYIGIGEEEEVQLFYYFIKSEKNPEEDPLLLWLSGGPGCSSLTGLLFENGPVALKFEVYNGSVPSLVSTTYSWTKVKMANIIFLDQPVGSGFSYSRTPLVDKISDTGEVKRIYEFLQKWLSKHQQFFSNPFYVGGDSYSGMIVPPLVQEIGKGNYQINLQGYILGNPITDTESEQNYQIPYAHGMALISDELYKSMERICKGNYVKVDSLNTKCYKLIKDYQKCIHKLNKYHILLPDCDITSPDCFLYRYTLITFWANNKSVREALQVNKGSIGKWVQCNYKNISYNYDIKSSVAYHMKNSIDGYRSLIYNGDHDMMVPFLATQAWIRSLNYSITDDWKPWMINDQIAGYTRSYSNKMTFATIKGSGHTAEYKPKETSIMFKRWISAQPL

SEQ ID NO: 72663 - protein, 313 aa, Arabidopsis thaliana
  peptide (1)..(313): Ceres Seq. ID no. 4943201
  misc_feature (1)..(310): Pfam Name: Serine carboxypeptidase Pfam Description: Serine carboxypeptidase
  misc_feature (1)..(289): Homolog of NCBI NO: 24417488 NR Description: unknown [Arabidopsis thaliana]
  misc_feature (1)..(313): Homolog of NCBI NO: 15227769 NR Description: putative serine carboxypeptidase II; protein id:
  misc_feature (1)..(313): Homolog of NCBI NO: 15227765 NR Description: putative serine carboxypeptidase I; protein id: [Arabidopsis thaliana] >gi|25289780|pir||E84618 probable serine
  misc_feature (1)..(313): Homolog of NCBI NO: 15228300 NR Description: putative glucose acyltransferase; protein id: [Arabidopsis thaliana] >gi|8567775|gb|AAF76347.1| glucose putative [Arabidopsis thaliana]
  misc_feature (1)..(313): Homolog of NCBI NO: 15227773 NR Description: putative serine carboxypeptidase I; protein id: [Arabidopsis thaliana] >gi|25289775|pir||E84619 probable serine
  misc_feature (1)..(313): Homolog of NCBI NO: 15227772 NR Description: putative serine carboxypeptidase I; protein id: supported by cDNA: 33165. [Arabidopsis thaliana]
  misc_feature (1)..(313): Homolog of NCBI NO: 18400137 NR Description: putative serine carboxypeptidase I; protein id: [Arabidopsis thaliana] >gi|20197128|gb|AAC17816.2| putative carboxypeptidase I [Arabidopsis thaliana]
  misc_feature (1)..(313): Homolog of NCBI NO: 15219429 NR Description: putative serine carboxypeptidase; protein id: [Arabidopsis thaliana] >gi|25289788|pir||A96759 protein serine
  misc_feature (1)..(313): Homolog of NCBI NO: 30681910 NR Description: serine carboxypeptidase -related [Arabidopsis
  misc_feature (1)..(313): Homolog of NCBI NO: 8777303 NR Description: serine carboxypeptidase [Arabidopsis thaliana]
MANIIFLDQPVGSGFSYSRTPLVDKISDTGEVKRIYEFLQKWLSKHQQFFSNPFYVGGDSYSGMIVPPLVQEIGKGNYQINLQGYILGNPITDTESEQNYQIPYAHGMALISDELYKSMERICKGNYVKVDSLNTKCYKLIKDYQKCIHKLNKYHILLPDCDITSPDCFLYRYTLITFWANNKSVREALQVNKGSIGKWVQCNYKNISYNYDIKSSVAYHMKNSIDGYRSLIYNGDHDMMVPFLATQAWIRSLNYSITDDWKPWMINDQIAGYTRSYSNKMTFATIKGSGHTAEYKPKETSIMFKRWISAQPL

SEQ ID NO: 72664 - protein, 250 aa, Arabidopsis thaliana; identical to SEQ ID NO: 29009
  peptide (1)..(250): Ceres Seq. ID no. 4943202
  misc_feature (1)..(247): Pfam Name: Serine carboxypeptidase Pfam Description: Serine carboxypeptidase
  misc_feature (1)..(226): Homolog of NCBI NO: 24417488 NR Description: unknown [Arabidopsis thaliana]
  misc_feature (1)..(250): Homolog of NCBI NO: 15227769 NR Description: putative serine carboxypeptidase II; protein id:
  misc_feature (1)..(250): Homolog of NCBI NO: 15227765 NR Description: putative serine carboxypeptidase I; protein id: [Arabidopsis thaliana] >gi|25289780|pir||E84618 probable serine
  misc_feature (1)..(250): Homolog of NCBI NO: 15228300 NR Description: putative glucose acyltransferase; protein id: [Arabidopsis thaliana] >gi|8567775|gb|AAF76347.1| glucose putative [Arabidopsis thaliana]
  misc_feature (1)..(250): Homolog of NCBI NO: 15227773 NR Description: putative serine carboxypeptidase I; protein id: [Arabidopsis thaliana] >gi|25289775|pir||E84619 probable serine
  misc_feature (1)..(250): Homolog of NCBI NO: 15227772 NR Description: putative serine carboxypeptidase I; protein id: supported by cDNA: 33165. [Arabidopsis thaliana]
  misc_feature (1)..(250): Homolog of NCBI NO: 18400137 NR Description: putative serine carboxypeptidase I; protein id: [Arabidopsis thaliana] >gi|20197128|gb|AAC17816.2| putative carboxypeptidase I [Arabidopsis thaliana]
  misc_feature (1)..(250): Homolog of NCBI NO: 15219429 NR Description: putative serine carboxypeptidase; protein id: [Arabidopsis thaliana] >gi|25289788|pir||A96759 protein serine
  misc_feature (1)..(250): Homolog of NCBI NO: 30681910 NR Description: serine carboxypeptidase -related [Arabidopsis
  misc_feature (1)..(250): Homolog of NCBI NO: 8777303 NR Description: serine carboxypeptidase [Arabidopsis thaliana]

SEQ ID NO: 72665 - DNA, 1497 bp, Arabidopsis thaliana
  misc_feature (1)..(1497): Ceres Seq. ID no. 4943579
  misc_feature: MA Experiment ID: 20000185 Result: Up-regulated in Transcription
  misc_feature: MA Experiment 20000185 PARAMETER Experiment Name: At_Roots__P Parameter: Age (day) Value: 7 vs. 21
  misc_feature: MA Experiment 20000185 PARAMETER Experiment Name: At_Roots__P Parameter: Organism Value: A. thaliana
  misc_feature: MA Experiment 20000185 PARAMETER Experiment Name: At_Roots__P Parameter: Tissue Value: Roots vs. Whole Plant
  misc_feature: MA Experiment ID: 20000286 Result: Up-regulated in Transcription
  misc_feature: MA Experiment 20000286 PARAMETER Experiment Name: At_Open_Flower_P Parameter: Age (day) Value: 21
  misc_feature: MA Experiment 20000286 PARAMETER Experiment Name: At_Open_Flower_P Parameter: Plant Line Value: WS
  misc_feature: MA Experiment 20000286 PARAMETER Experiment Name: At_Open_Flower_P Parameter: Tissue Value: Half Open vs. Whole Plant
  misc_feature: MA Experiment ID: 20000439 Result: Up-regulated in Transcription
  misc_feature: MA Experiment 20000439 PARAMETER Experiment Name: At_Roots__P Parameter: Age (day) Value: 14 vs. 21
  misc_feature: MA Experiment 20000439 PARAMETER Experiment Name: At_Roots__P Parameter: Organism Value: A. thaliana
  misc_feature: MA Experiment 20000439 PARAMETER Experiment Name: At_Roots__P Parameter: Tissue Value: Roots vs. Whole Plant
  misc_feature: MA Experiment ID: 20000451 Result: Down-regulated in Transcription
  misc_feature: MA Experiment 20000451 PARAMETER Experiment Name: At_CS6879_Shoots-Roots_P Parameter: Age (day) Value: 14
  misc_feature: MA Experiment 20000451 PARAMETER Experiment Name: At_CS6879_Shoots-Roots_P Parameter: Organism Value: A. thaliana
  misc_feature: MA Experiment 20000451 PARAMETER Experiment Name: At_CS6879_Shoots-Roots_P Parameter: Plant Line Value: CS6879 vs. WS
  misc_feature: MA Experiment 20000451 PARAMETER Experiment Name: At_CS6879_Shoots-Roots_P Parameter: Tissue Value: Roots
  misc_feature: Pfam Name: p450 Pfam Description: Cytochrome P450
atgaacgttgactttcaaaactgtttgatcttaatcctcctctgcctcctttccttcctctgttactctttcttcttcaagaaaccaaaggatggtttcaatttgccaccgagccctccctctctaccgatcattggccatcttcatcatctcctctctctttttatgcacagatctttgcaaaaactctcctccaagtatggacctctcctctatcttcacgtcttcaatgttcccatactccttgtctcgtctccctcaatagcctatgagatctttaggacacaagacgtaaacgtttcctcgcgcgactttcctacgaacgaagggtctctcctcttcggatcctttggcttcggcaccgcaccttcctcgggcctcaagcactcgagaggtcacaaaaagtccgtgcagaggagttattacttaaacctattagataaggcggtgaagaaggagagcgttgagattgctgaggaagctatgaagctggtcaacaataccgtttgccagatgattatggggaggagttgttcagaggaaaacggtgaagcagagagagtcagaggcttggtgaccaagacagatgccttgacgaagaagtttatcttggcaggcatcttgcggaaaccgcttcagaagattgggatctcactgttcaaaaaggagttaatggatgcttcctgcaagttcaacgaggtgttggagaagattcttgtagaatataaagagaaagttgaagagcatcatcaaggtactgacatgatggataagctcttagaagtttatggagacgaaaaagcagagtataagatcactagagaccatatcaagtccttgtttgtggatcttttctttgcaggcactgacacctggacgcacgctatacaatggattatggccgagatcattaacaactcgtacattcttgagagattgagagaagaaattgattctgttgtaggaaaaacaaggttgattcaagaaactgatctaccgaacctcccgtgcttgcaagcaaccgtcaaagaagggctaaggttgcaccctccggttcctcttgtgttaagaacgtttaaagaagggtgtacgattggaggcttttatgttccggagaagacaacacttgttgttaatgggtatgctatgatgagagatcctgaatactgggaagatcctcaagaatttaagccagagagatttctagcttcttcaagatcaagccaaaatgatgagataagagacgaactcctaaaataccttcctttcgggaatggaagaagagcctgtccaggagctaacctagcttatatctctgtaggaaccgcgattggagtgatggttcagtgctttgactgggagatcaaaggagataagatcaacatggatgaggctcctggaaaaataacgttgaccatggctcatcctcttaactgcactcttgttcctcgaaccctaatccctgttacttcaactgtacagattcctagttcttga

SEQ ID NO: 72666 - protein, 498 aa, Arabidopsis thaliana
  peptide (1)..(498): Ceres Seq. ID no. 4943580
  misc_feature: Pfam Name: p450 Pfam Description: Cytochrome P450
  misc_feature (1)..(498): Homolog of NCBI NO: 15225834 NR Description: cytochrome p450, putative; protein id: [Arabidopsis thaliana] >gi|25282589|pir||F84667 probable
  misc_feature (123)..(491): Homolog of NCBI NO: 15225832 NR Description: cytochrome p450 family; protein id: At2g27000.1
  misc_feature (1)..(123): Homolog of NCBI NO: 15225832 NR Description: cytochrome p450 family; protein id: At2g27000.1
  misc_feature (127)..(486): Homolog of NCBI NO: 15233774 NR Description: cytochrome p450 family; protein id: At4g15350.1
  misc_feature (9)..(123): Homolog of NCBI NO: 15233774 NR Description: cytochrome p450 family; protein id: At4g15350.1
  misc_feature (127)..(486): Homolog of NCBI NO: 7430617 NR Description: cytochrome P450 - Arabidopsis thaliana
  misc_feature (9)..(123): Homolog of NCBI NO: 7430617 NR Description: cytochrome P450 - Arabidopsis thaliana
  misc_feature (127)..(498): Homolog of NCBI NO: 15232418 NR Description: cytochrome P450, putative; protein id: At3g20950.1
  misc_feature (1)..(123): Homolog of NCBI NO: 15232418 NR Description: cytochrome P450, putative; protein id: At3g20950.1
  misc_feature (127)..(488): Homolog of NCBI NO: 15231053 NR Description: cytochrome p450 family; protein id: At3g20140.1
MNVDFQNCLILILLCLLSFLCYSFFFKKPKDGFNLPPSPPSLPIIGHLHHLLSLFMHRSLQKLSSKYGPLLYLHVFNVPILLVSSPSIAYEIFRTQDVNVSSRDFPTNEGSLLFGSFGFGTAPSSGLKHSRGHKKSVQRSYYLNLLDKAVKKESVEIAEEAMKLVNNTVCQMIMGRSCSEENGEAERVRGLVTKTDALTKKFILAGILRKPLQKIGISLFKKELMDASCKFNEVLEKILVEYKEKVEEHHQGTDMMDKLLEVYGDEKAEYKITRDHIKSLFVDLFFAGTDTWTHAIQWIMAEIINNSYILERLREEIDSVVGKTRLIQETDLPNLPCLQATVKEGLRLHPPVPLVLRTFKEGCTIGGFYVPEKTTLVVNGYAMMRDPEYWEDPQEFKPERFLASSRSSQNDEIRDELLKYLPFGNGRRACPGANLAYISVGTAIGVMVQCFDWEIKGDKINMDEAPGKITLTMAHPLNCTLVPRTLIPVTSTVQIPSS

SEQ ID NO: 72667 - protein, 443 aa, Arabidopsis thaliana
  peptide (1)..(443): Ceres Seq. ID no. 4943581
  misc_feature: Pfam Name: p450 Pfam Description: Cytochrome P450
  misc_feature (1)..(443): Homolog of NCBI NO: 15225834 NR Description: cytochrome p450, putative; protein id: [Arabidopsis thaliana] >gi|25282589|pir||F84667 probable
  misc_feature (68)..(436): Homolog of NCBI NO: 15225832 NR Description: cytochrome p450 family; protein id: At2g27000.1
  misc_feature (1)..(68): Homolog of NCBI NO: 15225832 NR Description: cytochrome p450 family; protein id: At2g27000.1
  misc_feature (72)..(431): Homolog of NCBI NO: 15233774 NR Description: cytochrome p450 family; protein id: At4g15350.1
  misc_feature (1)..(68): Homolog of NCBI NO: 15233774 NR Description: cytochrome p450 family; protein id: At4g15350.1
  misc_feature (72)..(431): Homolog of NCBI NO: 7430617 NR Description: cytochrome P450 - Arabidopsis thaliana
  misc_feature (1)..(68): Homolog of NCBI NO: 7430617 NR Description: cytochrome P450 - Arabidopsis thaliana
  misc_feature (72)..(443): Homolog of NCBI NO: 15232418 NR Description: cytochrome P450, putative; protein id: At3g20950.1
  misc_feature (1)..(68): Homolog of NCBI NO: 15232418 NR Description: cytochrome P450, putative; protein id: At3g20950.1
  misc_feature (72)..(433): Homolog of NCBI NO: 15231053 NR Description: cytochrome p450 family; protein id: At3g20140.1
MHRSLQKLSSKYGPLLYLHVFNVPILLVSSPSIAYEIFRTQDVNVSSRDFPTNEGSLLFGSFGFGTAPSSGLKHSRGHKKSVQRSYYLNLLDKAVKKESVEIAEEAMKLVNNTVCQMIMGRSCSEENGEAERVRGLVTKTDALTKKFILAGILRKPLQKIGISLFKKELMDASCKFNEVLEKILVEYKEKVEEHHQGTDMMDKLLEVYGDEKAEYKITRDHIKSLFVDLFFAGTDTWTHAIQWIMAEIINNSYILERLREEIDSVVGKTRLIQETDLPNLPCLQATVKEGLRLHPPVPLVLRTFKEGCTIGGFYVPEKTTLVVNGYAMMRDPEYWEDPQEFKPERFLASSRSSQNDEIRDELLKYLPFGNGRRACPGANLAYISVGTAIGVMVQCFDWEIKGDKINMDEAPGKITLTMAHPLNCTLVPRTLIPVTSTVQIPSS

SEQ ID NO: 72668 - protein, 337 aa, Arabidopsis thaliana
  peptide (1)..(337): Ceres Seq. ID no. 4943582
  misc_feature: Pfam Name: p450 Pfam Description: Cytochrome P450
  misc_feature (1)..(337): Homolog of NCBI NO: 15225834 NR Description: cytochrome p450, putative; protein id: [Arabidopsis thaliana] >gi|25282589|pir||F84667 probable
  misc_feature (1)..(330): Homolog of NCBI NO: 15225832 NR Description: cytochrome p450 family; protein id: At2g27000.1
  misc_feature (1)..(325): Homolog of NCBI NO: 15233774 NR Description: cytochrome p450 family; protein id: At4g15350.1
  misc_feature (1)..(325): Homolog of NCBI NO: 7430617 NR Description: cytochrome P450 - Arabidopsis thaliana
  misc_feature (1)..(337): Homolog of NCBI NO: 15232418 NR Description: cytochrome P450, putative; protein id: At3g20950.1
  misc_feature (1)..(327): Homolog of NCBI NO: 15231053 NR Description: cytochrome p450 family; protein id: At3g20140.1
  misc_feature (1)..(329): Homolog of NCBI NO: 18402480 NR Description: cytochrome P450, putative; protein id: supported by cDNA: 147792. [Arabidopsis thaliana]
  misc_feature (1)..(329): Homolog of NCBI NO: 21553493 NR Description: cytochrome P450, putative [Arabidopsis thaliana]
  misc_feature (1)..(329): Homolog of NCBI NO: 19699361 NR Description: AT3g20080/MAL21_9 [Arabidopsis thaliana]
  misc_feature (1)..(323): Homolog of NCBI NO: 9293969 NR Description: cytochrome P450-like protein [Arabidopsis
MKLVNNTVCQMIMGRSCSEENGEAERVRGLVTKTDALTKKFILAGILRKPLQKIGISLFKKELMDASCKFNEVLEKILVEYKEKVEEHHQGTDMMDKLLEVYGDEKAEYKITRDHIKSLFVDLFFAGTDTWTHAIQWIMAEIINNSYILERLREEIDSVVGKTRLIQETDLPNLPCLQATVKEGLRLHPPVPLVLRTFKEGCTIGGFYVPEKTTLVVNGYAMMRDPEYWEDPQEFKPERFLASSRSSQNDEIRDELLKYLPFGNGRRACPGANLAYISVGTAIGVMVQCFDWEIKGDKINMDEAPGKITLTMAHPLNCTLVPRTLIPVTSTVQIPSS

SEQ ID NO: 72669 - DNA, 1521 bp, Arabidopsis thaliana
  misc_feature (1)..(1521): Ceres Seq. ID no. 4943676
  misc_feature: MA Experiment ID: 20000171 Result: Down-regulated in Transcription
  misc_feature: MA Experiment 20000171 PARAMETER Experiment Name: At_42deg_Heat_P Parameter: Age (day) Value: 14
  misc_feature: MA Experiment 20000171 PARAMETER Experiment Name: At_42deg_Heat_P Parameter: Organism Value: A. thaliana
  misc_feature: MA Experiment 20000171 PARAMETER Experiment Name: At_42deg_Heat_P Parameter: Plant Line Value: WS
  misc_feature: MA Experiment 20000171 PARAMETER Experiment Name: At_42deg_Heat_P Parameter: Temperature (deg C) Value: 42 vs. 22
  misc_feature: MA Experiment 20000171 PARAMETER Experiment Name: At_42deg_Heat_P Parameter: Timepoint (hr) Value: 1
  misc_feature: MA Experiment 20000171 PARAMETER Experiment Name: At_42deg_Heat_P Parameter: Tissue Value: Aerial
  misc_feature: MA Experiment ID: 20000173 Result: Down-regulated in Transcription
  misc_feature: MA Experiment 20000173 PARAMETER Experiment Name: At_42deg_Heat_P Parameter: Age (day) Value: 14
  misc_feature: MA Experiment 20000173 PARAMETER Experiment Name: At_42deg_Heat_P Parameter: Organism Value: A. thaliana
  misc_feature: MA Experiment 20000173 PARAMETER Experiment Name: At_42deg_Heat_P Parameter: Plant Line Value: WS
  misc_feature: MA Experiment 20000173 PARAMETER Experiment Name: At_42deg_Heat_P Parameter: Temperature (deg C) Value: 42 vs. 22
  misc_feature: MA Experiment 20000173 PARAMETER Experiment Name: At_42deg_Heat_P Parameter: Timepoint (hr) Value: 6
  misc_feature: MA Experiment 20000173 PARAMETER Experiment Name: At_42deg_Heat_P Parameter: Tissue Value: Aerial
  misc_feature: MA Experiment ID: 20000180 Result: Up-regulated in Transcription
  misc_feature: MA Experiment 20000180 PARAMETER Experiment Name: At_Germinating_Seeds_P Parameter: Age (hr) Value: 24 vs. 0
  misc_feature: MA Experiment 20000180 PARAMETER Experiment Name: At_Germinating_Seeds_P Parameter: Tissue Value: Germinating Seeds
  misc_feature: MA Experiment ID: 20000234 Result: Up-regulated in Transcription
  misc_feature: MA Experiment 20000234 PARAMETER Experiment Name: At_Siliques_P Parameter: Age (day) Value: 21
  misc_feature: MA Experiment 20000234 PARAMETER Experiment Name: At_Siliques_P Parameter: Organism Value: A. thaliana
  misc_feature: MA Experiment 20000234 PARAMETER Experiment Name: At_Siliques_P Parameter: Plant Line Value: WS
  misc_feature: MA Experiment 20000234 PARAMETER Experiment Name: At_Siliques_P Parameter: Tissue Value: Less Than 5mm Siliques vs. Whole Plant
  misc_feature: MA Experiment ID: 20000265 Result: Up-regulated in Transcription
  misc_feature: MA Experiment 20000265 PARAMETER Experiment Name: At_Open_Flower_P Parameter: Age (day) Value: 21
  misc_feature: MA Experiment 20000265 PARAMETER Experiment Name: At_Open_Flower_P Parameter: Plant Line Value: WS
  misc_feature: MA Experiment 20000265 PARAMETER Experiment Name: At_Open_Flower_P Parameter: Tissue Value: Closed Flower vs. Whole Plant
  misc_feature: MA Experiment ID: 20000286 Result: Up-regulated in Transcription
  misc_feature: MA Experiment 20000286 PARAMETER Experiment Name: At_Open_Flower_P Parameter: Age (day) Value: 21
  misc_feature: MA Experiment 20000286 PARAMETER Experiment Name: At_Open_Flower_P Parameter: Plant Line Value: WS
  misc_feature: MA Experiment 20000286 PARAMETER Experiment Name: At_Open_Flower_P Parameter: Tissue Value: Half Open vs. Whole Plant
  misc_feature: MA Experiment ID: 20000794 Result: Up-regulated in Transcription
  misc_feature: MA Experiment 20000794 PARAMETER Experiment Name: At_Petals_P Parameter: Age (day) Value: 23-25 days
  misc_feature: MA Experiment 20000794 PARAMETER Experiment Name: At_Petals_P Parameter: Plant Line Value: WS
  misc_feature: MA Experiment 20000794 PARAMETER Experiment Name: At_Petals_P Parameter: Tissue Value: Petals vs. Whole plant
atgaactctcaaatcactcttttcttcttcttcttctcaatcctctccctctcccaaatctcaaattcatcatcactactaaaaccacacccatgtccaattttacccctcccatcctcccaacagctccaatggcaactcggatccatggccatgttcctccattttggacccaacactttcaccgactccgaatggggcaccggaaaagctaacccatccattttcaacccgacccatctcaacgcaagtcaatgggtccaaatcgctaaagactcaggcttttcccgcgttatcctcacagctaagcaccatgatggattctgtctctggcctagcgaatacactgattactccgtcaaatctagccaatggagaaacggagccggcgatgtagtggctgaactagcttctgcggcaaaggaagctggaattggacttggtctttacctttctccatgggatcgacatgaacagtgttatggcaagacattggagtataacgagttctatctgagtcaaatgaccgagttactaacaaagtatggagagattaaggaagtttggttagatggagctaaaggagacggagagaaagatatggaatatttctttgatacttggtttagtttgatccatcagcttcagcctaaagctgttatattctctgacgctggtcctgatgtcaggtggattggtgatgaagctggtctagctggctctacttgctggtcactctttaacagaaccaatgcaaagattggtgacactgagccttcgtattctcaagaaggtgatggctatgggcaagattgggtaccagcggaatgtgatgtatcgattcgacccggttggttttggcatgcgtcggagtcgcctaaaccggctgttcagcttttggatatatactataactcagttggaagaaactgtctcttcttgcttaatgtacctcctaattcttcaggattgatatctgagcaagacattaaggttcttgaagagttcagcgaaatgaagaactccattttctcgaacaatctcgcccgtaaagcattcgttaactcgagcagtattcgtggcgatcaaagttcacagtttggtcctaagaatgttttggaagaaggattagacaagtactgggcgccagaagagaatcaaaacgaatgggtgttatacttagagtttaaagatttggttagcttcaatgtgttggagattcgagaaccaatccatatgggtcaaaggatcgcatctttccatctcgagacacggaagactggaagcggtgagtgggagagagttgtgagcggcacgacggttggtaacaaaaggcttttacggtttctgaatgttgttgagtcgcggtctctaaagcttgtggtggacaaagcgaggaccgacccacttatatcgtacctcggactctacatggataagttttcgggttctagtagaaacacaacaaagataacaatcacaaggacactaaaggaagagcagcaactacatgatttgtaa

SEQ ID NO: 72670 - protein, 506 aa, Arabidopsis thaliana
  peptide (1)..(506): Ceres Seq. ID no. 4943677
  misc_feature (44)..(341): Pfam Name: Alpha-L-fucosidase Pfam Description: Alpha-L-fucosidase
  misc_feature (1)..(506): Homolog of NCBI NO: 30683758 NR Description: glycosyl hydrolase family 29 (alpha-L-fucosidase)
  misc_feature (1)..(506): Homolog of NCBI NO: 26453078 NR Description: unknown protein [Arabidopsis thaliana]
  misc_feature (29)..(482): Homolog of NCBI NO: 38345843 NR Description: OSJNBa0084K11.7 [Oryza sativa (japonica
  misc_feature (37)..(477): Homolog of NCBI NO: 18310858 NR Description: conserved hypothetical protein [Clostridium >gi|18145540|dbj|BAB81582.1| conserved hypothetical protein
  misc_feature (1)..(181): Homolog of NCBI NO: 25407953 NR Description: hypothetical protein At2g28100 [imported] - thaliana >gi|4063748|gb|AAC98456.1| unknown protein [Arabidopsis
  misc_feature (27)..(486): Homolog of NCBI NO: 15901959 NR Description: conserved hypothetical protein [Streptococcus TIGR4] >gi|25389606|pir||B95251 conserved hypothetical protein
  misc_feature (27)..(486): Homolog of NCBI NO: 15903995 NR Description: Hypothetical protein [Streptococcus pneumoniae R6]
  misc_feature (162)..(471): Homolog of NCBI NO: 38109219 NR Description: hypothetical protein MG06780.4 [Magnaporthe
  misc_feature (13)..(157): Homolog of NCBI NO: 38109219 NR Description: hypothetical protein MG06780.4 [Magnaporthe
  misc_feature (61)..(477): Homolog of NCBI NO: 29350121 NR Description: conserved hypothetical protein [Bacteroides
MNSQITLFFFFFSILSLSQISNSSSLLKPHPCPILPLPSSQQLQWQLGSMAMFLHFGPNTFTDSEWGTGKANPSIFNPTHLNASQWVQIAKDSGFSRVILTAKHHDGFCLWPSEYTDYSVKSSQWRNGAGDVVAELASAAKEAGIGLGLYLSPWDRHEQCYGKTLEYNEFYLSQMTELLTKYGEIKEVWLDGAKGDGEKDMEYFFDTWFSLIHQLQPKAVIFSDAGPDVRWIGDEAGLAGSTCWSLFNRTNAKIGDTEPSYSQEGDGYGQDWVPAECDVSIRPGWFWHASESPKPAVQLLDIYYNSVGRNCLFLLNVPPNSSGLISEQDIKVLEEFSEMKNSIFSNNLARKAFVNSSSIRGDQSSQFGPKNVLEEGLDKYWAPEENQNEWVLYLEFKDLVSFNVLEIREPIHMGQRIASFHLETRKTGSGEWERVVSGTTVGNKRLLRFLNVVESRSLKLVVDKARTDPLISYLGLYMDKFSGSSRNTTKITITRTLKEEQQLHDL

SEQ ID NO: 72671 - protein, 457 aa, Arabidopsis thaliana
  peptide (1)..(457): Ceres Seq. ID no. 4943678
  misc_feature (1)..(292): Pfam Name: Alpha-L-fucosidase Pfam Description: Alpha-L-fucosidase
  misc_feature (1)..(457): Homolog of NCBI NO: 30683758 NR Description: glycosyl hydrolase family 29 (alpha-L-fucosidase)
  misc_feature (1)..(457): Homolog of NCBI NO: 26453078 NR Description: unknown protein [Arabidopsis thaliana]
  misc_feature (1)..(433): Homolog of NCBI NO: 38345843 NR Description: OSJNBa0084K11.7 [Oryza sativa (japonica
  misc_feature (1)..(428): Homolog of NCBI NO: 18310858 NR Description: conserved hypothetical protein [Clostridium >gi|18145540|dbj|BAB81582.1| conserved hypothetical protein
  misc_feature (1)..(132): Homolog of NCBI NO: 25407953 NR Description: hypothetical protein At2g28100 [imported] - thaliana >gi|4063748|gb|AAC98456.1| unknown protein [Arabidopsis
  misc_feature (1)..(437): Homolog of NCBI NO: 15901959 NR Description: conserved hypothetical protein [Streptococcus TIGR4] >gi|25389606|pir||B95251 conserved hypothetical protein
  misc_feature (1)..(437): Homolog of NCBI NO: 15903995 NR Description: Hypothetical protein [Streptococcus pneumoniae R6]
  misc_feature (113)..(422): Homolog of NCBI NO: 38109219 NR Description: hypothetical protein MG06780.4 [Magnaporthe
  misc_feature (1)..(108): Homolog of NCBI NO: 38109219 NR Description: hypothetical protein MG06780.4 [Magnaporthe
  misc_feature (12)..(428): Homolog of NCBI NO: 29350121 NR Description: conserved hypothetical protein [Bacteroides
MAMFLHFGPNTFTDSEWGTGKANPSIFNPTHLNASQWVQIAKDSGFSRVILTAKHHDGFCLWPSEYTDYSVKSSQWRNGAGDVVAELASAAKEAGIGLGLYLSPWDRHEQCYGKTLEYNEFYLSQMTELLTKYGEIKEVWLDGAKGDGEKDMEYFFDTWFSLIHQLQPKAVIFSDAGPDVRWIGDEAGLAGSTCWSLFNRTNAKIGDTEPSYSQEGDGYGQDWVPAECDVSIRPGWFWHASESPKPAVQLLDIYYNSVGRNCLFLLNVPPNSSGLISEQDIKVLEEFSEMKNSIFSNNLARKAFVNSSSIRGDQSSQFGPKNVLEEGLDKYWAPEENQNEWVLYLEFKDLVSFNVLEIREPIHMGQRIASFHLETRKTGSGEWERVVSGTTVGNKRLLRFLNVVESRSLKLVVDKARTDPLISYLGLYMDKFSGSSRNTTKITITRTLKEEQQLHDL

SEQ ID NO: 72672 - protein, 455 aa, Arabidopsis thaliana
  peptide (1)..(455): Ceres Seq. ID no. 4943679
  misc_feature (1)..(290): Pfam Name: Alpha-L-fucosidase Pfam Description: Alpha-L-fucosidase
  misc_feature (1)..(455): Homolog of NCBI NO: 30683758 NR Description: glycosyl hydrolase family 29 (alpha-L-fucosidase)
  misc_feature (1)..(455): Homolog of NCBI NO: 26453078 NR Description: unknown protein [Arabidopsis thaliana]
  misc_feature (1)..(431): Homolog of NCBI NO: 38345843 NR Description: OSJNBa0084K11.7 [Oryza sativa (japonica
  misc_feature (1)..(426): Homolog of NCBI NO: 18310858 NR Description: conserved hypothetical protein [Clostridium >gi|18145540|dbj|BAB81582.1| conserved hypothetical protein
  misc_feature (1)..(130): Homolog of NCBI NO: 25407953 NR Description: hypothetical protein At2g28100 [imported] - thaliana >gi|4063748|gb|AAC98456.1| unknown protein [Arabidopsis
  misc_feature (1)..(435): Homolog of NCBI NO: 15901959 NR Description: conserved hypothetical protein [Streptococcus TIGR4] >gi|25389606|pir||B95251 conserved hypothetical protein
  misc_feature (1)..(435): Homolog of NCBI NO: 15903995 NR Description: Hypothetical protein [Streptococcus pneumoniae R6]
  misc_feature (111)..(420): Homolog of NCBI NO: 38109219 NR Description: hypothetical protein MG06780.4 [Magnaporthe
  misc_feature (1)..(106): Homolog of NCBI NO: 38109219 NR Description: hypothetical protein MG06780.4 [Magnaporthe
  misc_feature (10)..(426): Homolog of NCBI NO: 29350121 NR Description: conserved hypothetical protein [Bacteroides
MFLHFGPNTFTDSEWGTGKANPSIFNPTHLNASQWVQIAKDSGFSRVILTAKHHDGFCLWPSEYTDYSVKSSQWRNGAGDVVAELASAAKEAGIGLGLYLSPWDRHEQCYGKTLEYNEFYLSQMTELLTKYGEIKEVWLDGAKGDGEKDMEYFFDTWFSLIHQLQPKAVIFSDAGPDVRWIGDEAGLAGSTCWSLFNRTNAKIGDTEPSYSQEGDGYGQDWVPAECDVSIRPGWFWHASESPKPAVQLLDIYYNSVGRNCLFLLNVPPNSSGLISEQDIKVLEEFSEMKNSIFSNNLARKAFVNSSSIRGDQSSQFGPKNVLEEGLDKYWAPEENQNEWVLYLEFKDLVSFNVLEIREPIHMGQRIASFHLETRKTGSGEWERVVSGTTVGNKRLLRFLNVVESRSLKLVVDKARTDPLISYLGLYMDKFSGSSRNTTKITITRTLKEEQQLHDL

SEQ ID NO: 72673 - DNA, 3375 bp, Arabidopsis thaliana
  misc_feature (1)..(3375): Ceres Seq. ID no. 4943891
  misc_feature: MA Experiment ID: 20000180 Result: Up-regulated in Transcription
  misc_feature: MA Experiment 20000180 PARAMETER Experiment Name: At_Germinating_Seeds_P Parameter: Age (hr) Value: 24 vs. 0
  misc_feature: MA Experiment 20000180 PARAMETER Experiment Name: At_Germinating_Seeds_P Parameter: Tissue Value: Germinating Seeds
  misc_feature: MA Experiment ID: 20000185 Result: Up-regulated in Transcription
  misc_feature: MA Experiment 20000185 PARAMETER Experiment Name: At_Roots__P Parameter: Age (day) Value: 7 vs. 21
  misc_feature: MA Experiment 20000185 PARAMETER Experiment Name: At_Roots__P Parameter: Organism Value: A. thaliana
  misc_feature: MA Experiment 20000185 PARAMETER Experiment Name: At_Roots__P Parameter: Tissue Value: Roots vs. Whole Plant
  misc_feature: MA Experiment ID: 20000794 Result: Up-regulated in Transcription
  misc_feature: MA Experiment 20000794 PARAMETER Experiment Name: At_Petals_P Parameter: Age (day) Value: 23-25 days
  misc_feature: MA Experiment 20000794 PARAMETER Experiment Name: At_Petals_P Parameter: Plant Line Value: WS
  misc_feature: MA Experiment 20000794 PARAMETER Experiment Name: At_Petals_P Parameter: Tissue Value: Petals vs. Whole plant
atgttcgtcagaaaatttctgcagaaatcctccggcggtcagaatcctcctcctcctatagctcctccgcctcggggatgtttgatggcagaagatttggatcctcatattatcacccactctgggataccttcgacggcgtctcttcttgcctttgaccctattcaatgcctcttggctgtgggaacactagatggaaggataaaagtgattggtggcgataacatcgaggcaattcttgcatctcctaagcagttacctttcaaaaacttagagttcatgcagaaccaaggctttctggttagcatctcaaatgaaaacgagattcaggtttgggacttggatcttaggcaaccagcatcaagcttaaagtgggagtcaaacattactgcgtttgcaatccttcatggcactggttacatgtatgttggtgatgagtacggtatggtgtctgttctaaactacagcgctgacgaagggaaattactgcagcttccttattatgttccaactgatgctttatctgaagcagcggggctttcatctcctattgattatccggttgttggacttctttcccagccttgttcaaagggaactagattgttgattgcattttcaaatggattactttttctttgggatgcatcagaagatcatgtcgtgttagttcgggggaacaaagatctacctgtggagggtaaaacagttgctgattctcttgaagcttcacatgatgagctttccaatcttgaactcgatggaaaagagataagttctttgtgttgggcatcaactgatggttcagttcttgctgttggctatgtggatggggatatattattttgggacttttctgatgggcaaaaggggaagccatctaatcacgttgttaagttacagttgtcttcggctgagaaaagacttcctgtcattgttatgcattggtgtttggatgtatcccgcaagagtagtggtggaaaactcttcatctatggtggtgatatcattggatctgacgaagtacttacgatgttaggtcttgattggtcttctggtatgggaggtctgaaatgtgttggccgtgctgacctgacccttagtggttcatttgctgatatggtcttgtctccaattgccagttcaaggcagagtggggtgtttttatttctgttgacaaatccaggacaactgcaagcatatgacgatacctctctggcttctctgatgtctcagaaagagaataagatttctgtttctccactgccatatccaatggttgtaccaacgatggatccacatatgacagtagcaacgttttctgcattaaatgtgaatgataaaacgtcattagctctttctgagatagtcttagctgcaaaagctcgaacccctcgtaccccatccggagaaagtgcacaatggcctctgacaggtggtgttccaagccacgttgatgactacaagcttgaaagactttacatggcaggatatcaagatgggtctatgcgaatatgggatgcaacctatccatgtctgtcccttatttatattttggagccaaaggcaagtgttattgacataactggagtagatgcatctgtaacggcattttgcttctgctctaagacttcttgtttggctgttggtaacgaatgtggtatggttcgcctatacaagttggtcggccatacaagtggaggaactttggaagttgttaccaacactgagaagaaaggtttggctattgttacaacgttgacactatggatttgttatgctttatctcatgctgttggttcattacttgtagctcaccatttgcatcaagaagatggtcctcaatggttggctgcgttttccttcctgagttccccagtgtgcaccctgcaatttgtacagtctacaagaaggcttgccgtgggatttaaatgtggcaaggttgcagtgcttgacattggtgtgccgtcagtattatttgttacaaatagcttatctgactcaggttctccgatcaagtcactctatgtgaaatcctcttcagctccaacaggctcaaaaagtgatccaactgatcacaactccataaattctgaagatgatttactcttgtgtgcaatgaccaaagatggacagaccattcttttggatggcaatactgggaaaatacttgcctcttgcctgagacctctaaagaacccaactgcgatttgtatgcacattatagagaactgctatgaaaactatgaaacgcccagtgaaaaaccagctgaaaatccatctgggaaggataaacatgagaacaaatctcatataatcaaagctagtgagagtcattcaccagacggtgaacagaatgctgtcacagaaacaaaacttattgatcagatatttgcgaattcattatttctcatgtgttctgaggatgcactgcgcttgtatactgtaaagtctctatctcagggaagtcttgagagcattatggaggtaaatcttccaaggccgtgttgctggatgggaatcctaaaaaaagatggaagggaatgtgcagtactcctgttttaccgaacagggcatattgaaataagatctttcccgaatcttgaagttgtgggagagagctctttgctgtcacttcttaggtggaacttcaagcctaacatggagaagacagtatgttcagatgatttcggccatgtcgtcctggtaaatggttgtgaagttgccatcctttcgtttttggcccacgcaaacggcttcaggctcccagagtctttacctttgcttcatgacaaagtccttgcagcagctgctgacgctacctttagccatatctctgttcataagaaaaatcatgatggcgctcccaaattcctaagtaacattatcaaaggcttcagatcaagcactgaacagaagatggaccaagtacaagatttctcccacctggggaacatcttttctaatccaccatacttaaaaccttctgataccggtggcgacgacgaaaagattgttgagctaaacatagatgacatcgagatagatgaacctgtgatcatcttgccgttgacagagaaagacaaaaaagaaaagaaagataagagaacggataaggaaaagctgttcgacggtgcatccagcgatgcacaacccaaaacaagaacagtggatgaaattaagtccaaatacagaaaagctggggaaacctcagcaatagcttcacaagcgaaggacaaacttcatgagcggggagaaaaactcgagagaatcagccaacgcacagctgagcttcaagacaatgctgagaactttgcatccatggcacatgaacttgctaagcaaatggagaagcgaaaatggtggaacatatga

SEQ ID NO: 72674 - protein, 1124 aa, Arabidopsis thaliana
  peptide (1)..(1124): Ceres Seq. ID no. 4943892
  misc_feature (1056)..(1116): Pfam Name: Synaptobrevin Pfam Description: Synaptobrevin
  misc_feature (33)..(579): Homolog of NCBI NO: 34898238 NR Description: P0034A04.30 [Oryza sativa (japonica >gi|29837189|dbj|BAC75571.1| hypothetical protein [Oryza sativa
  misc_feature (748)..(1124): Homolog of NCBI NO: 34898238 NR Description: P0034A04.30 [Oryza sativa (japonica >gi|29837189|dbj|BAC75571.1| hypothetical protein [Oryza sativa
  misc_feature (619)..(726): Homolog of NCBI NO: 34898238 NR Description: P0034A04.30 [Oryza sativa (japonica >gi|29837189|dbj|BAC75571.1| hypothetical protein [Oryza sativa
  misc_feature (1)..(349): Homolog of NCBI NO: 38345401 NR Description: OSJNBa0017B10.7 [Oryza sativa (japonica
  misc_feature (808)..(1081): Homolog of NCBI NO: 38345401 NR Description: OSJNBa0017B10.7 [Oryza sativa (japonica
  misc_feature (486)..(558): Homolog of NCBI NO: 38345401 NR Description: OSJNBa0017B10.7 [Oryza sativa (japonica
  misc_feature (966)..(1120): Homolog of NCBI NO: 38345401 NR Description: OSJNBa0017B10.7 [Oryza sativa (japonica
  misc_feature (8)..(215): Homolog of NCBI NO: 13540648 NR Description: tomosyn [Rattus norvegicus]
  misc_feature (8)..(215): Homolog of NCBI NO: 30387640 NR Description: isoform s-tomosyn; tomosyn [Rattus norvegicus]
  misc_feature (1038)..(1122): Homolog of NCBI NO: 13540648 NR Description: tomosyn [Rattus norvegicus]
MFVRKFLQKSSGGQNPPPPIAPPPRGCLMAEDLDPHIITHSGIPSTASLLAFDPIQCLLAVGTLDGRIKVIGGDNIEAILASPKQLPFKNLEFMQNQGFLVSISNENEIQVWDLDLRQPASSLKWESNITAFAILHGTGYMYVGDEYGMVSVLNYSADEGKLLQLPYYVPTDALSEAAGLSSPIDYPVVGLLSQPCSKGTRLLIAFSNGLLFLWDASEDHVVLVRGNKDLPVEGKTVADSLEASHDELSNLELDGKEISSLCWASTDGSVLAVGYVDGDILFWDFSDGQKGKPSNHVVKLQLSSAEKRLPVIVMHWCLDVSRKSSGGKLFIYGGDIIGSDEVLTMLGLDWSSGMGGLKCVGRADLTLSGSFADMVLSPIASSRQSGVFLFLLTNPGQLQAYDDTSLASLMSQKENKISVSPLPYPMVVPTMDPHMTVATFSALNVNDKTSLALSEIVLAAKARTPRTPSGESAQWPLTGGVPSHVDDYKLERLYMAGYQDGSMRIWDATYPCLSLIYILEPKASVIDITGVDASVTAFCFCSKTSCLAVGNECGMVRLYKLVGHTSGGTLEVVTNTEKKGLAIVTTLTLWICYALSHAVGSLLVAHHLHQEDGPQWLAAFSFLSSPVCTLQFVQSTRRLAVGFKCGKVAVLDIGVPSVLFVTNSLSDSGSPIKSLYVKSSSAPTGSKSDPTDHNSINSEDDLLLCAMTKDGQTILLDGNTGKILASCLRPLKNPTAICMHIIENCYENYETPSEKPAENPSGKDKHENKSHIIKASESHSPDGEQNAVTETKLIDQIFANSLFLMCSEDALRLYTVKSLSQGSLESIMEVNLPRPCCWMGILKKDGRECAVLLFYRTGHIEIRSFPNLEVVGESSLLSLLRWNFKPNMEKTVCSDDFGHVVLVNGCEVAILSFLAHANGFRLPESLPLLHDKVLAAAADATFSHISVHKKNHDGAPKFLSNIIKGFRSSTEQKMDQVQDFSHLGNIFSNPPYLKPSDTGGDDEKIVELNIDDIEIDEPVIILPLTEKDKKEKKDKRTDKEKLFDGASSDAQPKTRTVDEIKSKYRKAGETSAIASQAKDKLHERGEKLERISQRTAELQDNAENFASMAHELAKQMEKRKWWNI

SEQ ID NO: 72675 - protein, 1096 aa, Arabidopsis thaliana
  peptide (1)..(1096): Ceres Seq. ID no. 4943893
  misc_feature (1028)..(1088): Pfam Name: Synaptobrevin Pfam Description: Synaptobrevin
  misc_feature (5)..(551): Homolog of NCBI NO: 34898238 NR Description: P0034A04.30 [Oryza sativa (japonica >gi|29837189|dbj|BAC75571.1| hypothetical protein [Oryza sativa
  misc_feature (720)..(1096): Homolog of NCBI NO: 34898238 NR Description: P0034A04.30 [Oryza sativa (japonica >gi|29837189|dbj|BAC75571.1| hypothetical protein [Oryza sativa
  misc_feature (591)..(698): Homolog of NCBI NO: 34898238 NR Description: P0034A04.30 [Oryza sativa (japonica >gi|29837189|dbj|BAC75571.1| hypothetical protein [Oryza sativa
  misc_feature (1)..(321): Homolog of NCBI NO: 38345401 NR Description: OSJNBa0017B10.7 [Oryza sativa (japonica
  misc_feature (780)..(1053): Homolog of NCBI NO: 38345401 NR Description: OSJNBa0017B10.7 [Oryza sativa (japonica
  misc_feature (458)..(530): Homolog of NCBI NO: 38345401 NR Description: OSJNBa0017B10.7 [Oryza sativa (japonica
  misc_feature (938)..(1092): Homolog of NCBI NO: 38345401 NR Description: OSJNBa0017B10.7 [Oryza sativa (japonica
  misc_feature (1)..(187): Homolog of NCBI NO: 13540648 NR Description: tomosyn [Rattus norvegicus]
  misc_feature (1)..(187): Homolog of NCBI NO: 30387640 NR Description: isoform s-tomosyn; tomosyn [Rattus norvegicus]
  misc_feature (1010)..(1094): Homolog of NCBI NO: 13540648 NR Description: tomosyn [Rattus norvegicus]
MAEDLDPHIITHSGIPSTASLLAFDPIQCLLAVGTLDGRIKVIGGDNIEAILASPKQLPFKNLEFMQNQGFLVSISNENEIQVWDLDLRQPASSLKWESNITAFAILHGTGYMYVGDEYGMVSVLNYSADEGKLLQLPYYVPTDALSEAAGLSSPIDYPVVGLLSQPCSKGTRLLIAFSNGLLFLWDASEDHVVLVRGNKDLPVEGKTVADSLEASHDELSNLELDGKEISSLCWASTDGSVLAVGYVDGDILFWDFSDGQKGKPSNHVVKLQLSSAEKRLPVIVMHWCLDVSRKSSGGKLFIYGGDIIGSDEVLTMLGLDWSSGMGGLKCVGRADLTLSGSFADMVLSPIASSRQSGVFLFLLTNPGQLQAYDDTSLASLMSQKENKISVSPLPYPMVVPTMDPHMTVATFSALNVNDKTSLALSEIVLAAKARTPRTPSGESAQWPLTGGVPSHVDDYKLERLYMAGYQDGSMRIWDATYPCLSLIYILEPKASVIDITGVDASVTAFCFCSKTSCLAVGNECGMVRLYKLVGHTSGGTLEVVTNTEKKGLAIVTTLTLWICYALSHAVGSLLVAHHLHQEDGPQWLAAFSFLSSPVCTLQFVQSTRRLAVGFKCGKVAVLDIGVPSVLFVTNSLSDSGSPIKSLYVKSSSAPTGSKSDPTDHNSINSEDDLLLCAMTKDGQTILLDGNTGKILASCLRPLKNPTAICMHIIENCYENYETPSEKPAENPSGKDKHENKSHIIKASESHSPDGEQNAVTETKLIDQIFANSLFLMCSEDALRLYTVKSLSQGSLESIMEVNLPRPCCWMGILKKDGRECAVLLFYRTGHIEIRSFPNLEVVGESSLLSLLRWNFKPNMEKTVCSDDFGHVVLVNGCEVAILSFLAHANGFRLPESLPLLHDKVLAAAADATFSHISVHKKNHDGAPKFLSNIIKGFRSSTEQKMDQVQDFSHLGNIFSNPPYLKPSDTGGDDEKIVELNIDDIEIDEPVIILPLTEKDKKEKKDKRTDKEKLFDGASSDAQPKTRTVDEIKSKYRKAGETSAIASQAKDKLHERGEKLERISQRTAELQDNAENFASMAHELAKQMEKRKWWNI

SEQ ID NO: 72676 - protein, 1031 aa, Arabidopsis thaliana
  peptide (1)..(1031): Ceres Seq. ID no. 4943894
  misc_feature (963)..(1023): Pfam Name: Synaptobrevin Pfam Description: Synaptobrevin
  misc_feature (1)..(486): Homolog of NCBI NO: 34898238 NR Description: P0034A04.30 [Oryza sativa (japonica >gi|29837189|dbj|BAC75571.1| hypothetical protein [Oryza sativa
  misc_feature (655)..(1031): Homolog of NCBI NO: 34898238 NR Description: P0034A04.30 [Oryza sativa (japonica >gi|29837189|dbj|BAC75571.1| hypothetical protein [Oryza sativa
  misc_feature (526)..(633): Homolog of NCBI NO: 34898238 NR Description: P0034A04.30 [Oryza sativa (japonica >gi|29837189|dbj|BAC75571.1| hypothetical protein [Oryza sativa
  misc_feature (1)..(256): Homolog of NCBI NO: 38345401 NR Description: OSJNBa0017B10.7 [Oryza sativa (japonica
  misc_feature (715)..(988): Homolog of NCBI NO: 38345401 NR Description: OSJNBa0017B10.7 [Oryza sativa (japonica
  misc_feature (393)..(465): Homolog of NCBI NO: 38345401 NR Description: OSJNBa0017B10.7 [Oryza sativa (japonica
  misc_feature (873)..(1027): Homolog of NCBI NO: 38345401 NR Description: OSJNBa0017B10.7 [Oryza sativa (japonica
  misc_feature (1)..(122): Homolog of NCBI NO: 13540648 NR Description: tomosyn [Rattus norvegicus]
  misc_feature (1)..(122): Homolog of NCBI NO: 30387640 NR Description: isoform s-tomosyn; tomosyn [Rattus norvegicus]
  misc_feature (945)..(1029): Homolog of NCBI NO: 13540648 NR Description: tomosyn [Rattus norvegicus]
MQNQGFLVSISNENEIQVWDLDLRQPASSLKWESNITAFAILHGTGYMYVGDEYGMVSVLNYSADEGKLLQLPYYVPTDALSEAAGLSSPIDYPVVGLLSQPCSKGTRLLIAFSNGLLFLWDASEDHVVLVRGNKDLPVEGKTVADSLEASHDELSNLELDGKEISSLCWASTDGSVLAVGYVDGDILFWDFSDGQKGKPSNHVVKLQLSSAEKRLPVIVMHWCLDVSRKSSGGKLFIYGGDIIGSDEVLTMLGLDWSSGMGGLKCVGRADLTLSGSFADMVLSPIASSRQSGVFLFLLTNPGQLQAYDDTSLASLMSQKENKISVSPLPYPMVVPTMDPHMTVATFSALNVNDKTSLALSEIVLAAKARTPRTPSGESAQWPLTGGVPSHVDDYKLERLYMAGYQDGSMRIWDATYPCLSLIYILEPKASVIDITGVDASVTAFCFCSKTSCLAVGNECGMVRLYKLVGHTSGGTLEVVTNTEKKGLAIVTTLTLWICYALSHAVGSLLVAHHLHQEDGPQWLAAFSFLSSPVCTLQFVQSTRRLAVGFKCGKVAVLDIGVPSVLFVTNSLSDSGSPIKSLYVKSSSAPTGSKSDPTDHNSINSEDDLLLCAMTKDGQTILLDGNTGKILASCLRPLKNPTAICMHIIENCYENYETPSEKPAENPSGKDKHENKSHIIKASESHSPDGEQNAVTETKLIDQIFANSLFLMCSEDALRLYTVKSLSQGSLESIMEVNLPRPCCWMGILKKDGRECAVLLFYRTGHIEIRSFPNLEVVGESSLLSLLRWNFKPNMEKTVCSDDFGHVVLVNGCEVAILSFLAHANGFRLPESLPLLHDKVLAAAADATFSHISVHKKNHDGAPKFLSNIIKGFRSSTEQKMDQVQDFSHLGNIFSNPPYLKPSDTGGDDEKIVELNIDDIEIDEPVIILPLTEKDKKEKKDKRTDKEKLFDGASSDAQPKTRTVDEIKSKYRKAGETSAIASQAKDKLHERGEKLERISQRTAELQDNAENFASMAHELAKQMEKRKWWNI

SEQ ID NO: 72677 - DNA, 1701 bp, Arabidopsis thaliana
  misc_feature (1)..(1701): Ceres Seq. ID no. 4944047
  misc_feature: MA Experiment ID: 20000315 Result: Down-regulated in Transcription
  misc_feature: MA Experiment 20000315 PARAMETER Experiment Name: At_14day_Shoots-Roots_Sub_P Parameter: Age (day) Value: 14
  misc_feature: MA Experiment 20000315 PARAMETER Experiment Name: At_14day_Shoots-Roots_Sub_P Parameter: Organism Value: A. thaliana
  misc_feature: MA Experiment 20000315 PARAMETER Experiment Name: At_14day_Shoots-Roots_Sub_P Parameter: Plant Line Value: WS
  misc_feature: MA Experiment 20000315 PARAMETER Experiment Name: At_14day_Shoots-Roots_Sub_P Parameter: Tissue Value: Shoots vs. Whole Plant
atggcagctcaaggtttgttattgattttcttattcttctctagctcttcctcacttgatgataacagtaatcgaatcgagttcacttgtttgtttttgttggtgacaggaggtgattcatatgaggaagcgttggctgctttgtcgtctttgatcacgaaacgaagtcgtgctgataagagcaataaaggggatcgctttgagttagtctttgattatctcaagctacttgacctggaagaagacattttaaagatgaatgttattcatgtcgctggtaccaaaggcaagggatccacatgtacctttacagagtctattattcgaaactatggctttcgaactggactcttcacttcacctcacctcattgatgtccgggaaagatttcgtttggatggtgtggacataagtgaagagaaatttttgggatatttctggtggtgctataacaggctcaagttttggtacttagagaaattgtattattggaactattttcatcgagggggtggtgatgcggtagagctcatgtatagtgtcttccctgtagatgctgctatattggaggttggattaggtggaaagtttgatgccaccaatgcggttcagaaacctgtggtatgtggtatttcttcactcggatatgaccacatggaaattctaggtgatacacttggaaaaattgctggtgagaaggctggaattttcaagcttggagttccagctttcacagtgccccaacctgatgaagccatgcgtgtccttgaagagaaagcttccgaaacagaagtgaatctcgaagtggtgcagccactaaccgcaaggctgttaagtggtcagaaacttgggcttgatggggaacaccaatatgtcaatgctggtctagcagtttcgcttgcctctatctggcttcagcaaattggtaaactagaagttccgagtcggactcagatgagtattctgcctgagaaattcatcaaagggttagctacagcgagtttgcaaggacgagcacaggtcgtccctgatcaatatactgaatctcggacttcaggagatctagtattttatctggatggagctcacagtccagaaagcatggaagcatgcgccaaatggttttcggttgcggttaagggagacaaccagtcagggagttcaggacatttgatattgttgttcaattgtatgtcagttcgggacccaaatctactgcttccacatctaaagaatatgtgcgcaaaatacggtgtcaatttcaagaaggcattgtttgtaccaaacatgtcggtgtatcataaggttggtacagcagctgatttgccagagaatgatccacaggttgacttgtcatggcagttcacacttcagaaagtgtgggaaagccttgtgcagagtgaaagagatggagaaaaagatggtgaaagtgatggaaacagtgaggtgtttacttcactacccatggcaataaaatgtctaagggacactgtacatgagagtagctcagccacacgtttccagggactgtttgtgtgtgcaggtccttgtaactggttcgttacatcttgtgggcgatgtactgagattaatcagaaaatgaagagaaacaaacacacttcacttttcaaatttcaatacacgagtcgtcatccaccaatcaccgtacccactgtggaagaggatggcatttcttattaa

SEQ ID NO: 72678 - protein, 566 aa, Arabidopsis thaliana
  peptide (1)..(566): Ceres Seq. ID no. 4944048
  misc_feature (183)..(252): Pfam Name: Mur ligase family, catalytic domain Pfam Description: Mur ligase family, catalytic domain
  misc_feature (1)..(566): Homolog of NCBI NO: 10177571 NR Description: tetrahydrofolylpolyglutamate synthase-like
  misc_feature (37)..(392): Homolog of NCBI NO: 30681208 NR Description: folylpolyglutamate synthase (fpgs2) [Arabidopsis
  misc_feature (382)..(510): Homolog of NCBI NO: 30681208 NR Description: folylpolyglutamate synthase (fpgs2) [Arabidopsis
  misc_feature (37)..(392): Homolog of NCBI NO: 17976705 NR Description: dihydrofolate synthetase /folylpolyglutamate
  misc_feature (382)..(510): Homolog of NCBI NO: 17976705 NR Description: dihydrofolate synthetase /folylpolyglutamate
  misc_feature (162)..(510): Homolog of NCBI NO: 30694284 NR Description: folylpolyglutamate-dihydrofolate synthase
  misc_feature (41)..(154): Homolog of NCBI NO: 30694284 NR Description: folylpolyglutamate-dihydrofolate synthase
  misc_feature (162)..(510): Homolog of NCBI NO: 21592378 NR Description: tetrahydrofolylpolyglutamate synthase
  misc_feature (41)..(154): Homolog of NCBI NO: 21592378 NR Description: tetrahydrofolylpolyglutamate synthase
  misc_feature (41)..(510): Homolog of NCBI NO: 30694288 NR Description: folylpolyglutamate-dihydrofolate synthase
MAAQGLLLIFLFFSSSSSLDDNSNRIEFTCLFLLVTGGDSYEEALAALSSLITKRSRADKSNKGDRFELVFDYLKLLDLEEDILKMNVIHVAGTKGKGSTCTFTESIIRNYGFRTGLFTSPHLIDVRERFRLDGVDISEEKFLGYFWWCYNRLKFWYLEKLYYWNYFHRGGGDAVELMYSVFPVDAAILEVGLGGKFDATNAVQKPVVCGISSLGYDHMEILGDTLGKIAGEKAGIFKLGVPAFTVPQPDEAMRVLEEKASETEVNLEVVQPLTARLLSGQKLGLDGEHQYVNAGLAVSLASIWLQQIGKLEVPSRTQMSILPEKFIKGLATASLQGRAQVVPDQYTESRTSGDLVFYLDGAHSPESMEACAKWFSVAVKGDNQSGSSGHLILLFNCMSVRDPNLLLPHLKNMCAKYGVNFKKALFVPNMSVYHKVGTAADLPENDPQVDLSWQFTLQKVWESLVQSERDGEKDGESDGNSEVFTSLPMAIKCLRDTVHESSSATRFQGLFVCAGPCNWFVTSCGRCTEINQKMKRNKHTSLFKFQYTSRHPPITVPTVEEDGISY

SEQ ID NO: 72679 - protein, 481 aa, Arabidopsis thaliana
  peptide (1)..(481): Ceres Seq. ID no. 4944049
  misc_feature (98)..(167): Pfam Name: Mur ligase family, catalytic domain Pfam Description: Mur ligase family, catalytic domain
  misc_feature (1)..(481): Homolog of NCBI NO: 10177571 NR Description: tetrahydrofolylpolyglutamate synthase-like
  misc_feature (1)..(307): Homolog of NCBI NO: 30681208 NR Description: folylpolyglutamate synthase (fpgs2) [Arabidopsis
  misc_feature (297)..(425): Homolog of NCBI NO: 30681208 NR Description: folylpolyglutamate synthase (fpgs2) [Arabidopsis
  misc_feature (1)..(307): Homolog of NCBI NO: 17976705 NR Description: dihydrofolate synthetase /folylpolyglutamate
  misc_feature (297)..(425): Homolog of NCBI NO: 17976705 NR Description: dihydrofolate synthetase /folylpolyglutamate
  misc_feature (77)..(425): Homolog of NCBI NO: 30694284 NR Description: folylpolyglutamate-dihydrofolate synthase
  misc_feature (1)..(69): Homolog of NCBI NO: 30694284 NR Description: folylpolyglutamate-dihydrofolate synthase
  misc_feature (77)..(425): Homolog of NCBI NO: 21592378 NR Description: tetrahydrofolylpolyglutamate synthase
  misc_feature (1)..(69): Homolog of NCBI NO: 21592378 NR Description: tetrahydrofolylpolyglutamate synthase
  misc_feature (1)..(425): Homolog of NCBI NO: 30694288 NR Description: folylpolyglutamate-dihydrofolate synthase
MNVIHVAGTKGKGSTCTFTESIIRNYGFRTGLFTSPHLIDVRERFRLDGVDISEEKFLGYFWWCYNRLKFWYLEKLYYWNYFHRGGGDAVELMYSVFPVDAAILEVGLGGKFDATNAVQKPVVCGISSLGYDHMEILGDTLGKIAGEKAGIFKLGVPAFTVPQPDEAMRVLEEKASETEVNLEVVQPLTARLLSGQKLGLDGEHQYVNAGLAVSLASIWLQQIGKLEVPSRTQMSILPEKFIKGLATASLQGRAQVVPDQYTESRTSGDLVFYLDGAHSPESMEACAKWFSVAVKGDNQSGSSGHLILLFNCMSVRDPNLLLPHLKNMCAKYGVNFKKALFVPNMSVYHKVGTAADLPENDPQVDLSWQFTLQKVWESLVQSERDGEKDGESDGNSEVFTSLPMAIKCLRDTVHESSSATRFQGLFVCAGPCNWFVTSCGRCTEINQKMKRNKHTSLFKFQYTSRHPPITVPTVEEDGISY

SEQ ID NO: 72680 - protein, 389 aa, Arabidopsis thaliana
  peptide (1)..(389): Ceres Seq. ID no. 4944050
  misc_feature (6)..(75): Pfam Name: Mur ligase family, catalytic domain Pfam Description: Mur ligase family, catalytic domain
  misc_feature (1)..(389): Homolog of NCBI NO: 10177571 NR Description: tetrahydrofolylpolyglutamate synthase-like
  misc_feature (1)..(215): Homolog of NCBI NO: 30681208 NR Description: folylpolyglutamate synthase (fpgs2) [Arabidopsis
  misc_feature (205)..(333): Homolog of NCBI NO: 30681208 NR Description: folylpolyglutamate synthase (fpgs2) [Arabidopsis
  misc_feature (1)..(215): Homolog of NCBI NO: 17976705 NR Description: dihydrofolate synthetase /folylpolyglutamate
  misc_feature (205)..(333): Homolog of NCBI NO: 17976705 NR Description: dihydrofolate synthetase /folylpolyglutamate
  misc_feature (1)..(333): Homolog of NCBI NO: 30694284 NR Description: folylpolyglutamate-dihydrofolate synthase
  misc_feature (1)..(333): Homolog of NCBI NO: 21592378 NR Description: tetrahydrofolylpolyglutamate synthase
  misc_feature (1)..(333): Homolog of NCBI NO: 30694288 NR Description: folylpolyglutamate-dihydrofolate synthase
  misc_feature (1)..(333): Homolog of NCBI NO: 30694286 NR Description: folylpolyglutamate-dihydrofolate synthase [Arabidopsis thaliana] >gi|15292867|gb|AAK92804.1| putative synthase precursor [Arabidopsis thaliana]
  misc_feature (1)..(333): Homolog of NCBI NO: 37535812 NR Description: putative folylpolyglutamate synthetase [Oryza
MYSVFPVDAAILEVGLGGKFDATNAVQKPVVCGISSLGYDHMEILGDTLGKIAGEKAGIFKLGVPAFTVPQPDEAMRVLEEKASETEVNLEVVQPLTARLLSGQKLGLDGEHQYVNAGLAVSLASIWLQQIGKLEVPSRTQMSILPEKFIKGLATASLQGRAQVVPDQYTESRTSGDLVFYLDGAHSPESMEACAKWFSVAVKGDNQSGSSGHLILLFNCMSVRDPNLLLPHLKNMCAKYGVNFKKALFVPNMSVYHKVGTAADLPENDPQVDLSWQFTLQKVWESLVQSERDGEKDGESDGNSEVFTSLPMAIKCLRDTVHESSSATRFQGLFVCAGPCNWFVTSCGRCTEINQKMKRNKHTSLFKFQYTSRHPPITVPTVEEDGISY

SEQ ID NO: 72681 - DNA, 1716 bp, Arabidopsis thaliana
  misc_feature (1)..(1716): Ceres Seq. ID no. 4944063
atggagaatttagtgaagagctgcgcagggatcgagaagaaaagaagcaatttgactccatcgatggaagatatacttacagagtcaaaggagagaagcagcactagcggagcgagctacgaaagctcctccaccaccaccgtcgcttcgtcttctccaccaccaccaccgtcgcagattctggatgtggagatgatgaaggagagatttgcaaagttgttacttggtgaagatatgtcaggttctggtaaaggtgtgtgtacggctttagctatctccaacgccataacaaatctctgtgctacgattttcgggcaactatggagattagagccactttcaagcgaaaagaaggagatgtggagaagggaaatggagtggattcttagtgttagtgatcacatcgtcgagttaacaccttcaacacaaacttatccagacggcaacaagtttgaggtcatgacttgtcgaccaagatttgatcttttcatcaacctccctgctctccgtaaactagacaatatgcttctcgatatattggcgagtttcaagaaaactgagttctggtatgttgatcaagggatcgttgcttcggaaaacgatggctcagcttctttccgcagaaagattcagcgccaagaggagaaatggtggttgcctgttcctcgtttagcaccgaatggtcttactgaagaagcaagaacagaattgaatcataagagggaatgtgcgacgcagatacttaaagctgcaatggctattaacagccttgctttaaccgaaatggatgttcctaaatcataccttgaaacccttccaaagaacggtaggtcctgccttggggatgttatctacaggtatgtaacatctgacaaattttctgcggagtctcttctcgattgccttgatctgtcctctgagcatattgctcttgatatcgcaaaccgtgtggaagcttcgatatatgtttggaggagaagagttcaaacaaaacttggagtcaacaataatacttcaagcactactccaaagttaacatgggaaatggtcaaagaactaatggctgctggtgacaaaaggggattgcttgtggagagatcggaaactctcttacgttgcttgaagcagcggtttccttctctaacgcagacttctctagacataagcaagattcaatggaacaaggatattgggaaatcaatcctcgaaagctactcaagggctttggagagcttagcatcaaacatcatagcacgaatcgatgatttactctacgtggacgacttaacaaagcaatcagatgataacaatcttttgtcaagtccagcggtcagcagcattatagctcacaagaaagtagtaccactcccttatctaatatctgcatcaggaactccatatagaacaagcttctcaacaacaccaggcttctctccttcaatgattagccccaagaaaggagagaggagaacaccttactccagcaaggacactaacaaaatcattgagaaaggtcttccttctcgaggatatggagtgagaagagtcttgaacaattatcttggcatggaatcaaaactgaaaatatgcgttaatccgtcagataatgcagatacagcagtgattaaccaaatcagcaaagacgtggaagaagagaagaaaagaaactcaacatcagtccatcaaaagggtcctccaaagtacactgtctcttaa

SEQ ID NO: 72682 - protein, 571 aa, Arabidopsis thaliana
  peptide (1)..(571): Ceres Seq. ID no. 4944064
  misc_feature (1)..(434): Pfam Name: Domain of unknown function (DUF315) Pfam Description: Domain of unknown function (DUF315)
  misc_feature (1)..(571): Homolog of NCBI NO: 15239292 NR Description: putative protein; protein id: At5g05940.1 thaliana] >gi|10177567|dbj|BAB10799.1|
  misc_feature (58)..(541): Homolog of NCBI NO: 15241663 NR Description: putative protein; protein id: At5g02010.1
  misc_feature (62)..(517): Homolog of NCBI NO: 34908302 NR Description: P0005H10.23 [Oryza sativa (japonica
  misc_feature (62)..(521): Homolog of NCBI NO: 15228166 NR Description: putative protein; protein id: At3g55660.1
  misc_feature (56)..(506): Homolog of NCBI NO: 15233845 NR Description: putative protein; protein id: At4g38430.1, by cDNA: gi_15810308, supported by cDNA: gi_15912194 [Arabidopsis >gi|18421309|ref|NP_568515.1| Expressed protein [Arabidopsis
  misc_feature (56)..(506): Homolog of NCBI NO: 15810309 NR Description: unknown protein [Arabidopsis thaliana]
  misc_feature (16)..(434): Homolog of NCBI NO: 15236138 NR Description: putative protein; protein id: At4g00460.1
  misc_feature (19)..(427): Homolog of NCBI NO: 15223455 NR Description: hypothetical protein; protein id: At1g01700.1
  misc_feature (62)..(432): Homolog of NCBI NO: 37536670 NR Description: hypothetical protein [Oryza sativa (japonica group)] >gi|10140653|gb|AAG13489.1| hypothetical protein [Oryza
  misc_feature (164)..(427): Homolog of NCBI NO: 25349309 NR Description: hypothetical protein T1N6.8 - Arabidopsis >gi|8671837|gb|AAF78400.1|AC009273_6 Contains strong similarity an unknown protein CAB81591 gi|7263554 from Arabidopsis thaliana
MENLVKSCAGIEKKRSNLTPSMEDILTESKERSSTSGASYESSSTTTVASSSPPPPPSQILDVEMMKERFAKLLLGEDMSGSGKGVCTALAISNAITNLCATIFGQLWRLEPLSSEKKEMWRREMEWILSVSDHIVELTPSTQTYPDGNKFEVMTCRPRFDLFINLPALRKLDNMLLDILASFKKTEFWYVDQGIVASENDGSASFRRKIQRQEEKWWLPVPRLAPNGLTEEARTELNHKRECATQILKAAMAINSLALTEMDVPKSYLETLPKNGRSCLGDVIYRYVTSDKFSAESLLDCLDLSSEHIALDIANRVEASIYVWRRRVQTKLGVNNNTSSTTPKLTWEMVKELMAAGDKRGLLVERSETLLRCLKQRFPSLTQTSLDISKIQWNKDIGKSILESYSRALESLASNIIARIDDLLYVDDLTKQSDDNNLLSSPAVSSIIAHKKVVPLPYLISASGTPYRTSFSTTPGFSPSMISPKKGERRTPYSSKDTNKIIEKGLPSRGYGVRRVLNNYLGMESKLKICVNPSDNADTAVINQISKDVEEEKKRNSTSVHQKGPPKYTVS

SEQ ID NO: 72683 - protein, 550 aa, Arabidopsis thaliana
  peptide (1)..(550): Ceres Seq. ID no. 4944065
  misc_feature (1)..(413): Pfam Name: Domain of unknown function (DUF315) Pfam Description: Domain of unknown function (DUF315)
  misc_feature (1)..(550): Homolog of NCBI NO: 15239292 NR Description: putative protein; protein id: At5g05940.1 thaliana] >gi|10177567|dbj|BAB10799.1|
  misc_feature (37)..(520): Homolog of NCBI NO: 15241663 NR Description: putative protein; protein id: At5g02010.1
  misc_feature (41)..(496): Homolog of NCBI NO: 34908302 NR Description: P0005H10.23 [Oryza sativa (japonica
  misc_feature (41)..(500): Homolog of NCBI NO: 15228166 NR Description: putative protein; protein id: At3g55660.1
  misc_feature (35)..(485): Homolog of NCBI NO: 15233845 NR Description: putative protein; protein id: At4g38430.1, by cDNA: gi_15810308, supported by cDNA: gi_15912194 [Arabidopsis >gi|18421309|ref|NP_568515.1| Expressed protein [Arabidopsis
  misc_feature (35)..(485): Homolog of NCBI NO: 15810309 NR Description: unknown protein [Arabidopsis thaliana]
  misc_feature (1)..(413): Homolog of NCBI NO: 15236138 NR Description: putative protein; protein id: At4g00460.1
  misc_feature (1)..(406): Homolog of NCBI NO: 15223455 NR Description: hypothetical protein; protein id: At1g01700.1
  misc_feature (41)..(411): Homolog of NCBI NO: 37536670 NR Description: hypothetical protein [Oryza sativa (japonica group)] >gi|10140653|gb|AAG13489.1| hypothetical protein [Oryza
  misc_feature (143)..(406): Homolog of NCBI NO: 25349309 NR Description: hypothetical protein T1N6.8 - Arabidopsis >gi|8671837|gb|AAF78400.1|AC009273_6 Contains strong similarity an unknown protein CAB81591 gi|7263554 from Arabidopsis thaliana
MEDILTESKERSSTSGASYESSSTTTVASSSPPPPPSQILDVEMMKERFAKLLLGEDMSGSGKGVCTALAISNAITNLCATIFGQLWRLEPLSSEKKEMWRREMEWILSVSDHIVELTPSTQTYPDGNKFEVMTCRPRFDLFINLPALRKLDNMLLDILASFKKTEFWYVDQGIVASENDGSASFRRKIQRQEEKWWLPVPRLAPNGLTEEARTELNHKRECATQILKAAMAINSLALTEMDVPKSYLETLPKNGRSCLGDVIYRYVTSDKFSAESLLDCLDLSSEHIALDIANRVEASIYVWRRRVQTKLGVNNNTSSTTPKLTWEMVKELMAAGDKRGLLVERSETLLRCLKQRFPSLTQTSLDISKIQWNKDIGKSILESYSRALESLASNIIARIDDLLYVDDLTKQSDDNNLLSSPAVSSIIAHKKVVPLPYLISASGTPYRTSFSTTPGFSPSMISPKKGERRTPYSSKDTNKIIEKGLPSRGYGVRRVLNNYLGMESKLKICVNPSDNADTAVINQISKDVEEEKKRNSTSVHQKGPPKYTVS

SEQ ID NO: 72684 - protein, 507 aa, Arabidopsis thaliana
  peptide (1)..(507): Ceres Seq. ID no. 4944066
  misc_feature (1)..(370): Pfam Name: Domain of unknown function (DUF315) Pfam Description: Domain of unknown function (DUF315)
  misc_feature (1)..(507): Homolog of NCBI NO: 15239292 NR Description: putative protein; protein id: At5g05940.1 thaliana] >gi|10177567|dbj|BAB10799.1|
  misc_feature (1)..(477): Homolog of NCBI NO: 15241663 NR Description: putative protein; protein id: At5g02010.1
  misc_feature (1)..(453): Homolog of NCBI NO: 34908302 NR Description: P0005H10.23 [Oryza sativa (japonica
  misc_feature (1)..(457): Homolog of NCBI NO: 15228166 NR Description: putative protein; protein id: At3g55660.1
  misc_feature (1)..(442): Homolog of NCBI NO: 15233845 NR Description: putative protein; protein id: At4g38430.1, by cDNA: gi_15810308, supported by cDNA: gi_15912194 [Arabidopsis >gi|18421309|ref|NP_568515.1| Expressed protein [Arabidopsis
  misc_feature (1)..(442): Homolog of NCBI NO: 15810309 NR Description: unknown protein [Arabidopsis thaliana]
  misc_feature (1)..(370): Homolog of NCBI NO: 15236138 NR Description: putative protein; protein id: At4g00460.1
  misc_feature (1)..(363): Homolog of NCBI NO: 15223455 NR Description: hypothetical protein; protein id: At1g01700.1
  misc_feature (1)..(368): Homolog of NCBI NO: 37536670 NR Description: hypothetical protein [Oryza sativa (japonica group)] >gi|10140653|gb|AAG13489.1| hypothetical protein [Oryza
  misc_feature (100)..(363): Homolog of NCBI NO: 25349309 NR Description: hypothetical protein T1N6.8 - Arabidopsis >gi|8671837|gb|AAF78400.1|AC009273_6 Contains strong similarity an unknown protein CAB81591 gi|7263554 from Arabidopsis thaliana
MMKERFAKLLLGEDMSGSGKGVCTALAISNAITNLCATIFGQLWRLEPLSSEKKEMWRREMEWILSVSDHIVELTPSTQTYPDGNKFEVMTCRPRFDLFINLPALRKLDNMLLDILASFKKTEFWYVDQGIVASENDGSASFRRKIQRQEEKWWLPVPRLAPNGLTEEARTELNHKRECATQILKAAMAINSLALTEMDVPKSYLETLPKNGRSCLGDVIYRYVTSDKFSAESLLDCLDLSSEHIALDIANRVEASIYVWRRRVQTKLGVNNNTSSTTPKLTWEMVKELMAAGDKRGLLVERSETLLRCLKQRFPSLTQTSLDISKIQWNKDIGKSILESYSRALESLASNIIARIDDLLYVDDLTKQSDDNNLLSSPAVSSIIAHKKVVPLPYLISASGTPYRTSFSTTPGFSPSMISPKKGERRTPYSSKDTNKIIEKGLPSRGYGVRRVLNNYLGMESKLKICVNPSDNADTAVINQISKDVEEEKKRNSTSVHQKGPPKYTVS

SEQ ID NO: 72685 - DNA, 1023 bp, Arabidopsis thaliana
  misc_feature (1)..(1023): Ceres Seq. ID no. 4944172
  misc_feature: MA Experiment ID: 20000315 Result: Up-regulated in Transcription
  misc_feature: MA Experiment 20000315 PARAMETER Experiment Name: At_14day_Shoots-Roots_Sub_P Parameter: Age (day) Value: 14
  misc_feature: MA Experiment 20000315 PARAMETER Experiment Name: At_14day_Shoots-Roots_Sub_P Parameter: Organism Value: A. thaliana
  misc_feature: MA Experiment 20000315 PARAMETER Experiment Name: At_14day_Shoots-Roots_Sub_P Parameter: Plant Line Value: WS
  misc_feature: MA Experiment 20000315 PARAMETER Experiment Name: At_14day_Shoots-Roots_Sub_P Parameter: Tissue Value: Shoots vs. Whole Plant
  misc_feature: MA Experiment ID: 20000329 Result: Down-regulated in Transcription
  misc_feature: MA Experiment 20000329 PARAMETER Experiment Name: At_4deg_Cold_Sub_P Parameter: Age (day) Value: 14
  misc_feature: MA Experiment 20000329 PARAMETER Experiment Name: At_4deg_Cold_Sub_P Parameter: Organism Value: A. thaliana
  misc_feature: MA Experiment 20000329 PARAMETER Experiment Name: At_4deg_Cold_Sub_P Parameter: Plant Line Value: WS
  misc_feature: MA Experiment 20000329 PARAMETER Experiment Name: At_4deg_Cold_Sub_P Parameter: Temperature (deg C) Value: 4 vs. 22
  misc_feature: MA Experiment 20000329 PARAMETER Experiment Name: At_4deg_Cold_Sub_P Parameter: Timepoint (hr) Value: 6
  misc_feature: MA Experiment 20000329 PARAMETER Experiment Name: At_4deg_Cold_Sub_P Parameter: Tissue Value: Aerial
atgtgtcacaagcccgagctccttaaggaaggcaaaagcgaaggccaagaagaagaagggctaagctacgagttccaagagatgttggactctcttcctaaggagagaggacggagaaatcgttacctttacttattccaagggtttcggtgccaagctaaggagattcaagctatcacgtctttccaaaaacattttcagtcccttccagacgacgttgtcctcgccaccatacctaaatctggcacaacctggttaaaagctttaactttcaccatccttacccgtcatcggtttgatccggtttcctcatcaagttccgaccaccctcttctcacatccaaccctcacgacctcgtacctttcttcgagtacaagctttacgccaacggaaatgttcccgatctctcgggtctagccagtccaagaacattcgcaacccacgtaccgttcggtgcccttaaggattcggtcgagaatcccagtgtgaaggttgtgtacctgtgccggaacccgtttgacacattcatctccatgtggcattacatcaacaacatcacttccgagtcagtgagcgcagtcttgctagacgaagcttttgatctatattgccggggattactgatcggatttggcccgttttgggaacacatgttgggatactggagagagagcttgaagaggccagagaaagtcttatttttaaagtacgaggatctcaaagaagacatcgagaccaacttgaagaagctagcaagtttcttaggacttcctttcaccgaagaagaggaacaaaagggagttgtgaaagctatcgctgatctgtgtagctttgagaatctgaagaagttggaggtgaacaagtcaagcaaattgatccagaactatgagaaccggttcttgtttaggaaaggagaagtgagtgatttggttaactatttgtcgccatcacaagtggaaagattgtcagccttagtggatgacaagttagctggatctggtctcactttcagattgagttaa

SEQ ID NO: 72686 - protein, 340 aa, Arabidopsis thaliana
  peptide (1)..(340): Ceres Seq. ID no. 4944173
  misc_feature (70)..(334): Pfam Name: Sulfotransferase domain Pfam Description: Sulfotransferase domain
  misc_feature (1)..(340): Homolog of NCBI NO: 9759556 NR Description: steroid sulfotransferase-like protein
  misc_feature (1)..(340): Homolog of NCBI NO: 30681703 NR Description: sulfotransferase family [Arabidopsis thaliana] putative steroid sulfotransferase [Arabidopsis thaliana]
  misc_feature (1)..(340): Homolog of NCBI NO: 9759557 NR Description: steroid sulfotransferase-like protein
  misc_feature (1)..(340): Homolog of NCBI NO: 18415376 NR Description: steroid sulfotransferase-like protein; protein At5g07010.1, supported by cDNA: 124067., supported by cDNA:
  misc_feature (1)..(340): Homolog of NCBI NO: 15809903 NR Description: AT5g07010/MOJ9_18 [Arabidopsis thaliana]
  misc_feature (19)..(337): Homolog of NCBI NO: 15230602 NR Description: sulfotransferase-like protein; protein id:
  misc_feature (8)..(337): Homolog of NCBI NO: 38230552 NR Description: steroid sulfotransferase 4 [Brassica napus]
  misc_feature (17)..(338): Homolog of NCBI NO: 18395604 NR Description: putative steroid sulfotransferase; protein id: supported by cDNA: 3964., supported by cDNA: gi_20260123 thaliana] >gi|20197902|gb|AAD20077.2| putative steroid putative
  misc_feature (17)..(338): Homolog of NCBI NO: 25288806 NR Description: probable steroid sulfotransferase [imported] - thaliana >gi|13272389|gb|AAK17133.1|AF325065_1 putative steroid
  misc_feature (5)..(335): Homolog of NCBI NO: 21553545 NR Description: steroid sulfotransferase, putative [Arabidopsis
MCHKPELLKEGKSEGQEEEGLSYEFQEMLDSLPKERGRRNRYLYLFQGFRCQAKEIQAITSFQKHFQSLPDDVVLATIPKSGTTWLKALTFTILTRHRFDPVSSSSSDHPLLTSNPHDLVPFFEYKLYANGNVPDLSGLASPRTFATHVPFGALKDSVENPSVKVVYLCRNPFDTFISMWHYINNITSESVSAVLLDEAFDLYCRGLLIGFGPFWEHMLGYWRESLKRPEKVLFLKYEDLKEDIETNLKKLASFLGLPFTEEEEQKGVVKAIADLCSFENLKKLEVNKSSKLIQNYENRFLFRKGEVSDLVNYLSPSQVERLSALVDDKLAGSGLTFRLS

SEQ ID NO: 72687 - protein, 313 aa, Arabidopsis thaliana
  peptide (1)..(313): Ceres Seq. ID no. 4944174
  misc_feature (43)..(307): Pfam Name: Sulfotransferase domain Pfam Description: Sulfotransferase domain
  misc_feature (1)..(313): Homolog of NCBI NO: 9759556 NR Description: steroid sulfotransferase-like protein
  misc_feature (1)..(313): Homolog of NCBI NO: 30681703 NR Description: sulfotransferase family [Arabidopsis thaliana] putative steroid sulfotransferase [Arabidopsis thaliana]
  misc_feature (1)..(313): Homolog of NCBI NO: 9759557 NR Description: steroid sulfotransferase-like protein
  misc_feature (1)..(313): Homolog of NCBI NO: 18415376 NR Description: steroid sulfotransferase-like protein; protein At5g07010.1, supported by cDNA: 124067., supported by cDNA:
  misc_feature (1)..(313): Homolog of NCBI NO: 15809903 NR Description: AT5g07010/MOJ9_18 [Arabidopsis thaliana]
  misc_feature (1)..(310): Homolog of NCBI NO: 15230602 NR Description: sulfotransferase-like protein; protein id:
  misc_feature (1)..(310): Homolog of NCBI NO: 38230552 NR Description: steroid sulfotransferase 4 [Brassica napus]
  misc_feature (1)..(311): Homolog of NCBI NO: 18395604 NR Description: putative steroid sulfotransferase; protein id: supported by cDNA: 3964., supported by cDNA: gi_20260123 thaliana] >gi|20197902|gb|AAD20077.2| putative steroid putative
  misc_feature (1)..(311): Homolog of NCBI NO: 25288806 NR Description: probable steroid sulfotransferase [imported] - thaliana >gi|13272389|gb|AAK17133.1|AF325065_1 putative steroid
  misc_feature (1)..(308): Homolog of NCBI NO: 21553545 NR Description: steroid sulfotransferase, putative [Arabidopsis
MLDSLPKERGRRNRYLYLFQGFRCQAKEIQAITSFQKHFQSLPDDVVLATIPKSGTTWLKALTFTILTRHRFDPVSSSSSDHPLLTSNPHDLVPFFEYKLYANGNVPDLSGLASPRTFATHVPFGALKDSVENPSVKVVYLCRNPFDTFISMWHYINNITSESVSAVLLDEAFDLYCRGLLIGFGPFWEHMLGYWRESLKRPEKVLFLKYEDLKEDIETNLKKLASFLGLPFTEEEEQKGVVKAIADLCSFENLKKLEVNKSSKLIQNYENRFLFRKGEVSDLVNYLSPSQVERLSALVDDKLAGSGLTFRLS

SEQ ID NO: 72688 - DNA, 1194 bp, Arabidopsis thaliana
  misc_feature (1)..(1194): Ceres Seq. ID no. 4944298
  misc_feature: MA Experiment ID: 20000307 Result: Down-regulated in Transcription
  misc_feature: MA Experiment 20000307 PARAMETER Experiment Name: At_Germinating_Seeds_Sub_P Parameter: Age (hr) Value: 24 vs. 0
  misc_feature: MA Experiment 20000307 PARAMETER Experiment Name: At_Germinating_Seeds_Sub_P Parameter: Organism Value: A. thaliana
  misc_feature: MA Experiment 20000307 PARAMETER Experiment Name: At_Germinating_Seeds_Sub_P Parameter: Plant Line Value: WS
  misc_feature: MA Experiment 20000307 PARAMETER Experiment Name: At_Germinating_Seeds_Sub_P Parameter: Tissue Value: Germinating Seeds
  misc_feature: Pfam Name: CorA Pfam Description: CorA-like Mg2+ transporter protein
atgttgcctaacgaagaacttgttccggtgaagaggattacaccccagtcatcgtggagttggatttccatagacgcgacgggaaaaaaaacggtgcttgacgttgacaaatatgtgattatgcaccgtgttcagatccacgctcgcgatctccggatacttgacccaaatctcttttacccttctgctattctgggtcgagaaagagccattgttcttaacttagagcatatcaaggcgatcatcactgccaaagaggattcgtcagatgaaaatcttattccaaccctggaggagtttcagacacgcttatctgttggaaacaaggcacacggtggtcaattagatggtgatgtggttgaagaagatgaatccgcgtttgaatttcgggcactagaggttgctttggaagctatttgtagcttcctagctgcaaggacaatagaattagagaagtctgcttatcctgctttggatgaacttaccttgaagttccatgacccgattgacagctcaggtccaaaaggtgagcaggaatcacttggaacagggtctatgtttagaaaagaaatatatttaggagttatgcataagataaaagagttcaaagactcattgaaagaaccatcaaaactggagtatatgcttttgggattataccgagtgaaagttgggtctaaatcagaatatgatgtggatttgcagataaaggatgagcttgaacagttgttggaagatgacgaagatatggctgaactctacctttcaaggaagctcgcgggtgcatcttcaccagctattgattctggtgaacacattaattggtatcctacgtccccaacaataggtgctaagatttccagagcaaagagccatttggtgaggtcagccacggttcgtggggacgacaaaaatgatgttgaagaagttgaaatgttgcttgagctacgcgagtatgtggatgagacagaagatttccttaatatccagttcgaaattattttaaccgctggaagcatctgtgtatcagtgtactctgtagttgttggcattctaggcatgaacattcctttcccgtggaacatcaaaaaacatatgttcaaatgggtggtgagcggcactgcaacagtttgcgcaatcttgttcgtgattataatgtcgttcgctcggtacaaaaagctctttggtttttga

SEQ ID NO: 72689 - protein, 397 aa, Arabidopsis thaliana
  peptide (1)..(397): Ceres Seq. ID no. 4944299
  misc_feature: Pfam Name: CorA Pfam Description: CorA-like Mg2+ transporter protein
  misc_feature (1)..(397): Homolog of NCBI NO: 15242491 NR Description: putative protein; protein id: At5g09720.1
  misc_feature (1)..(164): Homolog of NCBI NO: 25360964 NR Description: MRS2-8 [Arabidopsis thaliana]
  misc_feature (216)..(332): Homolog of NCBI NO: 25360964 NR Description: MRS2-8 [Arabidopsis thaliana]
  misc_feature (313)..(397): Homolog of NCBI NO: 25360964 NR Description: MRS2-8 [Arabidopsis thaliana]
  misc_feature (1)..(164): Homolog of NCBI NO: 9759003 NR Description: contains similarity to unknown
  misc_feature (216)..(316): Homolog of NCBI NO: 9759003 NR Description: contains similarity to unknown
  misc_feature (245)..(396): Homolog of NCBI NO: 15242490 NR Description: putative protein; protein id: At5g09710.1
  misc_feature (18)..(169): Homolog of NCBI NO: 15242490 NR Description: putative protein; protein id: At5g09710.1
  misc_feature (1)..(164): Homolog of NCBI NO: 25360941 NR Description: MRS2-7 [Arabidopsis thaliana]
  misc_feature (235)..(332): Homolog of NCBI NO: 25360941 NR Description: MRS2-7 [Arabidopsis thaliana]
MLPNEELVPVKRITPQSSWSWISIDATGKKTVLDVDKYVIMHRVQIHARDLRILDPNLFYPSAILGRERAIVLNLEHIKAIITAKEDSSDENLIPTLEEFQTRLSVGNKAHGGQLDGDVVEEDESAFEFRALEVALEAICSFLAARTIELEKSAYPALDELTLKFHDPIDSSGPKGEQESLGTGSMFRKEIYLGVMHKIKEFKDSLKEPSKLEYMLLGLYRVKVGSKSEYDVDLQIKDELEQLLEDDEDMAELYLSRKLAGASSPAIDSGEHINWYPTSPTIGAKISRAKSHLVRSATVRGDDKNDVEEVEMLLELREYVDETEDFLNIQFEIILTAGSICVSVYSVVVGILGMNIPFPWNIKKHMFKWVVSGTATVCAILFVIIMSFARYKKLFGF

SEQ ID NO: 72690 - protein, 357 aa, Arabidopsis thaliana
  peptide (1)..(357): Ceres Seq. ID no. 4944300
  misc_feature: Pfam Name: CorA Pfam Description: CorA-like Mg2+ transporter protein
  misc_feature (1)..(357): Homolog of NCBI NO: 15242491 NR Description: putative protein; protein id: At5g09720.1
  misc_feature (1)..(124): Homolog of NCBI NO: 25360964 NR Description: MRS2-8 [Arabidopsis thaliana]
  misc_feature (176)..(292): Homolog of NCBI NO: 25360964 NR Description: MRS2-8 [Arabidopsis thaliana]
  misc_feature (273)..(357): Homolog of NCBI NO: 25360964 NR Description: MRS2-8 [Arabidopsis thaliana]
  misc_feature (1)..(124): Homolog of NCBI NO: 9759003 NR Description: contains similarity to unknown
  misc_feature (176)..(276): Homolog of NCBI NO: 9759003 NR Description: contains similarity to unknown
  misc_feature (205)..(356): Homolog of NCBI NO: 15242490 NR Description: putative protein; protein id: At5g09710.1
  misc_feature (1)..(129): Homolog of NCBI NO: 15242490 NR Description: putative protein; protein id: At5g09710.1
  misc_feature (1)..(124): Homolog of NCBI NO: 25360941 NR Description: MRS2-7 [Arabidopsis thaliana]
  misc_feature (195)..(292): Homolog of NCBI NO: 25360941 NR Description: MRS2-7 [Arabidopsis thaliana]
MHRVQIHARDLRILDPNLFYPSAILGRERAIVLNLEHIKAIITAKEDSSDENLIPTLEEFQTRLSVGNKAHGGQLDGDVVEEDESAFEFRALEVALEAICSFLAARTIELEKSAYPALDELTLKFHDPIDSSGPKGEQESLGTGSMFRKEIYLGVMHKIKEFKDSLKEPSKLEYMLLGLYRVKVGSKSEYDVDLQIKDELEQLLEDDEDMAELYLSRKLAGASSPAIDSGEHINWYPTSPTIGAKISRAKSHLVRSATVRGDDKNDVEEVEMLLELREYVDETEDFLNIQFEIILTAGSICVSVYSVVVGILGMNIPFPWNIKKHMFKWVVSGTATVCAILFVIIMSFARYKKLFGF

SEQ ID NO: 72691 - protein, 212 aa, Arabidopsis thaliana
  peptide (1)..(212): Ceres Seq. ID no. 4944301
  misc_feature: Pfam Name: CorA Pfam Description: CorA-like Mg2+ transporter protein
  misc_feature (1)..(212): Homolog of NCBI NO: 15242491 NR Description: putative protein; protein id: At5g09720.1
  misc_feature (31)..(147): Homolog of NCBI NO: 25360964 NR Description: MRS2-8 [Arabidopsis thaliana]
  misc_feature (128)..(212): Homolog of NCBI NO: 25360964 NR Description: MRS2-8 [Arabidopsis thaliana]
  misc_feature (31)..(131): Homolog of NCBI NO: 9759003 NR Description: contains similarity to unknown
  misc_feature (60)..(211): Homolog of NCBI NO: 15242490 NR Description: putative protein; protein id: At5g09710.1
  misc_feature (50)..(147): Homolog of NCBI NO: 25360941 NR Description: MRS2-7 [Arabidopsis thaliana]
  misc_feature (50)..(147): Homolog of NCBI NO: 30682808 NR Description: expressed protein [Arabidopsis thaliana]
  misc_feature (50)..(147): Homolog of NCBI NO: 30682814 NR Description: expressed protein [Arabidopsis thaliana]
  misc_feature (50)..(145): Homolog of NCBI NO: 9758997 NR Description: gene_id:MTH16.11~unknown protein [Arabidopsis
  misc_feature (128)..(211): Homolog of NCBI NO: 25360941 NR Description: MRS2-7 [Arabidopsis thaliana]
MFRKEIYLGVMHKIKEFKDSLKEPSKLEYMLLGLYRVKVGSKSEYDVDLQIKDELEQLLEDDEDMAELYLSRKLAGASSPAIDSGEHINWYPTSPTIGAKISRAKSHLVRSATVRGDDKNDVEEVEMLLELREYVDETEDFLNIQFEIILTAGSICVSVYSVVVGILGMNIPFPWNIKKHMFKWVVSGTATVCAILFVIIMSFARYKKLFGF

SEQ ID NO: 72692 - DNA, 1206 bp, Arabidopsis thaliana
  misc_feature (1)..(1206): Ceres Seq. ID no. 4944309
  misc_feature: MA Experiment ID: 20000328 Result: Down-regulated in Transcription
  misc_feature: MA Experiment 20000328 PARAMETER Experiment Name: At_42deg_Heat_Sub_P Parameter: Age (day) Value: 14
  misc_feature: MA Experiment 20000328 PARAMETER Experiment Name: At_42deg_Heat_Sub_P Parameter: Organism Value: A. thaliana
  misc_feature: MA Experiment 20000328 PARAMETER Experiment Name: At_42deg_Heat_Sub_P Parameter: Plant Line Value: WS
  misc_feature: MA Experiment 20000328 PARAMETER Experiment Name: At_42deg_Heat_Sub_P Parameter: Temperature (deg C) Value: 42 vs. 22
  misc_feature: MA Experiment 20000328 PARAMETER Experiment Name: At_42deg_Heat_Sub_P Parameter: Timepoint (hr) Value: 6
  misc_feature: MA Experiment 20000328 PARAMETER Experiment Name: At_42deg_Heat_Sub_P Parameter: Tissue Value: Aerial
atgtcacctgacggagaacttgttccggtggattcatcggcggtagtcacggcgaagaggaagacatctcagttatcaaggagttggatttccatagacgccacggggcaaaaaactgtgcttgacgttgacaaacacgtgattatgcaccgtgttcaaatccacgctcgtgatctccggatccttgacccgaatctattttacccttctgctattttgggtcgagaaagagccattgttcttaacttagagcatatcaaggcgattatcactgccgaagaggtcagaatcatttcttactggcttgtagccaaatattcgtcagatgaaaatgttatccccgtcctggaggagtttcagagaagattacctgtaggaaacgaggcacatggtgttcacggagatggtgatttgggtgaagaagatgaatccccgtttgaattccgggcgctagaggtggccttggaagctatttgtagttttctagctgcaaggacaacagaactagagaagtttgcttatcctgctttggatgaacttaccttgaagataagtagccgtaacttggaaagagttcgtaaattgaagagtgccatgacccgtttgacagctcgggtccaaaaggtaagggatgagcttgaacagttgttggatgatgatggtgatatggctgatctctaccttacaaggaagcttgttggtgcatcttcatctgtcagcgtttcagatgaacccatttggtatcctacttccccaacaataggttctatgatttccagagcaagtagagtgagtttagtcacggttcgtggagacgacgaaactgatgttgaagagcttgaaatgttgcttgaggcatacttcatgcaaatagacagcactttgaacaaattaaccgagctacgcgagtatattgatgacacagaggattacattaacatccaggctataatcactgtttatttgcagttagacaatcatcgaaatcagctgattcagttagagctaatgttaagcgcaggaaccgtctgtgtatcagtgtactctatgatcgccggaatattcggcatgaacattcccaacacatggaaccacgaccatggttacattttcaaatgggtcgtaagtctcacgggaacattttgcatagtcttgttcgtgattatactgtcgtacgctcggtttagaggactcatcggatcttaa

SEQ ID NO: 72693 - protein, 401 aa, Arabidopsis thaliana
  peptide (1)..(401): Ceres Seq. ID no. 4944310
  misc_feature (1)..(401): Homolog of NCBI NO: 11282359 NR Description: hypothetical protein F17I14.120 - Arabidopsis >gi|7671420|emb|CAB89361.1| putative protein [Arabidopsis
  misc_feature (1)..(401): Homolog of NCBI NO: 30682808 NR Description: expressed protein [Arabidopsis thaliana]
  misc_feature (1)..(401): Homolog of NCBI NO: 25360941 NR Description: MRS2-7 [Arabidopsis thaliana]
  misc_feature (1)..(315): Homolog of NCBI NO: 9758997 NR Description: gene_id:MTH16.11~unknown protein [Arabidopsis
  misc_feature (1)..(333): Homolog of NCBI NO: 30682814 NR Description: expressed protein [Arabidopsis thaliana]
  misc_feature (1)..(401): Homolog of NCBI NO: 30698045 NR Description: expressed protein [Arabidopsis thaliana] contains similarity to unknown [Arabidopsis thaliana] >gi|17529326|gb|AAL38890.1| unknown
  misc_feature (1)..(374): Homolog of NCBI NO: 30698047 NR Description: expressed protein [Arabidopsis thaliana]
  misc_feature (1)..(400): Homolog of NCBI NO: 25360964 NR Description: MRS2-8 [Arabidopsis thaliana]
  misc_feature (83)..(401): Homolog of NCBI NO: 40539050 NR Description: putative CorA-like Mg2+ transporter protein
  misc_feature (5)..(84): Homolog of NCBI NO: 40539050 NR Description: putative CorA-like Mg2+ transporter protein
MSPDGELVPVDSSAVVTAKRKTSQLSRSWISIDATGQKTVLDVDKHVIMHRVQIHARDLRILDPNLFYPSAILGRERAIVLNLEHIKAIITAEEVRIISYWLVAKYSSDENVIPVLEEFQRRLPVGNEAHGVHGDGDLGEEDESPFEFRALEVALEAICSFLAARTTELEKFAYPALDELTLKISSRNLERVRKLKSAMTRLTARVQKVRDELEQLLDDDGDMADLYLTRKLVGASSSVSVSDEPIWYPTSPTIGSMISRASRVSLVTVRGDDETDVEELEMLLEAYFMQIDSTLNKLTELREYIDDTEDYINIQAIITVYLQLDNHRNQLIQLELMLSAGTVCVSVYSMIAGIFGMNIPNTWNHDHGYIFKWVVSLTGTFCIVLFVIILSYARFRGLIGS

SEQ ID NO: 72694 - protein, 353 aa, Arabidopsis thaliana
  peptide (1)..(353): Ceres Seq. ID no. 4944311
  misc_feature (1)..(353): Homolog of NCBI NO: 11282359 NR Description: hypothetical protein F17I14.120 - Arabidopsis >gi|7671420|emb|CAB89361.1| putative protein [Arabidopsis
  misc_feature (1)..(353): Homolog of NCBI NO: 30682808 NR Description: expressed protein [Arabidopsis thaliana]
  misc_feature (1)..(353): Homolog of NCBI NO: 25360941 NR Description: MRS2-7 [Arabidopsis thaliana]
  misc_feature (1)..(267): Homolog of NCBI NO: 9758997 NR Description: gene_id:MTH16.11~unknown protein [Arabidopsis
  misc_feature (1)..(285): Homolog of NCBI NO: 30682814 NR Description: expressed protein [Arabidopsis thaliana]
  misc_feature (1)..(353): Homolog of NCBI NO: 30698045 NR Description: expressed protein [Arabidopsis thaliana] contains similarity to unknown [Arabidopsis thaliana] >gi|17529326|gb|AAL38890.1| unknown
  misc_feature (1)..(326): Homolog of NCBI NO: 30698047 NR Description: expressed protein [Arabidopsis thaliana]
  misc_feature (1)..(352): Homolog of NCBI NO: 25360964 NR Description: MRS2-8 [Arabidopsis thaliana]
  misc_feature (35)..(353): Homolog of NCBI NO: 40539050 NR Description: putative CorA-like Mg2+ transporter protein
  misc_feature (1)..(36): Homolog of NCBI NO: 40539050 NR Description: putative CorA-like Mg2+ transporter protein
MHRVQIHARDLRILDPNLFYPSAILGRERAIVLNLEHIKAIITAEEVRIISYWLVAKYSSDENVIPVLEEFQRRLPVGNEAHGVHGDGDLGEEDESPFEFRALEVALEAICSFLAARTTELEKFAYPALDELTLKISSRNLERVRKLKSAMTRLTARVQKVRDELEQLLDDDGDMADLYLTRKLVGASSSVSVSDEPIWYPTSPTIGSMISRASRVSLVTVRGDDETDVEELEMLLEAYFMQIDSTLNKLTELREYIDDTEDYINIQAIITVYLQLDNHRNQLIQLELMLSAGTVCVSVYSMIAGIFGMNIPNTWNHDHGYIFKWVVSLTGTFCIVLFVIILSYARFRGLIGS

SEQ ID NO: 72695 - protein, 203 aa, Arabidopsis thaliana
  peptide (1)..(203): Ceres Seq. ID no. 4944312
  misc_feature (1)..(203): Homolog of NCBI NO: 11282359 NR Description: hypothetical protein F17I14.120 - Arabidopsis >gi|7671420|emb|CAB89361.1| putative protein [Arabidopsis
  misc_feature (1)..(203): Homolog of NCBI NO: 30682808 NR Description: expressed protein [Arabidopsis thaliana]
  misc_feature (1)..(203): Homolog of NCBI NO: 25360941 NR Description: MRS2-7 [Arabidopsis thaliana]
  misc_feature (1)..(117): Homolog of NCBI NO: 9758997 NR Description: gene_id:MTH16.11~unknown protein [Arabidopsis
  misc_feature (1)..(135): Homolog of NCBI NO: 30682814 NR Description: expressed protein [Arabidopsis thaliana]
  misc_feature (1)..(203): Homolog of NCBI NO: 30698045 NR Description: expressed protein [Arabidopsis thaliana] contains similarity to unknown [Arabidopsis thaliana] >gi|17529326|gb|AAL38890.1| unknown
  misc_feature (1)..(176): Homolog of NCBI NO: 30698047 NR Description: expressed protein [Arabidopsis thaliana]
  misc_feature (1)..(202): Homolog of NCBI NO: 25360964 NR Description: MRS2-8 [Arabidopsis thaliana]
  misc_feature (1)..(203): Homolog of NCBI NO: 40539050 NR Description: putative CorA-like Mg2+ transporter protein
  misc_feature (1)..(93): Homolog of NCBI NO: 9759003 NR Description: contains similarity to unknown
MTRLTARVQKVRDELEQLLDDDGDMADLYLTRKLVGASSSVSVSDEPIWYPTSPTIGSMISRASRVSLVTVRGDDETDVEELEMLLEAYFMQIDSTLNKLTELREYIDDTEDYINIQAIITVYLQLDNHRNQLIQLELMLSAGTVCVSVYSMIAGIFGMNIPNTWNHDHGYIFKWVVSLTGTFCIVLFVIILSYARFRGLIGS

SEQ ID NO: 72696 - DNA, 420 bp, Arabidopsis thaliana
  misc_feature (1)..(420): Ceres Seq. ID no. 4944327
  misc_feature: MA Experiment ID: 20000171 Result: Up-regulated in Transcription
  misc_feature: MA Experiment 20000171 PARAMETER Experiment Name: At_42deg_Heat_P Parameter: Age (day) Value: 14
  misc_feature: MA Experiment 20000171 PARAMETER Experiment Name: At_42deg_Heat_P Parameter: Organism Value: A. thaliana
  misc_feature: MA Experiment 20000171 PARAMETER Experiment Name: At_42deg_Heat_P Parameter: Plant Line Value: WS
  misc_feature: MA Experiment 20000171 PARAMETER Experiment Name: At_42deg_Heat_P Parameter: Temperature (deg C) Value: 42 vs. 22
  misc_feature: MA Experiment 20000171 PARAMETER Experiment Name: At_42deg_Heat_P Parameter: Timepoint (hr) Value: 1
  misc_feature: MA Experiment 20000171 PARAMETER Experiment Name: At_42deg_Heat_P Parameter: Tissue Value: Aerial
  misc_feature: MA Experiment ID: 20000173 Result: Up-regulated in Transcription
  misc_feature: MA Experiment 20000173 PARAMETER Experiment Name: At_42deg_Heat_P Parameter: Age (day) Value: 14
  misc_feature: MA Experiment 20000173 PARAMETER Experiment Name: At_42deg_Heat_P Parameter: Organism Value: A. thaliana
  misc_feature: MA Experiment 20000173 PARAMETER Experiment Name: At_42deg_Heat_P Parameter: Plant Line Value: WS
  misc_feature: MA Experiment 20000173 PARAMETER Experiment Name: At_42deg_Heat_P Parameter: Temperature (deg C) Value: 42 vs. 22
  misc_feature: MA Experiment 20000173 PARAMETER Experiment Name: At_42deg_Heat_P Parameter: Timepoint (hr) Value: 6
  misc_feature: MA Experiment 20000173 PARAMETER Experiment Name: At_42deg_Heat_P Parameter: Tissue Value: Aerial
  misc_feature: MA Experiment ID: 20000182 Result: Down-regulated in Transcription
  misc_feature: MA Experiment 20000182 PARAMETER Experiment Name: At_2mM_SA_P Parameter: Age (day) Value: 14
  misc_feature: MA Experiment 20000182 PARAMETER Experiment Name: At_2mM_SA_P Parameter: Organism Value: A. thaliana
  misc_feature: MA Experiment 20000182 PARAMETER Experiment Name: At_2mM_SA_P Parameter: Plant Line Value: WS
  misc_feature: MA Experiment 20000182 PARAMETER Experiment Name: At_2mM_SA_P Parameter: Timepoint (hr) Value: 6
  misc_feature: MA Experiment 20000182 PARAMETER Experiment Name: At_2mM_SA_P Parameter: Tissue Value: Aerial
  misc_feature: MA Experiment 20000182 PARAMETER Experiment Name: At_2mM_SA_P Parameter: Treatment Value: 2mM SA vs. No Treatment
atgcctcgaggaagctccggaggaagatctagctaccgtccttctcgccctgcagctgcacgaagcccgcctcctcaatctgtgaaccgtgctcctcctccagcaacagctcagcctagtagcggtggttctttcttaggcaatattggtgcatccataactgaaggtctggcttggggtactggaactgcatttggacacagggttgtggattctgtgatgggtccacgaacctttaagcacgaaaccgttgtttctcaggttccatctgctgcaaataccatgactgcttgtgacattcactccaaggctttccaagattgcgtcaaccattttggaagcgacatcagtaagtgccagttctacatggacatgctgagtgaatgcaagaagaattctggttccgtggtggctgcttaa

SEQ ID NO: 72697 - protein, 139 aa, Arabidopsis thaliana
  peptide (1)..(139): Ceres Seq. ID no. 4944328
  misc_feature (1)..(139): Homolog of NCBI NO: 15242455 NR Description: putative protein; protein id: At5g09570.1
  misc_feature (1)..(139): Homolog of NCBI NO: 15237688 NR Description: putative protein; protein id: At5g64400.1, by cDNA: gi_14334413, supported by cDNA: gi_17104660 [Arabidopsis >gi|14334414|gb|AAK59405.1| unknown protein [Arabidopsis
  misc_feature (9)..(135): Homolog of NCBI NO: 13174237 NR Description: unknown protein [Oryza sativa]
  misc_feature (5)..(132): Homolog of NCBI NO: 23509031 NR Description: hypothetical protein, conserved [Plasmodium
MPRGSSGGRSSYRPSRPAAARSPPPQSVNRAPPPATAQPSSGGSFLGNIGASITEGLAWGTGTAFGHRVVDSVMGPRTFKHETVVSQVPSAANTMTACDIHSKAFQDCVNHFGSDISKCQFYMDMLSECKKNSGSVVAA

SEQ ID NO: 72698 - DNA, 2988 bp, Arabidopsis thaliana
  misc_feature (1)..(2988): Ceres Seq. ID no. 4944508
  misc_feature: MA Experiment ID: 20000307 Result: Down-regulated in Transcription
  misc_feature: MA Experiment 20000307 PARAMETER Experiment Name: At_Germinating_Seeds_Sub_P Parameter: Age (hr) Value: 24 vs. 0
  misc_feature: MA Experiment 20000307 PARAMETER Experiment Name: At_Germinating_Seeds_Sub_P Parameter: Organism Value: A. thaliana
  misc_feature: MA Experiment 20000307 PARAMETER Experiment Name: At_Germinating_Seeds_Sub_P Parameter: Plant Line Value: WS
  misc_feature: MA Experiment 20000307 PARAMETER Experiment Name: At_Germinating_Seeds_Sub_P Parameter: Tissue Value: Germinating Seeds
  misc_feature: MA Experiment ID: 20000355 Result: Up-regulated in Transcription
  misc_feature: MA Experiment 20000355 PARAMETER Experiment Name: At_Siliques_Sub_P Parameter: Age (day) Value: 21
  misc_feature: MA Experiment 20000355 PARAMETER Experiment Name: At_Siliques_Sub_P Parameter: Organism Value: A. thaliana
  misc_feature: MA Experiment 20000355 PARAMETER Experiment Name: At_Siliques_Sub_P Parameter: Plant Line Value: WS
  misc_feature: MA Experiment 20000355 PARAMETER Experiment Name: At_Siliques_Sub_P Parameter: Tissue Value: Less Than 5mm Siliques vs. Whole Plant
  misc_feature: MA Experiment ID: 20000440 Result: Up-regulated in Transcription
  misc_feature: MA Experiment 20000440 PARAMETER Experiment Name: At_Closed-Flower__Sub_P Parameter: Tissue Value: Closed Flower vs. Whole Plant
atgactaattgtgttcctctttcttttgttcagagctgcgttggacatagaggagctgctagattcttccattcccgattatataagaataggttagataaagatgtctacttgtgcaacaacctcatcaatgcttatcttgaaacgggtgattcggtttctgcacgtaaggtgtttgacgaaatgcctcttaggaactgtgtttcttgggcgtgtattgtttcaggatatagtcgtaatggagaacataaggaagctttagtgtttttgagagatatggttaaagaagggattttttctaatcaatacgcttttgttagtgttcttcgggcttgtcaggagataggttctgttgggattcttttcgggagacaaattcatggcctgatgttcaaactttcttatgcagtggatgcagttgtttctaatgtgctcatatcaatgtactggaaatgtatcgggtctgtcggttatgctctctgtgctttcggtgacatagaagttaagaattctgtttcatggaattcgattatttcggtttattcacaggctggggatcagagatctgcgtttaggattttctctagcatgcaatatgatggttctagaccaactgaatacacttttggtagtcttgtaactactgcttgttctttgactgaaccagatgttcgtttgctcgagcagatcatgtgcaccatacagaaatcagggttgctcacagatctttttgttggcagcggactggtgagtgcatttgcaaagtctggttcattgagttatgctaggaaggtttttaatcagatggaaacaagaaatgcggtcaccttaaatggtctaatggttggtctggtgcgacagaaatggggagaagaagcaactaaactctttatggatatgaatagcatgattgatgttagtcctgagtcatacgtgattctcctgagctcatttcctgagtattctctagcagaggaagttggtctgaaaaaaggcagagaggttcatggacatgtaataacaactggcttagttgacttcatggttggcattggaaatggccttgttaatatgtatgctaagtgcggctcaatagctgacgctagacgtgttttctatttcatgaccgataaagattctgtctcctggaactccatgatcactggtcttgaccaaaacggctgtttcatagaagcagttgaacgctacaaaagtatgagacgacatgacatcttgcctggaagtttcacactgattagttcgctaagctcatgcgcgagcttgaaatgggcaaaattaggacaacagattcatggagagagcctcaagttggggattgatttgaatgtttcagtttcaaatgcgcttatgacactgtatgcagagaccggctatctcaatgaatgccgtaagatattttcctcaatgccagagcatgatcaggtgtcttggaattctataataggagctttagcccgttcagaacggtcattacctgaagccgtggtatgtttcttgaatgcacaacgagcaggacagaaacttaatagaataaccttttcaagcgttctttcagccgtttcatccctttcatttggtgaactgggcaagcagatacacggactagctttaaagaacaatattgcagatgaagcaaccactgaaaatgcgcttatagcttgttatgggaagtgtggggagatggatgggtgtgagaagatattttctagaatggcagagagaagagataatgtaacttggaactcaatgatctcggggtatatacataacgagctccttgccaaggccttggatttggtctggtttatgttgcagacaggtcagagattggatagtttcatgtatgcgactgttcttagcgcgtttgcttctgttgcaacgctagagcgtggtatggaagtgcatgcttgttcggtgagagcttgtttagaatctgacgtggtagttgggagtgcacttgttgacatgtattccaaatgtggaagactagattatgctttgaggttttttaacacaatgcctgtaagaaattcatattcttggaactctatgatttcgggctatgcacgacatgggcaaggagaagaagctttgaagctttttgaaactatgaagctcgatggccaaacaccacctgaccatgttacattcgtgggagtcttgtcagcttgtagccatgcgggtctgcttgaagaagggtttaaacatttcgaatctatgagtgattcatatggcttagctcctaggattgaacacttctcatgtatggctgacgtgctaggccgtgcaggtgaactcgataagttggaagatttcatcgagaaaatgccaatgaagcctaatgttctcatctggaggactgtacttggggcttgttgcagagcaaatggtcgaaaagcagaattaggaaagaaagcagcagaaatgctttttcaattggagccagaaaacgctgtaaactatgtgctacttggtaacatgtatgctgctggaggaagatgggaagatttagtaaaggcgagaaagaaaatgaaagatgcagatgtgaaaaaggaagctggttatagttgggtcaccatgaaggatggagtccatatgtttgttgctggggataagtcacacccagacgctgatgtgatctacaagaagctcaaggagctcaacagaaagatgagagacgcaggttatgtgccacagacaggatttgccttgtatgatctagagcaagagaacaaggaagagattctgagctatcacagcgagaagctcgctgtagcttttgttctcgcagcccagaggagctctacgctgccaatcagaataatgaagaacctcagagtttgcggtgattgccactctgccttcaagtatatatcaaagatcgaagggagacagataattctaagggattcaaacaggtttcatcattttcaagacggtgcatgttcttgtagtgatttctggtga

SEQ ID NO: 72699 - protein, 995 aa, Arabidopsis thaliana
  peptide (1)..(995): Ceres Seq. ID no. 4944509
  misc_feature (686)..(720): Pfam Name: PPR repeat Pfam Description: PPR repeat
  misc_feature (24)..(995): Homolog of NCBI NO: 34912228 NR Description: P0415C01.16 [Oryza sativa (japonica
  misc_feature (295)..(995): Homolog of NCBI NO: 15234095 NR Description: putative protein; protein id: At4g33170.1
  misc_feature (24)..(269): Homolog of NCBI NO: 15234095 NR Description: putative protein; protein id: At4g33170.1
  misc_feature (10)..(995): Homolog of NCBI NO: 15236324 NR Description: putative protein; protein id: At4g13650.1
  misc_feature (74)..(995): Homolog of NCBI NO: 15219258 NR Description: hypothetical protein; protein id: At1g16480.1
  misc_feature (2)..(102): Homolog of NCBI NO: 15234095 NR Description: putative protein; protein id: At4g33170.1
  misc_feature (173)..(995): Homolog of NCBI NO: 15226200 NR Description: putative selenium-binding protein; protein id:
  misc_feature (123)..(995): Homolog of NCBI NO: 38606535 NR Description: OSJNBa0016O02.23 [Oryza sativa (japonica
  misc_feature (124)..(995): Homolog of NCBI NO: 15228590 NR Description: hypothetical protein; protein id: At3g03580.1 thaliana] >gi|6091764|gb|AAF03474.1|AC009327_13 hypothetical [Arabidopsis thaliana] >gi|28393735|gb|AAO42278.1| unknown
  misc_feature (179)..(995): Homolog of NCBI NO: 15220337 NR Description: hypothetical protein; protein id: At1g11290.1
MTNCVPLSFVQSCVGHRGAARFFHSRLYKNRLDKDVYLCNNLINAYLETGDSVSARKVFDEMPLRNCVSWACIVSGYSRNGEHKEALVFLRDMVKEGIFSNQYAFVSVLRACQEIGSVGILFGRQIHGLMFKLSYAVDAVVSNVLISMYWKCIGSVGYALCAFGDIEVKNSVSWNSIISVYSQAGDQRSAFRIFSSMQYDGSRPTEYTFGSLVTTACSLTEPDVRLLEQIMCTIQKSGLLTDLFVGSGLVSAFAKSGSLSYARKVFNQMETRNAVTLNGLMVGLVRQKWGEEATKLFMDMNSMIDVSPESYVILLSSFPEYSLAEEVGLKKGREVHGHVITTGLVDFMVGIGNGLVNMYAKCGSIADARRVFYFMTDKDSVSWNSMITGLDQNGCFIEAVERYKSMRRHDILPGSFTLISSLSSCASLKWAKLGQQIHGESLKLGIDLNVSVSNALMTLYAETGYLNECRKIFSSMPEHDQVSWNSIIGALARSERSLPEAVVCFLNAQRAGQKLNRITFSSVLSAVSSLSFGELGKQIHGLALKNNIADEATTENALIACYGKCGEMDGCEKIFSRMAERRDNVTWNSMISGYIHNELLAKALDLVWFMLQTGQRLDSFMYATVLSAFASVATLERGMEVHACSVRACLESDVVVGSALVDMYSKCGRLDYALRFFNTMPVRNSYSWNSMISGYARHGQGEEALKLFETMKLDGQTPPDHVTFVGVLSACSHAGLLEEGFKHFESMSDSYGLAPRIEHFSCMADVLGRAGELDKLEDFIEKMPMKPNVLIWRTVLGACCRANGRKAELGKKAAEMLFQLEPENAVNYVLLGNMYAAGGRWEDLVKARKKMKDADVKKEAGYSWVTMKDGVHMFVAGDKSHPDADVIYKKLKELNRKMRDAGYVPQTGFALYDLEQENKEEILSYHSEKLAVAFVLAAQRSSTLPIRIMKNLRVCGDCHSAFKYISKIEGRQIILRDSNRFHHFQDGACSCSDFW

SEQ ID NO: 72700 - protein, 934 aa, Arabidopsis thaliana
  peptide (1)..(934): Ceres Seq. ID no. 4944510
  misc_feature (625)..(659): Pfam Name: PPR repeat Pfam Description: PPR repeat
  misc_feature (1)..(934): Homolog of NCBI NO: 34912228 NR Description: P0415C01.16 [Oryza sativa (japonica
  misc_feature (234)..(934): Homolog of NCBI NO: 15234095 NR Description: putative protein; protein id: At4g33170.1
  misc_feature (1)..(208): Homolog of NCBI NO: 15234095 NR Description: putative protein; protein id: At4g33170.1
  misc_feature (1)..(934): Homolog of NCBI NO: 15236324 NR Description: putative protein; protein id: At4g13650.1
  misc_feature (13)..(934): Homolog of NCBI NO: 15219258 NR Description: hypothetical protein; protein id: At1g16480.1
  misc_feature (1)..(41): Homolog of NCBI NO: 15234095 NR Description: putative protein; protein id: At4g33170.1
  misc_feature (112)..(934): Homolog of NCBI NO: 15226200 NR Description: putative selenium-binding protein; protein id:
  misc_feature (62)..(934): Homolog of NCBI NO: 38606535 NR Description: OSJNBa0016O02.23 [Oryza sativa (japonica
  misc_feature (63)..(934): Homolog of NCBI NO: 15228590 NR Description: hypothetical protein; protein id: At3g03580.1 thaliana] >gi|6091764|gb|AAF03474.1|AC009327_13 hypothetical [Arabidopsis thaliana] >gi|28393735|gb|AAO42278.1| unknown
  misc_feature (118)..(934): Homolog of NCBI NO: 15220337 NR Description: hypothetical protein; protein id: At1g11290.1
MPLRNCVSWACIVSGYSRNGEHKEALVFLRDMVKEGIFSNQYAFVSVLRACQEIGSVGILFGRQIHGLMFKLSYAVDAVVSNVLISMYWKCIGSVGYALCAFGDIEVKNSVSWNSIISVYSQAGDQRSAFRIFSSMQYDGSRPTEYTFGSLVTTACSLTEPDVRLLEQIMCTIQKSGLLTDLFVGSGLVSAFAKSGSLSYARKVFNQMETRNAVTLNGLMVGLVRQKWGEEATKLFMDMNSMIDVSPESYVILLSSFPEYSLAEEVGLKKGREVHGHVITTGLVDFMVGIGNGLVNMYAKCGSIADARRVFYFMTDKDSVSWNSMITGLDQNGCFIEAVERYKSMRRHDILPGSFTLISSLSSCASLKWAKLGQQIHGESLKLGIDLNVSVSNALMTLYAETGYLNECRKIFSSMPEHDQVSWNSIIGALARSERSLPEAVVCFLNAQRAGQKLNRITFSSVLSAVSSLSFGELGKQIHGLALKNNIADEATTENALIACYGKCGEMDGCEKIFSRMAERRDNVTWNSMISGYIHNELLAKALDLVWFMLQTGQRLDSFMYATVLSAFASVATLERGMEVHACSVRACLESDVVVGSALVDMYSKCGRLDYALRFFNTMPVRNSYSWNSMISGYARHGQGEEALKLFETMKLDGQTPPDHVTFVGVLSACSHAGLLEEGFKHFESMSDSYGLAPRIEHFSCMADVLGRAGELDKLEDFIEKMPMKPNVLIWRTVLGACCRANGRKAELGKKAAEMLFQLEPENAVNYVLLGNMYAAGGRWEDLVKARKKMKDADVKKEAGYSWVTMKDGVHMFVAGDKSHPDADVIYKKLKELNRKMRDAGYVPQTGFALYDLEQENKEEILSYHSEKLAVAFVLAAQRSSTLPIRIMKNLRVCGDCHSAFKYISKIEGRQIILRDSNRFHHFQDGACSCSDFW

SEQ ID NO: 72701 - protein, 903 aa, Arabidopsis thaliana
  peptide (1)..(903): Ceres Seq. ID no. 4944511
  misc_feature (594)..(628): Pfam Name: PPR repeat Pfam Description: PPR repeat
  misc_feature (1)..(903): Homolog of NCBI NO: 34912228 NR Description: P0415C01.16 [Oryza sativa (japonica
  misc_feature (203)..(903): Homolog of NCBI NO: 15234095 NR Description: putative protein; protein id: At4g33170.1
  misc_feature (1)..(177): Homolog of NCBI NO: 15234095 NR Description: putative protein; protein id: At4g33170.1
  misc_feature (1)..(903): Homolog of NCBI NO: 15236324 NR Description: putative protein; protein id: At4g13650.1
  misc_feature (1)..(903): Homolog of NCBI NO: 15219258 NR Description: hypothetical protein; protein id: At1g16480.1
  misc_feature (81)..(903): Homolog of NCBI NO: 15226200 NR Description: putative selenium-binding protein; protein id:
  misc_feature (31)..(903): Homolog of NCBI NO: 38606535 NR Description: OSJNBa0016O02.23 [Oryza sativa (japonica
  misc_feature (32)..(903): Homolog of NCBI NO: 15228590 NR Description: hypothetical protein; protein id: At3g03580.1 thaliana] >gi|6091764|gb|AAF03474.1|AC009327_13 hypothetical [Arabidopsis thaliana] >gi|28393735|gb|AAO42278.1| unknown
  misc_feature (87)..(903): Homolog of NCBI NO: 15220337 NR Description: hypothetical protein; protein id: At1g11290.1
  misc_feature (76)..(903): Homolog of NCBI NO: 30693150 NR Description: pentatricopeptide (PPR) repeat-containing protein
MVKEGIFSNQYAFVSVLRACQEIGSVGILFGRQIHGLMFKLSYAVDAVVSNVLISMYWKCIGSVGYALCAFGDIEVKNSVSWNSIISVYSQAGDQRSAFRIFSSMQYDGSRPTEYTFGSLVTTACSLTEPDVRLLEQIMCTIQKSGLLTDLFVGSGLVSAFAKSGSLSYARKVFNQMETRNAVTLNGLMVGLVRQKWGEEATKLFMDMNSMIDVSPESYVILLSSFPEYSLAEEVGLKKGREVHGHVITTGLVDFMVGIGNGLVNMYAKCGSIADARRVFYFMTDKDSVSWNSMITGLDQNGCFIEAVERYKSMRRHDILPGSFTLISSLSSCASLKWAKLGQQIHGESLKLGIDLNVSVSNALMTLYAETGYLNECRKIFSSMPEHDQVSWNSIIGALARSERSLPEAVVCFLNAQRAGQKLNRITFSSVLSAVSSLSFGELGKQIHGLALKNNIADEATTENALIACYGKCGEMDGCEKIFSRMAERRDNVTWNSMISGYIHNELLAKALDLVWFMLQTGQRLDSFMYATVLSAFASVATLERGMEVHACSVRACLESDVVVGSALVDMYSKCGRLDYALRFFNTMPVRNSYSWNSMISGYARHGQGEEALKLFETMKLDGQTPPDHVTFVGVLSACSHAGLLEEGFKHFESMSDSYGLAPRIEHFSCMADVLGRAGELDKLEDFIEKMPMKPNVLIWRTVLGACCRANGRKAELGKKAAEMLFQLEPENAVNYVLLGNMYAAGGRWEDLVKARKKMKDADVKKEAGYSWVTMKDGVHMFVAGDKSHPDADVIYKKLKELNRKMRDAGYVPQTGFALYDLEQENKEEILSYHSEKLAVAFVLAAQRSSTLPIRIMKNLRVCGDCHSAFKYISKIEGRQIILRDSNRFHHFQDGACSCSDFW

SEQ ID NO: 72702 - DNA, 750 bp, Arabidopsis thaliana
  misc_feature (1)..(750): Ceres Seq. ID no. 4944658
  misc_feature: MA Experiment ID: 20001905 Result: Down-regulated in Transcription
  misc_feature: MA Experiment 20001905 PARAMETER Experiment Name: At_Drought_Reproduction_P Parameter: Age (day) Value: 40
  misc_feature: MA Experiment 20001905 PARAMETER Experiment Name: At_Drought_Reproduction_P Parameter: Organism Value: A. thaliana
  misc_feature: MA Experiment 20001905 PARAMETER Experiment Name: At_Drought_Reproduction_P Parameter: Plant Line Value: WS
  misc_feature: MA Experiment 20001905 PARAMETER Experiment Name: At_Drought_Reproduction_P Parameter: Timepoint (day) Value: 10
  misc_feature: MA Experiment 20001905 PARAMETER Experiment Name: At_Drought_Reproduction_P Parameter: Tissue Value: Rosettes
  misc_feature: MA Experiment 20001905 PARAMETER Experiment Name: At_Drought_Reproduction_P Parameter: Treatment Value: Drought vs. No Drought
atggaaaagttgaaaggccttggctttgatccttctttcttcaccggagctataactagtggtgaactaactcatcaatctttgcagaggagagatgatccttggtttgctgcactgggaaggaggtgcattcacattacttggaatgaccgaggagcaatctctttggagggtctagatctaaatgttgtggagaatgtggaagaagctgactttgttttagcgcacggcactgaagccctaggacttccttcaggcagtgtatctccaaggactattgatgagctagagaagattttggagaaatctgcagctcgaggacttcccatgatcgtagctaatccagattacgtgactgttgaagcaaatgtttttcatatcatgccaggtacactagcttccaagtatgaagaactgggaggagaagtgaagtcgatgggaaaacctcataagatgatctatgagtctgctatagcaattgcgggagtcaatccgtctgagtctatcgcagtaggagattcgctacatcatgatataaggggagcaaatgtttcaggaattgaatcaatattcatcactggagggattcatggtaatgagcttggtctcacttcttttgatgaaactgcaagtctagactcagtcaagacccttactgctaaacacaatgcattcccaacttatgtattatcagcctttaaatgctcatttgctgagaaagtaatttatagctgtgtgaatacaaaatga

SEQ ID NO: 72703 - protein, 249 aa, Arabidopsis thaliana
  peptide (1)..(249): Ceres Seq. ID no. 4944659
  misc_feature (3)..(195): Pfam Name: haloacid dehalogenase-like hydrolase Pfam Description: haloacid dehalogenase-like hydrolase
  misc_feature (1)..(249): Homolog of NCBI NO: 15238168 NR Description: putative protein; protein id: At5g10460.1
  misc_feature (1)..(234): Homolog of NCBI NO: 19310550 NR Description: unknown protein [Arabidopsis thaliana]
  misc_feature (1)..(233): Homolog of NCBI NO: 23014406 NR Description: hypothetical protein [Magnetospirillum
  misc_feature (3)..(233): Homolog of NCBI NO: 22968911 NR Description: hypothetical protein [Rhodospirillum rubrum]
  misc_feature (3)..(233): Homolog of NCBI NO: 15965982 NR Description: CONSERVED HYPOTHETICAL PROTEIN [Sinorhizobium >gi|15075252|emb|CAC46808.1| CONSERVED HYPOTHETICAL PROTEIN
  misc_feature (3)..(200): Homolog of NCBI NO: 36958658 NR Description: HAD superfamily protein involved in
  misc_feature (3)..(208): Homolog of NCBI NO: 13473111 NR Description: hypothetical protein [Mesorhizobium loti]
  misc_feature (3)..(213): Homolog of NCBI NO: 27382589 NR Description: blr7478 [Bradyrhizobium japonicum]
  misc_feature (38)..(214): Homolog of NCBI NO: 15888027 NR Description: AGR_C_1226p [Agrobacterium tumefaciens]
  misc_feature (38)..(214): Homolog of NCBI NO: 17934594 NR Description: conserved hypothetical protein [Agrobacterium str. C58 (U. Washington)] >gi|25522982|pir||AF2660 conserved
MEKLKGLGFDPSFFTGAITSGELTHQSLQRRDDPWFAALGRRCIHITWNDRGAISLEGLDLNVVENVEEADFVLAHGTEALGLPSGSVSPRTIDELEKILEKSAARGLPMIVANPDYVTVEANVFHIMPGTLASKYEELGGEVKSMGKPHKMIYESAIAIAGVNPSESIAVGDSLHHDIRGANVSGIESIFITGGIHGNELGLTSFDETASLDSVKTLTAKHNAFPTYVLSAFKCSFAEKVIYSCVNTK

SEQ ID NO: 72704 - protein, 140 aa, Arabidopsis thaliana
  peptide (1)..(140): Ceres Seq. ID no. 4944660
  misc_feature (1)..(86): Pfam Name: haloacid dehalogenase-like hydrolase Pfam Description: haloacid dehalogenase-like hydrolase
  misc_feature (1)..(140): Homolog of NCBI NO: 15238168 NR Description: putative protein; protein id: At5g10460.1
  misc_feature (1)..(125): Homolog of NCBI NO: 19310550 NR Description: unknown protein [Arabidopsis thaliana]
  misc_feature (1)..(124): Homolog of NCBI NO: 23014406 NR Description: hypothetical protein [Magnetospirillum
  misc_feature (1)..(124): Homolog of NCBI NO: 22968911 NR Description: hypothetical protein [Rhodospirillum rubrum]
  misc_feature (1)..(124): Homolog of NCBI NO: 15965982 NR Description: CONSERVED HYPOTHETICAL PROTEIN [Sinorhizobium >gi|15075252|emb|CAC46808.1| CONSERVED HYPOTHETICAL PROTEIN
  misc_feature (1)..(91): Homolog of NCBI NO: 36958658 NR Description: HAD superfamily protein involved in
  misc_feature (1)..(99): Homolog of NCBI NO: 13473111 NR Description: hypothetical protein [Mesorhizobium loti]
  misc_feature (1)..(104): Homolog of NCBI NO: 27382589 NR Description: blr7478 [Bradyrhizobium japonicum]
  misc_feature (1)..(105): Homolog of NCBI NO: 15888027 NR Description: AGR_C_1226p [Agrobacterium tumefaciens]
  misc_feature (1)..(105): Homolog of NCBI NO: 17934594 NR Description: conserved hypothetical protein [Agrobacterium str. C58 (U. Washington)] >gi|25522982|pir||AF2660 conserved
MIVANPDYVTVEANVFHIMPGTLASKYEELGGEVKSMGKPHKMIYESAIAIAGVNPSESIAVGDSLHHDIRGANVSGIESIFITGGIHGNELGLTSFDETASLDSVKTLTAKHNAFPTYVLSAFKCSFAEKVIYSCVNTK

SEQ ID NO: 72705 - DNA, 2415 bp, Arabidopsis thaliana
  misc_feature (1)..(2415): Ceres Seq. ID no. 4944694
  misc_feature: MA Experiment ID: 20000180 Result: Down-regulated in Transcription
  misc_feature: MA Experiment 20000180 PARAMETER Experiment Name: At_Germinating_Seeds_P Parameter: Age (hr) Value: 24 vs. 0
  misc_feature: MA Experiment 20000180 PARAMETER Experiment Name: At_Germinating_Seeds_P Parameter: Tissue Value: Germinating Seeds
  misc_feature: MA Experiment ID: 20001451 Result: Down-regulated in Transcription
  misc_feature: MA Experiment 20001451 PARAMETER Experiment Name: At_Far-red-induction_P Parameter: Age (day) Value: 7
  misc_feature: MA Experiment 20001451 PARAMETER Experiment Name: At_Far-red-induction_P Parameter: Light Value: Far-red vs. White
  misc_feature: MA Experiment 20001451 PARAMETER Experiment Name: At_Far-red-induction_P Parameter: Organism Value: A. thaliana
  misc_feature: MA Experiment 20001451 PARAMETER Experiment Name: At_Far-red-induction_P Parameter: Plant Line Value: Columbia
  misc_feature: MA Experiment 20001451 PARAMETER Experiment Name: At_Far-red-induction_P Parameter: Timepoint (hr) Value: 24
  misc_feature: MA Experiment 20001451 PARAMETER Experiment Name: At_Far-red-induction_P Parameter: Tissue Value: Whole Plant
atgtcaggagtttgggtgttcaataacggagtgatacgtctagtggagaacccgaaccagtccggtggagtttccacacagtcgcacggccggagaaatgtcttggtttacttgccgaccggtgaagccgtctcatcttactcgtcgctcgaacaaatcctaaggagcctcgggtgggaaagatacttcagtggagactccgatctcatccagtaccacaaacgctcctccatcgacctcatctccttaccaagagacttctccaagttcaactccgtttacatgtacgacatcgttgtcaagaaccctaattccttccacaaacaaacgatgcctcgtaaaggattatccaatttcgatgattatgatgatggttttgatgatgatgacgatgcttttgattatgactatgatgttgatatagatgaacatgaagaagaagctgctgctgaaccaaaggaagaaattgctaaaacgcaagggctttggcgatgtgctatctgtacatatgacaatgttgagactatgtttgtgtgtgatatctgcggtgttcttcgtcatcctgtcgccggaaatcaaagtatcaataagaatacagctgttcgtgttgtgagtctctttgcaattgtggtgttgcaaaggcgttattctgacagttccttttcaacttatgtagcacctttcaagtttgatgctccatcgccagatgatttagtctccaatggactaacatcctcaaaaactggtccaaaaggctcaggtgatgctagcatgagacagaaggagaagcaagatagcgtagaacagaaacctttaaagaaaggaggagatagttcagaaacaagctcccgaggtagacatgataaacttgatgataagggcggtgctggcggcataaaatcaggcaaaagtttgccaaaagcaaaagcagatatgtctaatgagacaagttcgtcctctaaatatatggagacgtcggagagtcttactggtactatgaacaagatgtctttgattggggaaacagaaaactctagcgatattaaaattagaggaccaaaatcacaatctaagcataagccagaggagtggatgcttcttgataaagaatcagatgcactaagccagcttaatcttgccatcgtggggcatgttgattccggtaagtctacactttcgggtagattattgcatcttttgggaagaatatcgcagaagcaaatgcacaagtatgagaaagaagcaaagttgcagggcaaagggtcctttgcatatgcctgggcattggatgagagtgctgaagagagggaacgaggaataacaatgactgtggctgttgcttatttcaattccaaaagacatcatgttgttttgctcgactctcctggacacaaagattttgttccaaacatgatagcaggagcaacacaagcagatgctgcgattcttgtcatagatgcatctgttggtgcttttgaagctggttttgataatttgaaagggcagacaagggagcatgcacgggttctgagaggttttggcgtggagcaagtcatagttgcaatcaacaaaatggatattgttggctactcaaaggaaagatttgatttgattaagcagcacgttggatcttttttgcaatcctgtcgttttaaggattcttctctgacatggattccattaagtgccatggaaaaccaaaacttggtggcagctccctctgataaccgcctatcctcatggtatcaaggtccatgtttattggatgccgtcgactctgtcaagtctcctgatagagacgtctcaaagcctctactcatgcctatatgtgacgctgtaagatcaacttcgcaagggcaggtatctgcatgtggcaaacttgaagctggagctgtccggccaggatctaaggtaatggttatgccatcaggagatcaaggaaccatacgatcactagagcgtgactctcaggcttgcaccattgcaagagctggagataacgtagcgttagcgttgcaagggatcgatgcaaatcaagtaatggcaggagatgtattgtgccatcctgatttccctgtatcagtagcaactcatttggaattgatggtgctcgtcttggaaggcgcaacaccgatcttgctcggttctcagttggagtttcatgtgcatcatgcaaaggaagcagcaacagttgtgaaacttgtggcaatgcttgatcccaaaacagggcagccaacaaagaagtctcctcgttgtctaactgctaaacagagcgcaatgcttgaggttagtctccaaaatccagtatgtgtggagacattttctgagagtagagctcttggaagagtgttccttagatcatcgggaagaactgttgctatgggcaaagttactcggattatccaagactcataa

SEQ ID NO: 72706 - protein, 804 aa, Arabidopsis thaliana
  peptide (1)..(804): Ceres Seq. ID no. 4944695
  misc_feature (374)..(598): Pfam Name: Elongation factor Tu GTP binding domain Pfam Description: Elongation factor Tu GTP binding domain
  misc_feature (218)..(804): Homolog of NCBI NO: 30683251 NR Description: elongation factor 1-alpha (EF-1-alpha), putative
  misc_feature (250)..(803): Homolog of NCBI NO: 38347078 NR Description: OSJNBa0006A01.19 [Oryza sativa (japonica
  misc_feature (111)..(186): Homolog of NCBI NO: 38347078 NR Description: OSJNBa0006A01.19 [Oryza sativa (japonica
  misc_feature (111)..(799): Homolog of NCBI NO: 38567963 NR Description: OSJNBa0093F12.4 [Oryza sativa (japonica
  misc_feature (111)..(803): Homolog of NCBI NO: 34895284 NR Description: putative eukaryoticrelease factor [Oryza sativa
  misc_feature (145)..(800): Homolog of NCBI NO: 38344203 NR Description: OSJNBa0064G10.19 [Oryza sativa (japonica
  misc_feature (308)..(800): Homolog of NCBI NO: 31206733 NR Description: ENSANGP00000002945 [Anopheles gambiae]
  misc_feature (295)..(800): Homolog of NCBI NO: 5729864 NR Description: HBS1-like [Homo sapiens]
  misc_feature (318)..(800): Homolog of NCBI NO: 5689413 NR Description: KIAA1038 protein [Homo sapiens]
  misc_feature (367)..(800): Homolog of NCBI NO: 16307413 NR Description: Similar to HBS1 (S. cerevisiae)-like [Mus
MSGVWVFNNGVIRLVENPNQSGGVSTQSHGRRNVLVYLPTGEAVSSYSSLEQILRSLGWERYFSGDSDLIQYHKRSSIDLISLPRDFSKFNSVYMYDIVVKNPNSFHKQTMPRKGLSNFDDYDDGFDDDDDAFDYDYDVDIDEHEEEAAAEPKEEIAKTQGLWRCAICTYDNVETMFVCDICGVLRHPVAGNQSINKNTAVRVVSLFAIVVLQRRYSDSSFSTYVAPFKFDAPSPDDLVSNGLTSSKTGPKGSGDASMRQKEKQDSVEQKPLKKGGDSSETSSRGRHDKLDDKGGAGGIKSGKSLPKAKADMSNETSSSSKYMETSESLTGTMNKMSLIGETENSSDIKIRGPKSQSKHKPEEWMLLDKESDALSQLNLAIVGHVDSGKSTLSGRLLHLLGRISQKQMHKYEKEAKLQGKGSFAYAWALDESAEERERGITMTVAVAYFNSKRHHVVLLDSPGHKDFVPNMIAGATQADAAILVIDASVGAFEAGFDNLKGQTREHARVLRGFGVEQVIVAINKMDIVGYSKERFDLIKQHVGSFLQSCRFKDSSLTWIPLSAMENQNLVAAPSDNRLSSWYQGPCLLDAVDSVKSPDRDVSKPLLMPICDAVRSTSQGQVSACGKLEAGAVRPGSKVMVMPSGDQGTIRSLERDSQACTIARAGDNVALALQGIDANQVMAGDVLCHPDFPVSVATHLELMVLVLEGATPILLGSQLEFHVHHAKEAATVVKLVAMLDPKTGQPTKKSPRCLTAKQSAMLEVSLQNPVCVETFSESRALGRVFLRSSGRTVAMGKVTRIIQDS

SEQ ID NO: 72707 - protein, 710 aa, Arabidopsis thaliana
  peptide (1)..(710): Ceres Seq. ID no. 4944696
  misc_feature (280)..(504): Pfam Name: Elongation factor Tu GTP binding domain Pfam Description: Elongation factor Tu GTP binding domain
  misc_feature (124)..(710): Homolog of NCBI NO: 30683251 NR Description: elongation factor 1-alpha (EF-1-alpha), putative
  misc_feature (156)..(709): Homolog of NCBI NO: 38347078 NR Description: OSJNBa0006A01.19 [Oryza sativa (japonica
  misc_feature (17)..(92): Homolog of NCBI NO: 38347078 NR Description: OSJNBa0006A01.19 [Oryza sativa (japonica
  misc_feature (17)..(705): Homolog of NCBI NO: 38567963 NR Description: OSJNBa0093F12.4 [Oryza sativa (japonica
  misc_feature (17)..(709): Homolog of NCBI NO: 34895284 NR Description: putative eukaryoticrelease factor [Oryza sativa
  misc_feature (51)..(706): Homolog of NCBI NO: 38344203 NR Description: OSJNBa0064G10.19 [Oryza sativa (japonica
  misc_feature (214)..(706): Homolog of NCBI NO: 31206733 NR Description: ENSANGP00000002945 [Anopheles gambiae]
  misc_feature (201)..(706): Homolog of NCBI NO: 5729864 NR Description: HBS1-like [Homo sapiens]
  misc_feature (224)..(706): Homolog of NCBI NO: 5689413 NR Description: KIAA1038 protein [Homo sapiens]
  misc_feature (273)..(706): Homolog of NCBI NO: 16307413 NR Description: Similar to HBS1 (S. cerevisiae)-like [Mus
MYDIVVKNPNSFHKQTMPRKGLSNFDDYDDGFDDDDDAFDYDYDVDIDEHEEEAAAEPKEEIAKTQGLWRCAICTYDNVETMFVCDICGVLRHPVAGNQSINKNTAVRVVSLFAIVVLQRRYSDSSFSTYVAPFKFDAPSPDDLVSNGLTSSKTGPKGSGDASMRQKEKQDSVEQKPLKKGGDSSETSSRGRHDKLDDKGGAGGIKSGKSLPKAKADMSNETSSSSKYMETSESLTGTMNKMSLIGETENSSDIKIRGPKSQSKHKPEEWMLLDKESDALSQLNLAIVGHVDSGKSTLSGRLLHLLGRISQKQMHKYEKEAKLQGKGSFAYAWALDESAEERERGITMTVAVAYFNSKRHHVVLLDSPGHKDFVPNMIAGATQADAAILVIDASVGAFEAGFDNLKGQTREHARVLRGFGVEQVIVAINKMDIVGYSKERFDLIKQHVGSFLQSCRFKDSSLTWIPLSAMENQNLVAAPSDNRLSSWYQGPCLLDAVDSVKSPDRDVSKPLLMPICDAVRSTSQGQVSACGKLEAGAVRPGSKVMVMPSGDQGTIRSLERDSQACTIARAGDNVALALQGIDANQVMAGDVLCHPDFPVSVATHLELMVLVLEGATPILLGSQLEFHVHHAKEAATVVKLVAMLDPKTGQPTKKSPRCLTAKQSAMLEVSLQNPVCVETFSESRALGRVFLRSSGRTVAMGKVTRIIQDS

SEQ ID NO: 72708 - protein, 694 aa, Arabidopsis thaliana
  peptide (1)..(694): Ceres Seq. ID no. 4944697
  misc_feature (264)..(488): Pfam Name: Elongation factor Tu GTP binding domain Pfam Description: Elongation factor Tu GTP binding domain
  misc_feature (108)..(694): Homolog of NCBI NO: 30683251 NR Description: elongation factor 1-alpha (EF-1-alpha), putative
  misc_feature (140)..(693): Homolog of NCBI NO: 38347078 NR Description: OSJNBa0006A01.19 [Oryza sativa (japonica
  misc_feature (1)..(76): Homolog of NCBI NO: 38347078 NR Description: OSJNBa0006A01.19 [Oryza sativa (japonica
  misc_feature (1)..(689): Homolog of NCBI NO: 38567963 NR Description: OSJNBa0093F12.4 [Oryza sativa (japonica
  misc_feature (1)..(693): Homolog of NCBI NO: 34895284 NR Description: putative eukaryoticrelease factor [Oryza sativa
  misc_feature (35)..(690): Homolog of NCBI NO: 38344203 NR Description: OSJNBa0064G10.19 [Oryza sativa (japonica
  misc_feature (198)..(690): Homolog of NCBI NO: 31206733 NR Description: ENSANGP00000002945 [Anopheles gambiae]
  misc_feature (185)..(690): Homolog of NCBI NO: 5729864 NR Description: HBS1-like [Homo sapiens]
  misc_feature (208)..(690): Homolog of NCBI NO: 5689413 NR Description: KIAA1038 protein [Homo sapiens]
  misc_feature (257)..(690): Homolog of NCBI NO: 16307413 NR Description: Similar to HBS1 (S. cerevisiae)-like [Mus
MPRKGLSNFDDYDDGFDDDDDAFDYDYDVDIDEHEEEAAAEPKEEIAKTQGLWRCAICTYDNVETMFVCDICGVLRHPVAGNQSINKNTAVRVVSLFAIVVLQRRYSDSSFSTYVAPFKFDAPSPDDLVSNGLTSSKTGPKGSGDASMRQKEKQDSVEQKPLKKGGDSSETSSRGRHDKLDDKGGAGGIKSGKSLPKAKADMSNETSSSSKYMETSESLTGTMNKMSLIGETENSSDIKIRGPKSQSKHKPEEWMLLDKESDALSQLNLAIVGHVDSGKSTLSGRLLHLLGRISQKQMHKYEKEAKLQGKGSFAYAWALDESAEERERGITMTVAVAYFNSKRHHVVLLDSPGHKDFVPNMIAGATQADAAILVIDASVGAFEAGFDNLKGQTREHARVLRGFGVEQVIVAINKMDIVGYSKERFDLIKQHVGSFLQSCRFKDSSLTWIPLSAMENQNLVAAPSDNRLSSWYQGPCLLDAVDSVKSPDRDVSKPLLMPICDAVRSTSQGQVSACGKLEAGAVRPGSKVMVMPSGDQGTIRSLERDSQACTIARAGDNVALALQGIDANQVMAGDVLCHPDFPVSVATHLELMVLVLEGATPILLGSQLEFHVHHAKEAATVVKLVAMLDPKTGQPTKKSPRCLTAKQSAMLEVSLQNPVCVETFSESRALGRVFLRSSGRTVAMGKVTRIIQDS

SEQ ID NO: 72709 - DNA, 1194 bp, Arabidopsis thaliana
  misc_feature (1)..(1194): Ceres Seq. ID no. 4944798
  misc_feature: MA Experiment ID: 20000184 Result: Down-regulated in Transcription
  misc_feature: MA Experiment 20000184 PARAMETER Experiment Name: At_Shoots__P Parameter: Age (day) Value: 7
  misc_feature: MA Experiment 20000184 PARAMETER Experiment Name: At_Shoots__P Parameter: Tissue Value: Shoots vs. Whole Plant
atggattaccgaccttctgatagtagtggtacagatgatgacctgcctccatctcatcaaggtagatatcaaagaaacgccagacctaccgggaatggaaggccttcagttctcaattctgctcctttatcacgggtgcacaatgaaatggaaactcaaattcatctcattgagcaagaagcttatagctcgatactccgcgcatttaaagcccagtccgatgctattacctgggagaaagaaagtttgatcactgaactcagaaaagaacttcgagtgtctgatgaggaacacagagagctgttatcaagggttaacgctgatgaaatgatcaggcgaataagggaatggagaaaggcaaacagccttcagtctagtgttcctcagctggttcatgatgctccgagtccggctgtatcaggatcacgtaagaagcaaaagacatcacaatcaatcgcctcattagcgatgggcccaccatctccttctttgcacccttcaatgcaaccatcgtcatctgcactaagaaggggaggtcctccaccaggtccaaagaccaagaagccaaagacatcgatgcagtacccatctacaggcattgctggaaggccccaggctggcgctttaacaaatgaaccaggtgaatcgggatcatatgacccgttggttggaaggaaggtatggacgaagtggcctgatgacaaccaatactacgaagctgttataactgactacaaccctgttgaggggcgtcatgctttagtgtatgatattaactctgcgaatgaaacctgggaatgggtaaatcttaaagagatatctccgggagatatcagatgggaaggtgaagatcctgggatttctcgtaaaggaggacatcctgggcaaggccgtggaacaaaaaccatggctcgtggtggtcctgcaagcaatgcgggtggtagaggtaggggaagcatgaggatgcagcaacctaagacacagaatggcatcggaaagaaagctttaggcgaaatcgaaattctccacactgagacattgttaaaagaggtggaaaaagtttttgggtcagttaaccccaacccagcagaggtagagaaggcaaagagagtgctgagagatcatgaactagctcttatggatgccatcgcaaagcttgaagaaatatcagatggagaaagcggtaatatttga

SEQ ID NO: 72710 - protein, 397 aa, Arabidopsis thaliana
  peptide (1)..(397): Ceres Seq. ID no. 4944799
  misc_feature (50)..(123): Pfam Name: ENT domain Pfam Description: ENT domain
  misc_feature (1)..(397): Homolog of NCBI NO: 30684221 NR Description: expressed protein [Arabidopsis thaliana]
  misc_feature (1)..(394): Homolog of NCBI NO: 11358228 NR Description: hypothetical protein T24H18.190 - Arabidopsis >gi|7630058|emb|CAB88266.1| putative protein [Arabidopsis
  misc_feature (187)..(394): Homolog of NCBI NO: 15240146 NR Description: putative protein; protein id: At5g06780.1, by cDNA: 157058., supported by cDNA: gi_16226578 [Arabidopsis >gi|9759306|dbj|BAB09812.1|
  misc_feature (46)..(155): Homolog of NCBI NO: 15240146 NR Description: putative protein; protein id: At5g06780.1, by cDNA: 157058., supported by cDNA: gi_16226578 [Arabidopsis >gi|9759306|dbj|BAB09812.1|
  misc_feature (187)..(394): Homolog of NCBI NO: 21553685 NR Description: unknown [Arabidopsis thaliana]
  misc_feature (50)..(155): Homolog of NCBI NO: 21553685 NR Description: unknown [Arabidopsis thaliana]
  misc_feature (129)..(394): Homolog of NCBI NO: 38637206 NR Description: unknown protein [Oryza sativa (japonica
  misc_feature (1)..(329): Homolog of NCBI NO: 38637206 NR Description: unknown protein [Oryza sativa (japonica
  misc_feature (117)..(396): Homolog of NCBI NO: 9294111 NR Description: emb|CAB88266.1~gene_id:T23B7.8~similar to unknown
  misc_feature (117)..(393): Homolog of NCBI NO: 15229958 NR Description: unknown protein; protein id: At3g12140.1
MDYRPSDSSGTDDDLPPSHQGRYQRNARPTGNGRPSVLNSAPLSRVHNEMETQIHLIEQEAYSSILRAFKAQSDAITWEKESLITELRKELRVSDEEHRELLSRVNADEMIRRIREWRKANSLQSSVPQLVHDAPSPAVSGSRKKQKTSQSIASLAMGPPSPSLHPSMQPSSSALRRGGPPPGPKTKKPKTSMQYPSTGIAGRPQAGALTNEPGESGSYDPLVGRKVWTKWPDDNQYYEAVITDYNPVEGRHALVYDINSANETWEWVNLKEISPGDIRWEGEDPGISRKGGHPGQGRGTKTMARGGPASNAGGRGRGSMRMQQPKTQNGIGKKALGEIEILHTETLLKEVEKVFGSVNPNPAEVEKAKRVLRDHELALMDAIAKLEEISDGESGNI

SEQ ID NO: 72711 - protein, 348 aa, Arabidopsis thaliana
  peptide (1)..(348): Ceres Seq. ID no. 4944800
  misc_feature (1)..(74): Pfam Name: ENT domain Pfam Description: ENT domain
  misc_feature (1)..(348): Homolog of NCBI NO: 30684221 NR Description: expressed protein [Arabidopsis thaliana]
  misc_feature (1)..(345): Homolog of NCBI NO: 11358228 NR Description: hypothetical protein T24H18.190 - Arabidopsis >gi|7630058|emb|CAB88266.1| putative protein [Arabidopsis
  misc_feature (138)..(345): Homolog of NCBI NO: 15240146 NR Description: putative protein; protein id: At5g06780.1, by cDNA: 157058., supported by cDNA: gi_16226578 [Arabidopsis >gi|9759306|dbj|BAB09812.1|
  misc_feature (1)..(106): Homolog of NCBI NO: 15240146 NR Description: putative protein; protein id: At5g06780.1, by cDNA: 157058., supported by cDNA: gi_16226578 [Arabidopsis >gi|9759306|dbj|BAB09812.1|
  misc_feature (138)..(345): Homolog of NCBI NO: 21553685 NR Description: unknown [Arabidopsis thaliana]
  misc_feature (1)..(106): Homolog of NCBI NO: 21553685 NR Description: unknown [Arabidopsis thaliana]
  misc_feature (80)..(345): Homolog of NCBI NO: 38637206 NR Description: unknown protein [Oryza sativa (japonica
  misc_feature (1)..(280): Homolog of NCBI NO: 38637206 NR Description: unknown protein [Oryza sativa (japonica
  misc_feature (68)..(347): Homolog of NCBI NO: 9294111 NR Description: emb|CAB88266.1~gene_id:T23B7.8~similar to unknown
  misc_feature (68)..(344): Homolog of NCBI NO: 15229958 NR Description: unknown protein; protein id: At3g12140.1
METQIHLIEQEAYSSILRAFKAQSDAITWEKESLITELRKELRVSDEEHRELLSRVNADEMIRRIREWRKANSLQSSVPQLVHDAPSPAVSGSRKKQKTSQSIASLAMGPPSPSLHPSMQPSSSALRRGGPPPGPKTKKPKTSMQYPSTGIAGRPQAGALTNEPGESGSYDPLVGRKVWTKWPDDNQYYEAVITDYNPVEGRHALVYDINSANETWEWVNLKEISPGDIRWEGEDPGISRKGGHPGQGRGTKTMARGGPASNAGGRGRGSMRMQQPKTQNGIGKKALGEIEILHTETLLKEVEKVFGSVNPNPAEVEKAKRVLRDHELALMDAIAKLEEISDGESGNI

SEQ ID NO: 72712 - protein, 288 aa, Arabidopsis thaliana
  peptide (1)..(288): Ceres Seq. ID no. 4944801
  misc_feature (1)..(288): Homolog of NCBI NO: 30684221 NR Description: expressed protein [Arabidopsis thaliana]
  misc_feature (1)..(285): Homolog of NCBI NO: 11358228 NR Description: hypothetical protein T24H18.190 - Arabidopsis >gi|7630058|emb|CAB88266.1| putative protein [Arabidopsis
  misc_feature (78)..(285): Homolog of NCBI NO: 15240146 NR Description: putative protein; protein id: At5g06780.1, by cDNA: 157058., supported by cDNA: gi_16226578 [Arabidopsis >gi|9759306|dbj|BAB09812.1|
  misc_feature (1)..(46): Homolog of NCBI NO: 15240146 NR Description: putative protein; protein id: At5g06780.1, by cDNA: 157058., supported by cDNA: gi_16226578 [Arabidopsis >gi|9759306|dbj|BAB09812.1|
  misc_feature (78)..(285): Homolog of NCBI NO: 21553685 NR Description: unknown [Arabidopsis thaliana]
  misc_feature (1)..(46): Homolog of NCBI NO: 21553685 NR Description: unknown [Arabidopsis thaliana]
  misc_feature (20)..(285): Homolog of NCBI NO: 38637206 NR Description: unknown protein [Oryza sativa (japonica
  misc_feature (1)..(220): Homolog of NCBI NO: 38637206 NR Description: unknown protein [Oryza sativa (japonica
  misc_feature (8)..(287): Homolog of NCBI NO: 9294111 NR Description: emb|CAB88266.1~gene_id:T23B7.8~similar to unknown
  misc_feature (8)..(284): Homolog of NCBI NO: 15229958 NR Description: unknown protein; protein id: At3g12140.1
MIRRIREWRKANSLQSSVPQLVHDAPSPAVSGSRKKQKTSQSIASLAMGPPSPSLHPSMQPSSSALRRGGPPPGPKTKKPKTSMQYPSTGIAGRPQAGALTNEPGESGSYDPLVGRKVWTKWPDDNQYYEAVITDYNPVEGRHALVYDINSANETWEWVNLKEISPGDIRWEGEDPGISRKGGHPGQGRGTKTMARGGPASNAGGRGRGSMRMQQPKTQNGIGKKALGEIEILHTETLLKEVEKVFGSVNPNPAEVEKAKRVLRDHELALMDAIAKLEEISDGESGNI

SEQ ID NO: 72713 - DNA, 874 bp, Arabidopsis thaliana
  misc_feature (1)..(874): Ceres Seq. ID no. 4944833
  misc_feature: MA Experiment ID: 108577 Result: Up-regulated in Transcription
  misc_feature: MA Experiment 108577 PARAMETER Experiment Name: At_42deg_Heat_cDNA_P Parameter: Temperature (deg C) Value: 42 vs. 22
  misc_feature: MA Experiment 108577 PARAMETER Experiment Name: At_42deg_Heat_cDNA_P Parameter: Timepoint (hr) Value: 6
  misc_feature: MA Experiment 108577 PARAMETER Experiment Name: At_42deg_Heat_cDNA_P Parameter: Tissue Value: Aerial
  misc_feature: MA Experiment ID: 108585 Result: Up-regulated in Transcription
  misc_feature: MA Experiment 108585 PARAMETER Experiment Name: At_5mM_NaNP_cDNA_P Parameter: Timepoint (hr) Value: 6
  misc_feature: MA Experiment 108585 PARAMETER Experiment Name: At_5mM_NaNP_cDNA_P Parameter: Tissue Value: Aerial
  misc_feature: MA Experiment 108585 PARAMETER Experiment Name: At_5mM_NaNP_cDNA_P Parameter: Treatment Value: null
  misc_feature: MA Experiment ID: 20000111 Result: Up-regulated in Transcription
  misc_feature: MA Experiment 20000111 PARAMETER Experiment Name: At_42deg_Heat_cDNA_P Parameter: Temperature (deg C) Value: 42 vs. 22
  misc_feature: MA Experiment 20000111 PARAMETER Experiment Name: At_42deg_Heat_cDNA_P Parameter: Timepoint (hr) Value: 6
  misc_feature: MA Experiment 20000111 PARAMETER Experiment Name: At_42deg_Heat_cDNA_P Parameter: Tissue Value: Aerial
  misc_feature: MA Experiment ID: 20000112 Result: Up-regulated in Transcription
  misc_feature: MA Experiment 20000112 PARAMETER Experiment Name: At_42deg_Heat_cDNA_P Parameter: Temperature (deg C) Value: 42 vs. 22
  misc_feature: MA Experiment 20000112 PARAMETER Experiment Name: At_42deg_Heat_cDNA_P Parameter: Timepoint (hr) Value: 2
  misc_feature: MA Experiment 20000112 PARAMETER Experiment Name: At_42deg_Heat_cDNA_P Parameter: Tissue Value: Aerial
  misc_feature: MA Experiment ID: 20000113 Result: Up-regulated in Transcription
  misc_feature: MA Experiment 20000113 PARAMETER Experiment Name: At_42deg_Heat_cDNA_P Parameter: Temperature (deg C) Value: 42 vs. 22
  misc_feature: MA Experiment 20000113 PARAMETER Experiment Name: At_42deg_Heat_cDNA_P Parameter: Timepoint (hr) Value: 8
  misc_feature: MA Experiment 20000113 PARAMETER Experiment Name: At_42deg_Heat_cDNA_P Parameter: Tissue Value: Aerial
  misc_feature: MA Experiment ID: 20000144 Result: Up-regulated in Transcription
  misc_feature: MA Experiment 20000144 PARAMETER Experiment Name: At_42deg_Heat_cDNA_P Parameter: Temperature (deg C) Value: 42 vs. 22
  misc_feature: MA Experiment 20000144 PARAMETER Experiment Name: At_42deg_Heat_cDNA_P Parameter: Timepoint (hr) Value: 1
  misc_feature: MA Experiment 20000144 PARAMETER Experiment Name: At_42deg_Heat_cDNA_P Parameter: Tissue Value: Aerial
  misc_feature: MA Experiment ID: 20000171 Result: Up-regulated in Transcription
  misc_feature: MA Experiment 20000171 PARAMETER Experiment Name: At_42deg_Heat_P Parameter: Age (day) Value: 14
  misc_feature: MA Experiment 20000171 PARAMETER Experiment Name: At_42deg_Heat_P Parameter: Organism Value: A. thaliana
  misc_feature: MA Experiment 20000171 PARAMETER Experiment Name: At_42deg_Heat_P Parameter: Plant Line Value: WS
  misc_feature: MA Experiment 20000171 PARAMETER Experiment Name: At_42deg_Heat_P Parameter: Temperature (deg C) Value: 42 vs. 22
  misc_feature: MA Experiment 20000171 PARAMETER Experiment Name: At_42deg_Heat_P Parameter: Timepoint (hr) Value: 1
  misc_feature: MA Experiment 20000171 PARAMETER Experiment Name: At_42deg_Heat_P Parameter: Tissue Value: Aerial
  misc_feature: MA Experiment ID: 20000173 Result: Up-regulated in Transcription
  misc_feature: MA Experiment 20000173 PARAMETER Experiment Name: At_42deg_Heat_P Parameter: Age (day) Value: 14
  misc_feature: MA Experiment 20000173 PARAMETER Experiment Name: At_42deg_Heat_P Parameter: Organism Value: A. thaliana
  misc_feature: MA Experiment 20000173 PARAMETER Experiment Name: At_42deg_Heat_P Parameter: Plant Line Value: WS
  misc_feature: MA Experiment 20000173 PARAMETER Experiment Name: At_42deg_Heat_P Parameter: Temperature (deg C) Value: 42 vs. 22
  misc_feature: MA Experiment 20000173 PARAMETER Experiment Name: At_42deg_Heat_P Parameter: Timepoint (hr) Value: 6
  misc_feature: MA Experiment 20000173 PARAMETER Experiment Name: At_42deg_Heat_P Parameter: Tissue Value: Aerial
accgccattgattagcttcctctctatttttactctcgtcacgtcctccacttttgggtcattattacttctcgaagctcaccaagatcttgaatttgccgacctctcaagattcttgatggtaaaagcatacagacaagagcatgtttacaagcatccgtgggagcgggtgagtgctgcttcatggaggaagtttgcagaccctgaaaacaaacgcatcctttctcacatccttgaagtcgataccttgaacaggaaactcgacactgagaccgggaaactccacaccacgcgtgctctcaccatccatgctcctggtccatggtttctccataggatcattggtcaggacatctgtcactgtgttgaatcaacagttgtagatggcaaatcacgttctatgcagctaacaacaaagaacattagtctcaaaaagttcattgaagtggaggagaggataagatatgatccgcatccagataatccatcagcctggactgtttgtagccaggagacaagcattcggatcaaacccttgtcggctctggcctcaatggctgagaaggttgaacagaagtgcgcagagaaattcatgcagaatagcgctaaaggaagagaggttatggagaggatttgtaagtatatggaagcagaatccgctcggatctaaagatcaaaacttcttagattccagtatcttcttggtttgtgattcttgaatgttttgtaagtcaagagagctacgtttttggagcatggttataataagtttatgaaacagtttagatcaaattggtgtttgtttcagtaactcctgttttgtgttagcaactgaaagttgaattgtgaagcttttatccaaatttttgaatcc

SEQ ID NO: 72714 - protein, 222 aa, Arabidopsis thaliana; identical to SEQ ID NO: 28228
  peptide (1)..(222): Ceres Seq. ID no. 4944834
  misc_feature (59)..(219): Pfam Name: MSF1-like conserved region Pfam Description: MSF1-like conserved region
  misc_feature (40)..(222): Homolog of NCBI NO: 15240002 NR Description: putative protein; protein id: At5g13070.1 thaliana] >gi|9955551|emb|CAC05435.1| putative protein
  misc_feature (41)..(218): Homolog of NCBI NO: 7705610 NR Description: CGI-107 protein [Homo sapiens]
  misc_feature (41)..(218): Homolog of NCBI NO: 26392626 NR Description: Protein C20orf45 (CGI-107) unnamed protein product [Homo sapiens]
  misc_feature (41)..(218): Homolog of NCBI NO: 28422177 NR Description: Similar to chromosome 20 open reading frame 45
  misc_feature (41)..(218): Homolog of NCBI NO: 37577049 NR Description: BCR/ABL-regulated protein [Cricetulus griseus]
  misc_feature (41)..(218): Homolog of NCBI NO: 28279126 NR Description: Similar to chromosome 20 open reading frame 45
  misc_feature (41)..(211): Homolog of NCBI NO: 19112130 NR Description: conserved hypothetical protein
  misc_feature (41)..(218): Homolog of NCBI NO: 13384954 NR Description: RIKEN cDNA 2310042G06 [Mus musculus] Protein C20orf45 homolog >gi|12833453|dbj|BAB22528.1| unnamed product [Mus musculus] >gi|12842787|dbj|BAB25731.1| unnamed
  misc_feature (41)..(218): Homolog of NCBI NO: 12850407 NR Description: unnamed protein product [Mus musculus]
  misc_feature (41)..(217): Homolog of NCBI NO: 38678528 NR Description: erythroid differentiation and denucleation factor [Homo sapiens] >gi|16551121|dbj|BAB71083.1| unnamed protein

SEQ ID NO: 72715 - protein, 183 aa, Arabidopsis thaliana; identical to SEQ ID NO: 28229
  peptide (1)..(183): Ceres Seq. ID no. 4944835
  misc_feature (20)..(180): Pfam Name: MSF1-like conserved region Pfam Description: MSF1-like conserved region
  misc_feature (1)..(183): Homolog of NCBI NO: 15240002 NR Description: putative protein; protein id: At5g13070.1 thaliana] >gi|9955551|emb|CAC05435.1| putative protein
  misc_feature (2)..(179): Homolog of NCBI NO: 7705610 NR Description: CGI-107 protein [Homo sapiens]
  misc_feature (2)..(179): Homolog of NCBI NO: 26392626 NR Description: Protein C20orf45 (CGI-107) unnamed protein product [Homo sapiens]
  misc_feature (2)..(179): Homolog of NCBI NO: 28422177 NR Description: Similar to chromosome 20 open reading frame 45
  misc_feature (2)..(179): Homolog of NCBI NO: 37577049 NR Description: BCR/ABL-regulated protein [Cricetulus griseus]
  misc_feature (2)..(179): Homolog of NCBI NO: 28279126 NR Description: Similar to chromosome 20 open reading frame 45
  misc_feature (2)..(172): Homolog of NCBI NO: 19112130 NR Description: conserved hypothetical protein
  misc_feature (2)..(179): Homolog of NCBI NO: 13384954 NR Description: RIKEN cDNA 2310042G06 [Mus musculus] Protein C20orf45 homolog >gi|12833453|dbj|BAB22528.1| unnamed product [Mus musculus] >gi|12842787|dbj|BAB25731.1| unnamed
  misc_feature (2)..(179): Homolog of NCBI NO: 12850407 NR Description: unnamed protein product [Mus musculus]
  misc_feature (2)..(178): Homolog of NCBI NO: 38678528 NR Description: erythroid differentiation and denucleation factor [Homo sapiens] >gi|16551121|dbj|BAB71083.1| unnamed protein

SEQ ID NO: 72716 - DNA, 2457 bp, Arabidopsis thaliana
  misc_feature (1)..(2457): Ceres Seq. ID no. 4944886
  misc_feature: MA Experiment ID: 20000307 Result: Down-regulated in Transcription
  misc_feature: MA Experiment 20000307 PARAMETER Experiment Name: At_Germinating_Seeds_Sub_P Parameter: Age (hr) Value: 24 vs. 0
  misc_feature: MA Experiment 20000307 PARAMETER Experiment Name: At_Germinating_Seeds_Sub_P Parameter: Organism Value: A. thaliana
  misc_feature: MA Experiment 20000307 PARAMETER Experiment Name: At_Germinating_Seeds_Sub_P Parameter: Plant Line Value: WS
  misc_feature: MA Experiment 20000307 PARAMETER Experiment Name: At_Germinating_Seeds_Sub_P Parameter: Tissue Value: Germinating Seeds
atgagaataattcatgttgcgcagactcgcagattgatgatccgatgcaatcgcattcgacaatgtgggttttctgtgaaaactgcggcattggatttagaatcgtcggattcgataatcccaggcttagactctcatgcttacggtgcaatgctccgtcgctgcattcagaagaacgacccaatttcagcaaaggctattcattgcgacatcttgaagaaaggaagctgcttagaccttttcgccacaaacattctactcaacgcttatgtgaaagctggctttgacaaagatgcgttaaacctgttcgacgaaatgcctgagagaaataatgtctcttttgttactcttgcgcaagggtatgcgtgtcaagatcccattggtttgtattccaggttgcatcgagagggtcatgagcttaatccacacgtcttcacttctttcttgaagttgtttgttagtttggacaaagctgagatttgtccatggttgcattctcctatcgttaagctcggttatgattctaatgcttttgttggagctgcgcttattaatgcttactctgtctgtggttctgttgatagtgcaagaactgtttttgaagggattttgtgcaaagacattgttgtttgggcaggaattgtatcttgctatgtagaaaatggatatttcgaggattctcttaagctgctatcttgtatgaggatggctggtttcatgcccaacaactacacctttgacacggcgcttaaggctagtattgggctaggcgcatttgatttcgcgaaaggtgttcatggccaaatcttaaaaacatgttatgtgttggatcctcgtgtgggtgttggtttgcttcagttgtatacacaactcggagacatgtctgatgctttcaaagtgtttaatgagatgccaaagaatgatgtggtaccttggagttttatgattgctcgtttttgtcaaaacggtttctgcaacgaggcggttgatctttttattcgaatgagggaagcttttgttgtccctaacgagtttactttaagcagtattttgaatggctgtgccatcggaaagtgttctggcttaggtgagcaactccatggtcttgtagtcaaagttggctttgatttggatatctatgtctcaaatgctcttattgatgtatatgccaaatgtgagaaaatggataccgctgtgaagttatttgctgagttatcaagtaaaaatgaggtaagctggaacacagtcattgtcgggtatgagaatctaggcgaaggaggaaaagcgttcagcatgtttcgtgaagcgctcagaaatcaggtgtcggtaactgaagtaactttctcaagtgctcttggagcttgtgcttcattggcgagcatggacctcggtgtccaagttcatggactggcgataaaaaccaataatgccaaaaaagttgcagtgagtaactcattgatagatatgtatgcaaaatgtggtgatatcaaattcgcacaatcggtgttcaacgagatggaaacgatagatgtcgcttcatggaatgcgttgatctcaggctattccacacatggactgggtagacaggcattgagaatcctcgacattatgaaggatagagattgcaagccaaatggtttaacatttcttggtgttctttctggatgcagcaatgcaggattaatagatcaaggtcaagaatgttttgaatcaatgattcgtgatcatggtattgaaccatgtttggaacattatacgtgtatggtcaggcttttgggaagatcagggcagcttgacaaagcaatgaagctgattgaagggattccatatgagcctagcgttatgatctggagggcaatgcttagtgcctctatgaatcagaacaatgaagagtttgcaaggagatcggcagaggaaatactaaagatcaatccaaaggacgaggcgacatatgttctggtatcaaacatgtacgcaggtgcaaaacaatgggcaaacgtagcttccattaggaaaagcatgaaggaaatgggtgtcaagaaggaacctggtttaagttggatagaacatcaaggtgatgtgcattacttcagtgtggggttatcagatcatccggatatgaagctcataaatggaatgttggaatggcttaacatgaaagcaactcgagctggttacgttcctgatcggaatgcggtcctgctcgatatggatgatgaagaaaaggataagagattgtgggttcatagcgagaggttggctttggcgtatgggcttgttcgaatgccatcatcaagaaatcgcatactgatcatgaagaatctacggatatgttcagattgccacagtgctatgaaagtgatttcaagtatcgtacagcgagatctggttataagagatatgaaccggttccatcattttcatgcaggagtctgctcttgcggcgaccactggtga

SEQ ID NO: 72717 - protein, 818 aa, Arabidopsis thaliana; identical to SEQ ID NO: 70757
  peptide (1)..(818): Ceres Seq. ID no. 4944887
  misc_feature (310)..(344): Pfam Name: PPR repeat Pfam Description: PPR repeat
  misc_feature (23)..(798): Homolog of NCBI NO: 34896392 NR Description: hypothetical protein [Oryza sativa (japonica group)] >gi|19697432|gb|AAL93067.1| hypothetical protein [Oryza
  misc_feature (43)..(818): Homolog of NCBI NO: 15226200 NR Description: putative selenium-binding protein; protein id:
  misc_feature (67)..(818): Homolog of NCBI NO: 34915012 NR Description: P0458A05.10 [Oryza sativa (japonica
  misc_feature (46)..(818): Homolog of NCBI NO: 15236324 NR Description: putative protein; protein id: At4g13650.1
  misc_feature (82)..(818): Homolog of NCBI NO: 15232837 NR Description: hypothetical protein; protein id: At3g02010.1 thaliana] >gi|6091739|gb|AAF03451.1|AC010797_27 hypothetical [Arabidopsis thaliana] >gi|6513930|gb|AAF14834.1|AC011664_16
  misc_feature (50)..(121): Homolog of NCBI NO: 15232837 NR Description: hypothetical protein; protein id: At3g02010.1 thaliana] >gi|6091739|gb|AAF03451.1|AC010797_27 hypothetical [Arabidopsis thaliana] >gi|6513930|gb|AAF14834.1|AC011664_16
  misc_feature (46)..(818): Homolog of NCBI NO: 15242550 NR Description: selenium-binding protein-like; protein id:
  misc_feature (284)..(818): Homolog of NCBI NO: 15223099 NR Description: unknown protein; protein id: At1g08070.1 thaliana] >gi|8778839|gb|AAF79838.1|AC026875_18 T6D22.15
  misc_feature (164)..(332): Homolog of NCBI NO: 15223099 NR Description: unknown protein; protein id: At1g08070.1 thaliana] >gi|8778839|gb|AAF79838.1|AC026875_18 T6D22.15
  misc_feature (308)..(818): Homolog of NCBI NO: 21741755 NR Description: OSJNBa0060B20.9 [Oryza sativa (japonica

SEQ ID NO: 72718 - protein, 806 aa, Arabidopsis thaliana; identical to SEQ ID NO: 70758
  peptide (1)..(806): Ceres Seq. ID no. 4944888
  misc_feature (298)..(332): Pfam Name: PPR repeat Pfam Description: PPR repeat
  misc_feature (11)..(786): Homolog of NCBI NO: 34896392 NR Description: hypothetical protein [Oryza sativa (japonica group)] >gi|19697432|gb|AAL93067.1| hypothetical protein [Oryza
  misc_feature (31)..(806): Homolog of NCBI NO: 15226200 NR Description: putative selenium-binding protein; protein id:
  misc_feature (55)..(806): Homolog of NCBI NO: 34915012 NR Description: P0458A05.10 [Oryza sativa (japonica
  misc_feature (34)..(806): Homolog of NCBI NO: 15236324 NR Description: putative protein; protein id: At4g13650.1
  misc_feature (70)..(806): Homolog of NCBI NO: 15232837 NR Description: hypothetical protein; protein id: At3g02010.1 thaliana] >gi|6091739|gb|AAF03451.1|AC010797_27 hypothetical [Arabidopsis thaliana] >gi|6513930|gb|AAF14834.1|AC011664_16
  misc_feature (38)..(109): Homolog of NCBI NO: 15232837 NR Description: hypothetical protein; protein id: At3g02010.1 thaliana] >gi|6091739|gb|AAF03451.1|AC010797_27 hypothetical [Arabidopsis thaliana] >gi|6513930|gb|AAF14834.1|AC011664_16
  misc_feature (34)..(806): Homolog of NCBI NO: 15242550 NR Description: selenium-binding protein-like; protein id:
  misc_feature (272)..(806): Homolog of NCBI NO: 15223099 NR Description: unknown protein; protein id: At1g08070.1 thaliana] >gi|8778839|gb|AAF79838.1|AC026875_18 T6D22.15
  misc_feature (152)..(320): Homolog of NCBI NO: 15223099 NR Description: unknown protein; protein id: At1g08070.1 thaliana] >gi|8778839|gb|AAF79838.1|AC026875_18 T6D22.15
  misc_feature (296)..(806): Homolog of NCBI NO: 21741755 NR Description: OSJNBa0060B20.9 [Oryza sativa (japonica

SEQ ID NO: 72719 - protein, 768 aa, Arabidopsis thaliana
  peptide (1)..(768): Ceres Seq. ID no. 4944889
  misc_feature (260)..(294): Pfam Name: PPR repeat Pfam Description: PPR repeat
  misc_feature (1)..(748): Homolog of NCBI NO: 34896392 NR Description: hypothetical protein [Oryza sativa (japonica group)] >gi|19697432|gb|AAL93067.1| hypothetical protein [Oryza
  misc_feature (1)..(768): Homolog of NCBI NO: 15226200 NR Description: putative selenium-binding protein; protein id:
  misc_feature (17)..(768): Homolog of NCBI NO: 34915012 NR Description: P0458A05.10 [Oryza sativa (japonica
  misc_feature (1)..(768): Homolog of NCBI NO: 15236324 NR Description: putative protein; protein id: At4g13650.1
  misc_feature (32)..(768): Homolog of NCBI NO: 15232837 NR Description: hypothetical protein; protein id: At3g02010.1 thaliana] >gi|6091739|gb|AAF03451.1|AC010797_27 hypothetical [Arabidopsis thaliana] >gi|6513930|gb|AAF14834.1|AC011664_16
  misc_feature (1)..(71): Homolog of NCBI NO: 15232837 NR Description: hypothetical protein; protein id: At3g02010.1 thaliana] >gi|6091739|gb|AAF03451.1|AC010797_27 hypothetical [Arabidopsis thaliana] >gi|6513930|gb|AAF14834.1|AC011664_16
  misc_feature (1)..(768): Homolog of NCBI NO: 15242550 NR Description: selenium-binding protein-like; protein id:
  misc_feature (234)..(768): Homolog of NCBI NO: 15223099 NR Description: unknown protein; protein id: At1g08070.1 thaliana] >gi|8778839|gb|AAF79838.1|AC026875_18 T6D22.15
  misc_feature (114)..(282): Homolog of NCBI NO: 15223099 NR Description: unknown protein; protein id: At1g08070.1 thaliana] >gi|8778839|gb|AAF79838.1|AC026875_18 T6D22.15
  misc_feature (258)..(768): Homolog of NCBI NO: 21741755 NR Description: OSJNBa0060B20.9 [Oryza sativa (japonica
MLRRCIQKNDPISAKAIHCDILKKGSCLDLFATNILLNAYVKAGFDKDALNLFDEMPERNNVSFVTLAQGYACQDPIGLYSRLHREGHELNPHVFTSFLKLFVSLDKAEICPWLHSPIVKLGYDSNAFVGAALINAYSVCGSVDSARTVFEGILCKDIVVWAGIVSCYVENGYFEDSLKLLSCMRMAGFMPNNYTFDTALKASIGLGAFDFAKGVHGQILKTCYVLDPRVGVGLLQLYTQLGDMSDAFKVFNEMPKNDVVPWSFMIARFCQNGFCNEAVDLFIRMREAFVVPNEFTLSSILNGCAIGKCSGLGEQLHGLVVKVGFDLDIYVSNALIDVYAKCEKMDTAVKLFAELSSKNEVSWNTVIVGYENLGEGGKAFSMFREALRNQVSVTEVTFSSALGACASLASMDLGVQVHGLAIKTNNAKKVAVSNSLIDMYAKCGDIKFAQSVFNEMETIDVASWNALISGYSTHGLGRQALRILDIMKDRDCKPNGLTFLGVLSGCSNAGLIDQGQECFESMIRDHGIEPCLEHYTCMVRLLGRSGQLDKAMKLIEGIPYEPSVMIWRAMLSASMNQNNEEFARRSAEEILKINPKDEATYVLVSNMYAGAKQWANVASIRKSMKEMGVKKEPGLSWIEHQGDVHYFSVGLSDHPDMKLINGMLEWLNMKATRAGYVPDRNAVLLDMDDEEKDKRLWVHSERLALAYGLVRMPSSRNRILIMKNLRICSDCHSAMKVISSIVQRDLVIRDMNRFHHFHAGVCSCGDHW

SEQ ID NO: 72720 - DNA, 1785 bp, Arabidopsis thaliana
  misc_feature (1)..(1785): Ceres Seq. ID no. 4944916
  misc_feature: MA Experiment ID: 20000328 Result: Down-regulated in Transcription
  misc_feature: MA Experiment 20000328 PARAMETER Experiment Name: At_42deg_Heat_Sub_P Parameter: Age (day) Value: 14
  misc_feature: MA Experiment 20000328 PARAMETER Experiment Name: At_42deg_Heat_Sub_P Parameter: Organism Value: A. thaliana
  misc_feature: MA Experiment 20000328 PARAMETER Experiment Name: At_42deg_Heat_Sub_P Parameter: Plant Line Value: WS
  misc_feature: MA Experiment 20000328 PARAMETER Experiment Name: At_42deg_Heat_Sub_P Parameter: Temperature (deg C) Value: 42 vs. 22
  misc_feature: MA Experiment 20000328 PARAMETER Experiment Name: At_42deg_Heat_Sub_P Parameter: Timepoint (hr) Value: 6
  misc_feature: MA Experiment 20000328 PARAMETER Experiment Name: At_42deg_Heat_Sub_P Parameter: Tissue Value: Aerial
atgttgccaaagttcgatccaacagaccaaaaagcttgtctgtctcttcttgaggatgtgactaccaacgtaaagcagattcaagattctgtcttggaagcaatactttcacgtaatgctcataccgagtatcttagtggtttcctcaacggtcaagctgataagaaaagcttcaagaagaatgtacccgttgtaacctacgaagatattaagccttatatcgatcgtatcgccaatggagagccgtctgatctcatctgtgatcgacccatcagtgtactcttgactagctcaggtacttcaggaggagttccgaagctgattcctttgacaacagaggagttggaacagaggatttcgtttgcttctctctatagacctctactctacaagtacatcgagggtattagagaaagaaaatctttcatgttatatttcgtgactcgagaaagcgagactgcttctgggatactggtcaggactatgataacttgtgttttgaaaagcgtgacgccagctaactcttttatctgggatcaatcacagataagcccgcatgcgattacgacttgttcagacactactcagagcatgtactgccaactgctttgtgggcttctacaacgagataatgtaggtcgccttggtgcaccatttgcttcatcctttctcaaaataatcaagttcttggaggatcactggcctgagttttgctcaaacataaggactggttgtctcagtgactggattacagacccccaatgtgtttcagggatcggtaagttcctcactgctcctaatccggaactagcgagccttatcgagcaagaatgcagtcaaacatcatgggaagcaatagtgaagagactatggccaaaagcaaaatgcatcgaagccattgttacaggaaccatggcacagtacaatccattactggaattctatagcggtggtcttcctgtgatttcaacgttttatggcagctctgaatgtttcttcggtctcaatctcaatcctctgtctaagcctaatgaggtgtcgtacaccatcattccatgtatggcttatttcgagttcttagaggttgagaaagactatgaaagtggtcatgatcccgcagagaatcctgttgtagtcgatcttgtcgatgttaaaatcggtcatgattatgaacctgttgtcacaacgtttgctggtttgtataggtaccgtttaggggacgttttaagagtgactggtttctacaacaatgcgccacagtttcatttcgtgggaagacagaaagttgttctgagcatcgacatggacaagacctacgacgaagacctcctcaaggcagtgactaacgcgagtctcctgcttgagccacatgacctaatgctcatggatttcactagccgtgtggattcctcctcgtatccaggtcactacgtgctctactgggaactcgggagaaaagtcaaggacgccaagcttgagcttgaccagaatgttttggaggaatgctgcttcaccattgaggagtctctggacgcggtttacagaaaaggacgaaagaatgataagaacattggaccacttgagattaaggttgttaagcctggcgctttcgacaagctcatgaacttctttctgtctagaggctcttctgtgagtcagtataagacaccgaggtcggtgacgaatgaagaagccttgaagatattggaggccaacgttgtgtccgagtttcttagccagaaaactccgtcgtgggagctacatgagctgcattccagccgataa

SEQ ID NO: 72721 - protein, 594 aa, Arabidopsis thaliana; identical to SEQ ID NO: 71256
  peptide (1)..(594): Ceres Seq. ID no. 4944917
  misc_feature (12)..(568): Pfam Name: GH3 auxin-responsive promoter Pfam Description: GH3 auxin-responsive promoter
  misc_feature (1)..(594): Homolog of NCBI NO: 30684377 NR Description: auxin reponsive - like protein [Arabidopsis >gi|26449584|dbj|BAC41918.1| putative auxin responsive protein thaliana] >gi|29028956|gb|AAO64857.1| At5g13370 [Arabidopsis
  misc_feature (179)..(594): Homolog of NCBI NO: 11281348 NR Description: auxin-regulated protein GH3 homolog T22N19.20 -
  misc_feature (1)..(156): Homolog of NCBI NO: 11281348 NR Description: auxin-regulated protein GH3 homolog T22N19.20 -
  misc_feature (1)..(585): Homolog of NCBI NO: 15240608 NR Description: auxin-responsive - like protein; protein id:
  misc_feature (168)..(594): Homolog of NCBI NO: 15240617 NR Description: auxin reponsive - like protein; protein id:
  misc_feature (1)..(163): Homolog of NCBI NO: 15240617 NR Description: auxin reponsive - like protein; protein id:
  misc_feature (1)..(586): Homolog of NCBI NO: 15217844 NR Description: auxin-regulated GH3 protein, putative; protein At1g28130.1, supported by cDNA: gi_15450364 [Arabidopsis
  misc_feature (16)..(584): Homolog of NCBI NO: 15242095 NR Description: auxin-responsive GH3-like protein; protein id:
  misc_feature (14)..(579): Homolog of NCBI NO: 15220661 NR Description: GH3-like auxin-regulated protein; protein id:
  misc_feature (14)..(585): Homolog of NCBI NO: 15239653 NR Description: auxin-responsive-like protein; protein id: supported by cDNA: gi_11041725, supported by cDNA: gi_17978965

SEQ ID NO: 72722 - protein, 452 aa, Arabidopsis thaliana
  peptide (1)..(452): Ceres Seq. ID no. 4944918
  misc_feature (1)..(426): Pfam Name: GH3 auxin-responsive promoter Pfam Description: GH3 auxin-responsive promoter
  misc_feature (1)..(452): Homolog of NCBI NO: 30684377 NR Description: auxin reponsive - like protein [Arabidopsis >gi|26449584|dbj|BAC41918.1| putative auxin responsive protein thaliana] >gi|29028956|gb|AAO64857.1| At5g13370 [Arabidopsis
  misc_feature (37)..(452): Homolog of NCBI NO: 11281348 NR Description: auxin-regulated protein GH3 homolog T22N19.20 -
  misc_feature (1)..(14): Homolog of NCBI NO: 11281348 NR Description: auxin-regulated protein GH3 homolog T22N19.20 -
  misc_feature (1)..(443): Homolog of NCBI NO: 15240608 NR Description: auxin-responsive - like protein; protein id:
  misc_feature (26)..(452): Homolog of NCBI NO: 15240617 NR Description: auxin reponsive - like protein; protein id:
  misc_feature (1)..(21): Homolog of NCBI NO: 15240617 NR Description: auxin reponsive - like protein; protein id:
  misc_feature (1)..(444): Homolog of NCBI NO: 15217844 NR Description: auxin-regulated GH3 protein, putative; protein At1g28130.1, supported by cDNA: gi_15450364 [Arabidopsis
  misc_feature (1)..(442): Homolog of NCBI NO: 15242095 NR Description: auxin-responsive GH3-like protein; protein id:
  misc_feature (1)..(437): Homolog of NCBI NO: 15220661 NR Description: GH3-like auxin-regulated protein; protein id:
  misc_feature (1)..(443): Homolog of NCBI NO: 15239653 NR Description: auxin-responsive-like protein; protein id: supported by cDNA: gi_11041725, supported by cDNA: gi_17978965
MLYFVTRESETASGILVRTMITCVLKSVTPANSFIWDQSQISPHAITTCSDTTQSMYCQLLCGLLQRDNVGRLGAPFASSFLKIIKFLEDHWPEFCSNIRTGCLSDWITDPQCVSGIGKFLTAPNPELASLIEQECSQTSWEAIVKRLWPKAKCIEAIVTGTMAQYNPLLEFYSGGLPVISTFYGSSECFFGLNLNPLSKPNEVSYTIIPCMAYFEFLEVEKDYESGHDPAENPVVVDLVDVKIGHDYEPVVTTFAGLYRYRLGDVLRVTGFYNNAPQFHFVGRQKVVLSIDMDKTYDEDLLKAVTNASLLLEPHDLMLMDFTSRVDSSSYPGHYVLYWELGRKVKDAKLELDQNVLEECCFTIEESLDAVYRKGRKNDKNIGPLEIKVVKPGAFDKLMNFFLSRGSSVSQYKTPRSVTNEEALKILEANVVSEFLSQKTPSWELHELHSSR

SEQ ID NO: 72723 - protein, 433 aa, Arabidopsis thaliana
  peptide (1)..(433): Ceres Seq. ID no. 4944919
  misc_feature (1)..(407): Pfam Name: GH3 auxin-responsive promoter Pfam Description: GH3 auxin-responsive promoter
  misc_feature (1)..(433): Homolog of NCBI NO: 30684377 NR Description: auxin reponsive - like protein [Arabidopsis >gi|26449584|dbj|BAC41918.1| putative auxin responsive protein thaliana] >gi|29028956|gb|AAO64857.1| At5g13370 [Arabidopsis
  misc_feature (18)..(433): Homolog of NCBI NO: 11281348 NR Description: auxin-regulated protein GH3 homolog T22N19.20 -
  misc_feature (1)..(424): Homolog of NCBI NO: 15240608 NR Description: auxin-responsive - like protein; protein id:
  misc_feature (7)..(433): Homolog of NCBI NO: 15240617 NR Description: auxin reponsive - like protein; protein id:
  misc_feature (1)..(425): Homolog of NCBI NO: 15217844 NR Description: auxin-regulated GH3 protein, putative; protein At1g28130.1, supported by cDNA: gi_15450364 [Arabidopsis
  misc_feature (1)..(423): Homolog of NCBI NO: 15242095 NR Description: auxin-responsive GH3-like protein; protein id:
  misc_feature (1)..(418): Homolog of NCBI NO: 15220661 NR Description: GH3-like auxin-regulated protein; protein id:
  misc_feature (1)..(424): Homolog of NCBI NO: 15239653 NR Description: auxin-responsive-like protein; protein id: supported by cDNA: gi_11041725, supported by cDNA: gi_17978965
  misc_feature (1)..(424): Homolog of NCBI NO: 17978966 NR Description: AT5g54510/F24B18_13 [Arabidopsis thaliana]
  misc_feature (1)..(424): Homolog of NCBI NO: 34910142 NR Description: putative auxin-responsive GH3 [Oryza sativa
MITCVLKSVTPANSFIWDQSQISPHAITTCSDTTQSMYCQLLCGLLQRDNVGRLGAPFASSFLKIIKFLEDHWPEFCSNIRTGCLSDWITDPQCVSGIGKFLTAPNPELASLIEQECSQTSWEAIVKRLWPKAKCIEAIVTGTMAQYNPLLEFYSGGLPVISTFYGSSECFFGLNLNPLSKPNEVSYTIIPCMAYFEFLEVEKDYESGHDPAENPVVVDLVDVKIGHDYEPVVTTFAGLYRYRLGDVLRVTGFYNNAPQFHFVGRQKVVLSIDMDKTYDEDLLKAVTNASLLLEPHDLMLMDFTSRVDSSSYPGHYVLYWELGRKVKDAKLELDQNVLEECCFTIEESLDAVYRKGRKNDKNIGPLEIKVVKPGAFDKLMNFFLSRGSSVSQYKTPRSVTNEEALKILEANVVSEFLSQKTPSWELHELHSSR

SEQ ID NO: 72724 - DNA, 1086 bp, Arabidopsis thaliana
  misc_feature (1)..(1086): Ceres Seq. ID no. 4945017
  misc_feature: MA Experiment ID: 20000184 Result: Down-regulated in Transcription
  misc_feature: MA Experiment 20000184 PARAMETER Experiment Name: At_Shoots__P Parameter: Age (day) Value: 7
  misc_feature: MA Experiment 20000184 PARAMETER Experiment Name: At_Shoots__P Parameter: Tissue Value: Shoots vs. Whole Plant
  misc_feature: MA Experiment ID: 20000234 Result: Down-regulated in Transcription
  misc_feature: MA Experiment 20000234 PARAMETER Experiment Name: At_Siliques_P Parameter: Age (day) Value: 21
  misc_feature: MA Experiment 20000234 PARAMETER Experiment Name: At_Siliques_P Parameter: Organism Value: A. thaliana
  misc_feature: MA Experiment 20000234 PARAMETER Experiment Name: At_Siliques_P Parameter: Plant Line Value: WS
  misc_feature: MA Experiment 20000234 PARAMETER Experiment Name: At_Siliques_P Parameter: Tissue Value: Less Than 5mm Siliques vs. Whole Plant
  misc_feature: MA Experiment ID: 20000235 Result: Down-regulated in Transcription
  misc_feature: MA Experiment 20000235 PARAMETER Experiment Name: At_Siliques_P Parameter: Age (day) Value: 21
  misc_feature: MA Experiment 20000235 PARAMETER Experiment Name: At_Siliques_P Parameter: Organism Value: A. thaliana
  misc_feature: MA Experiment 20000235 PARAMETER Experiment Name: At_Siliques_P Parameter: Plant Line Value: WS
  misc_feature: MA Experiment 20000235 PARAMETER Experiment Name: At_Siliques_P Parameter: Tissue Value: 5-10mm Siliques vs. Whole Plant
  misc_feature: MA Experiment ID: 20000286 Result: Down-regulated in Transcription
  misc_feature: MA Experiment 20000286 PARAMETER Experiment Name: At_Open_Flower_P Parameter: Age (day) Value: 21
  misc_feature: MA Experiment 20000286 PARAMETER Experiment Name: At_Open_Flower_P Parameter: Plant Line Value: WS
  misc_feature: MA Experiment 20000286 PARAMETER Experiment Name: At_Open_Flower_P Parameter: Tissue Value: Half Open vs. Whole Plant
  misc_feature: MA Experiment ID: 20000437 Result: Down-regulated in Transcription
  misc_feature: MA Experiment 20000437 PARAMETER Experiment Name: At_Drought_P Parameter: Age (day) Value: 8
  misc_feature: MA Experiment 20000437 PARAMETER Experiment Name: At_Drought_P Parameter: Organism Value: A. thaliana
  misc_feature: MA Experiment 20000437 PARAMETER Experiment Name: At_Drought_P Parameter: Plant Line Value: WS
  misc_feature: MA Experiment 20000437 PARAMETER Experiment Name: At_Drought_P Parameter: Timepoint (hr) Value: 24
  misc_feature: MA Experiment 20000437 PARAMETER Experiment Name: At_Drought_P Parameter: Tissue Value: Whole Plant
  misc_feature: MA Experiment 20000437 PARAMETER Experiment Name: At_Drought_P Parameter: Treatment Value: Drought vs. No Drought
  misc_feature: MA Experiment ID: 20000438 Result: Down-regulated in Transcription
  misc_feature: MA Experiment 20000438 PARAMETER Experiment Name: At_Shoots__P Parameter: Age (day) Value: 14
  misc_feature: MA Experiment 20000438 PARAMETER Experiment Name: At_Shoots__P Parameter: Tissue Value: Shoots vs. Whole Plant
  misc_feature: MA Experiment ID: 20000439 Result: Down-regulated in Transcription
  misc_feature: MA Experiment 20000439 PARAMETER Experiment Name: At_Roots__P Parameter: Age (day) Value: 14 vs. 21
  misc_feature: MA Experiment 20000439 PARAMETER Experiment Name: At_Roots__P Parameter: Organism Value: A. thaliana
  misc_feature: MA Experiment 20000439 PARAMETER Experiment Name: At_Roots__P Parameter: Tissue Value: Roots vs. Whole Plant
  misc_feature: MA Experiment ID: 20000452 Result: Up-regulated in Transcription
  misc_feature: MA Experiment 20000452 PARAMETER Experiment Name: At_CS6879_Shoots-Roots_P Parameter: Age (day) Value: 14
  misc_feature: MA Experiment 20000452 PARAMETER Experiment Name: At_CS6879_Shoots-Roots_P Parameter: Organism Value: A. thaliana
  misc_feature: MA Experiment 20000452 PARAMETER Experiment Name: At_CS6879_Shoots-Roots_P Parameter: Plant Line Value: CS6879 vs. WS
  misc_feature: MA Experiment 20000452 PARAMETER Experiment Name: At_CS6879_Shoots-Roots_P Parameter: Tissue Value: Shoots
  misc_feature: MA Experiment ID: 20000527 Result: Down-regulated in Transcription
  misc_feature: MA Experiment 20000527 PARAMETER Experiment Name: At_10percent_PEG_P Parameter: Age (day) Value: 20
  misc_feature: MA Experiment 20000527 PARAMETER Experiment Name: At_10percent_PEG_P Parameter: Organism Value: A. thaliana
  misc_feature: MA Experiment 20000527 PARAMETER Experiment Name: At_10percent_PEG_P Parameter: Plant Line Value: WS
  misc_feature: MA Experiment 20000527 PARAMETER Experiment Name: At_10percent_PEG_P Parameter: Timepoint (day) Value: 20
  misc_feature: MA Experiment 20000527 PARAMETER Experiment Name: At_10percent_PEG_P Parameter: Tissue Value: Whole Plant
  misc_feature: MA Experiment 20000527 PARAMETER Experiment Name: At_10percent_PEG_P Parameter: Treatment Value: 10percent PEG vs. No Treatment
  misc_feature: MA Experiment ID: 20000794 Result: Down-regulated in Transcription
  misc_feature: MA Experiment 20000794 PARAMETER Experiment Name: At_Petals_P Parameter: Age (day) Value: 23-25 days
  misc_feature: MA Experiment 20000794 PARAMETER Experiment Name: At_Petals_P Parameter: Plant Line Value: WS
  misc_feature: MA Experiment 20000794 PARAMETER Experiment Name: At_Petals_P Parameter: Tissue Value: Petals vs. Whole plant
  misc_feature: MA Experiment ID: 20001247 Result: Up-regulated in Transcription
  misc_feature: MA Experiment 20001247 PARAMETER Experiment Name: At_Far-red-induction_P Parameter: Age (day) Value: 7
  misc_feature: MA Experiment 20001247 PARAMETER Experiment Name: At_Far-red-induction_P Parameter: Light Value: Far-red vs. White
  misc_feature: MA Experiment 20001247 PARAMETER Experiment Name: At_Far-red-induction_P Parameter: Organism Value: A. thaliana
  misc_feature: MA Experiment 20001247 PARAMETER Experiment Name: At_Far-red-induction_P Parameter: Plant Line Value: Columbia
  misc_feature: MA Experiment 20001247 PARAMETER Experiment Name: At_Far-red-induction_P Parameter: Timepoint (hr) Value: 1
  misc_feature: MA Experiment 20001247 PARAMETER Experiment Name: At_Far-red-induction_P Parameter: Tissue Value: Whole Plant
  misc_feature: MA Experiment ID: 20001761 Result: Up-regulated in Transcription
  misc_feature: MA Experiment 20001761 PARAMETER Experiment Name: At_50mM_NH4NO3_L-to-H_P Parameter: Timepoint (hr) Value: 4
  misc_feature: MA Experiment 20001761 PARAMETER Experiment Name: At_50mM_NH4NO3_L-to-H_P Parameter: Tissue Value: Siliques
  misc_feature: MA Experiment 20001761 PARAMETER Experiment Name: At_50mM_NH4NO3_L-to-H_P Parameter: Treatment Value: 50mM NH4NO3 vs 100mM Mannitol
  misc_feature: MA Experiment ID: 20001773 Result: Up-regulated in Transcription
  misc_feature: MA Experiment 20001773 PARAMETER Experiment Name: At_Far-red-enriched-adult_P Parameter: Age (day) Value: 30
  misc_feature: MA Experiment 20001773 PARAMETER Experiment Name: At_Far-red-enriched-adult_P Parameter: Light Value: Far-red enriched vs. White
  misc_feature: MA Experiment 20001773 PARAMETER Experiment Name: At_Far-red-enriched-adult_P Parameter: Organism Value: A. thaliana
  misc_feature: MA Experiment 20001773 PARAMETER Experiment Name: At_Far-red-enriched-adult_P Parameter: Plant Line Value: Columbia
  misc_feature: MA Experiment 20001773 PARAMETER Experiment Name: At_Far-red-enriched-adult_P Parameter: Timepoint (hr) Value: 48
  misc_feature: MA Experiment 20001773 PARAMETER Experiment Name: At_Far-red-enriched-adult_P Parameter: Tissue Value: Aerial
  misc_feature: MA Experiment ID: 20001910 Result: Down-regulated in Transcription
  misc_feature: MA Experiment 20001910 PARAMETER Experiment Name: At_Drought_Reproduction_P Parameter: Age (day) Value: 37
  misc_feature: MA Experiment 20001910 PARAMETER Experiment Name: At_Drought_Reproduction_P Parameter: Organism Value: A. thaliana
  misc_feature: MA Experiment 20001910 PARAMETER Experiment Name: At_Drought_Reproduction_P Parameter: Plant Line Value: WS
  misc_feature: MA Experiment 20001910 PARAMETER Experiment Name: At_Drought_Reproduction_P Parameter: Timepoint (day) Value: 7
  misc_feature: MA Experiment 20001910 PARAMETER Experiment Name: At_Drought_Reproduction_P Parameter: Tissue Value: Flowers
  misc_feature: MA Experiment 20001910 PARAMETER Experiment Name: At_Drought_Reproduction_P Parameter: Treatment Value: Drought vs. No Drought
atgcatctttttccaaatctcactggccgttcttacttattcaaagaaataaagaactcttctcttcacatgaccatttcaggcaacagctattccattctttcagctcatccatcccttgatagccaagaggtttacccaacagcatgtgctggctccagatacaatactggattcagaaaacaggtcaacctgttccaggaaagctccttcgcaggacccaagcaatacacagaggaagacttcaaggatgagagaaacagtgatttttttgatggatttcttgccattggaacccttggtggagaaacacttcttgatgaacaaccagcaacgccgacatttggcatgtcatttgaggacccagcaatagatgatgcagatgtgacagagaatgatttgaagctcataagcaatgaattggataagttccttgaggctgaagctaaagaaggacaccaccaaccatcaggaagaaacagtgacactaacactattgcatccaccattgaggccattgagggagtagatgatgaagaagataatcagccaatgaagttcccactccaagagtatttttttggatctctaatcgaactcccagaatcaaagattgcagggaagaaggatagggcatcacttggcgaactgtttcaaataacagaagtgcaagataaacaatcagaaaacatatatgggaagaaaaagaagcaacccaattcagctcacaagtccgcaaagcatcttgtgaagaaggtactgaaaaagatacacccatcctcaaggggctctgtcagtggtaaacctgaagtggattccacaaaaaagaagttccaaaaggttttccataggaaagtacatccagaagaatccataatggaaaccaaaatatacagcagcgtggcaaatccaaaaagcagcaaagcaaattctattgacttaacattcgagaaggtgaaccattgtcacgaggcaagtaaaagatgtatccagtatgagcttagaagttctcgctcagccaaaaacggagaacactggatcaagacagacgaagactgtaagtccaccatcatatgcaattcatag

SEQ ID NO: 72725 - protein, 361 aa, Arabidopsis thaliana
  peptide (1)..(361): Ceres Seq. ID no. 4945018
  misc_feature (1)..(361): Homolog of NCBI NO: 15241307 NR Description: unknown protein; protein id: At5g14090.1 thaliana] >gi|9757790|dbj|BAB08288.1| gene_id:MUA22.9~unknown
MHLFPNLTGRSYLFKEIKNSSLHMTISGNSYSILSAHPSLDSQEVYPTACAGSRYNTGFRKQVNLFQESSFAGPKQYTEEDFKDERNSDFFDGFLAIGTLGGETLLDEQPATPTFGMSFEDPAIDDADVTENDLKLISNELDKFLEAEAKEGHHQPSGRNSDTNTIASTIEAIEGVDDEEDNQPMKFPLQEYFFGSLIELPESKIAGKKDRASLGELFQITEVQDKQSENIYGKKKKQPNSAHKSAKHLVKKVLKKIHPSSRGSVSGKPEVDSTKKKFQKVFHRKVHPEESIMETKIYSSVANPKSSKANSIDLTFEKVNHCHEASKRCIQYELRSSRSAKNGEHWIKTDEDCKSTIICNS

SEQ ID NO: 72726 - protein, 338 aa, Arabidopsis thaliana
  peptide (1)..(338): Ceres Seq. ID no. 4945019
  misc_feature (1)..(338): Homolog of NCBI NO: 15241307 NR Description: unknown protein; protein id: At5g14090.1 thaliana] >gi|9757790|dbj|BAB08288.1| gene_id:MUA22.9~unknown
MTISGNSYSILSAHPSLDSQEVYPTACAGSRYNTGFRKQVNLFQESSFAGPKQYTEEDFKDERNSDFFDGFLAIGTLGGETLLDEQPATPTFGMSFEDPAIDDADVTENDLKLISNELDKFLEAEAKEGHHQPSGRNSDTNTIASTIEAIEGVDDEEDNQPMKFPLQEYFFGSLIELPESKIAGKKDRASLGELFQITEVQDKQSENIYGKKKKQPNSAHKSAKHLVKKVLKKIHPSSRGSVSGKPEVDSTKKKFQKVFHRKVHPEESIMETKIYSSVANPKSSKANSIDLTFEKVNHCHEASKRCIQYELRSSRSAKNGEHWIKTDEDCKSTIICNS

SEQ ID NO: 72727 - protein, 245 aa, Arabidopsis thaliana
  peptide (1)..(245): Ceres Seq. ID no. 4945020
  misc_feature (1)..(245): Homolog of NCBI NO: 15241307 NR Description: unknown protein; protein id: At5g14090.1 thaliana] >gi|9757790|dbj|BAB08288.1| gene_id:MUA22.9~unknown
MSFEDPAIDDADVTENDLKLISNELDKFLEAEAKEGHHQPSGRNSDTNTIASTIEAIEGVDDEEDNQPMKFPLQEYFFGSLIELPESKIAGKKDRASLGELFQITEVQDKQSENIYGKKKKQPNSAHKSAKHLVKKVLKKIHPSSRGSVSGKPEVDSTKKKFQKVFHRKVHPEESIMETKIYSSVANPKSSKANSIDLTFEKVNHCHEASKRCIQYELRSSRSAKNGEHWIKTDEDCKSTIICNS

SEQ ID NO: 72728 - DNA, 1299 bp, Arabidopsis thaliana
  misc_feature (1)..(1299): Ceres Seq. ID no. 4945025
  misc_feature: MA Experiment ID: 20000171 Result: Up-regulated in Transcription
  misc_feature: MA Experiment 20000171 PARAMETER Experiment Name: At_42deg_Heat_P Parameter: Age (day) Value: 14
  misc_feature: MA Experiment 20000171 PARAMETER Experiment Name: At_42deg_Heat_P Parameter: Organism Value: A. thaliana
  misc_feature: MA Experiment 20000171 PARAMETER Experiment Name: At_42deg_Heat_P Parameter: Plant Line Value: WS
  misc_feature: MA Experiment 20000171 PARAMETER Experiment Name: At_42deg_Heat_P Parameter: Temperature (deg C) Value: 42 vs. 22
  misc_feature: MA Experiment 20000171 PARAMETER Experiment Name: At_42deg_Heat_P Parameter: Timepoint (hr) Value: 1
  misc_feature: MA Experiment 20000171 PARAMETER Experiment Name: At_42deg_Heat_P Parameter: Tissue Value: Aerial
  misc_feature: MA Experiment ID: 20000173 Result: Up-regulated in Transcription
  misc_feature: MA Experiment 20000173 PARAMETER Experiment Name: At_42deg_Heat_P Parameter: Age (day) Value: 14
  misc_feature: MA Experiment 20000173 PARAMETER Experiment Name: At_42deg_Heat_P Parameter: Organism Value: A. thaliana
  misc_feature: MA Experiment 20000173 PARAMETER Experiment Name: At_42deg_Heat_P Parameter: Plant Line Value: WS
  misc_feature: MA Experiment 20000173 PARAMETER Experiment Name: At_42deg_Heat_P Parameter: Temperature (deg C) Value: 42 vs. 22
  misc_feature: MA Experiment 20000173 PARAMETER Experiment Name: At_42deg_Heat_P Parameter: Timepoint (hr) Value: 6
  misc_feature: MA Experiment 20000173 PARAMETER Experiment Name: At_42deg_Heat_P Parameter: Tissue Value: Aerial
  misc_feature: MA Experiment ID: 20000185 Result: Up-regulated in Transcription
  misc_feature: MA Experiment 20000185 PARAMETER Experiment Name: At_Roots__P Parameter: Age (day) Value: 7 vs. 21
  misc_feature: MA Experiment 20000185 PARAMETER Experiment Name: At_Roots__P Parameter: Organism Value: A. thaliana
  misc_feature: MA Experiment 20000185 PARAMETER Experiment Name: At_Roots__P Parameter: Tissue Value: Roots vs. Whole Plant
  misc_feature: MA Experiment ID: 20000227 Result: Up-regulated in Transcription
  misc_feature: MA Experiment 20000227 PARAMETER Experiment Name: At_Root-Tips-vs-Tops_P Parameter: Tissue Value: Root Tips vs. Root Tops
  misc_feature: MA Experiment ID: 20000439 Result: Up-regulated in Transcription
  misc_feature: MA Experiment 20000439 PARAMETER Experiment Name: At_Roots__P Parameter: Age (day) Value: 14 vs. 21
  misc_feature: MA Experiment 20000439 PARAMETER Experiment Name: At_Roots__P Parameter: Organism Value: A. thaliana
  misc_feature: MA Experiment 20000439 PARAMETER Experiment Name: At_Roots__P Parameter: Tissue Value: Roots vs. Whole Plant
atggggtgtgctcaatctactattgctgttgtgggaaggaagaacaagaagaggatcattcaagaatctgtagtgtttgttctacagttccgtgttcctgttcagtctgatcttcagcgccaactcaaaggtgtttctcccaagacaaccatcaatcggttgacatgtttaagaaatcagattgagttggtagctgaggacacagggggttcagccatctctgagttgcgtacagctttggaggagtacttgtcacttctatccggtcttatcaagaaaagttcgtgtttgcaagttttgattaacttaaacagtttagtatattcaaatggtgatattagaatatttaactctacaggtaaagatggaatggagggctgcgtagagctcaaatggaggacccttggcgatggtcgacgagcagagatatgttgcacaaacctttggatggagatgttgatagtgatccacatgatggctgctttggcattgactgaagctaactctctcatgattccaaaggattgctatgcttctggttctggcaatggcgtccgtgtggtctccactgattgcaggagagatgcggttgacttgctgctcaaggcatctggatacttggagttctgcgtccgagagattctgactcaacttcctcatgatataaagagtaagttgccagatgatatgcaggaaagtgtattacaaactctctctatacaagcactaggccagggaactgagattcaacttggattagcagttgatagtcagaaagcaacattgtctgtgaagaggagaattgcatgtgagcaagtcatctacttcactcaggcatatcactgcttgtctagttgtgaagcagttagccatggatgcgccaagaaacttctccggtttatctactggaagtttctggaagcaaaggtattgtatgtgtatgctgcagcatactactaccatggactggtaacagacaagggaagtgagccggcttgtcacttgagcgctgtgtgttgtttccttgcagctgcagagatcctaggagaaagcaaaaaagcctgtcttagcttctgcttagctcctcctgtcacaagggctcctcctatgtggggtgttatgaagcatttgagccagaagattccagaagttgcttttagaaagtcgcagacatatggatacttgcttgaagaagaagaaaaggcaatgcagtgtttgccagagcttccagactttcagttgtcattgagacccgacgactttgaactgcctgaaatagaggatgtctcttcctcatga

SEQ ID NO: 72729 - protein, 432 aa, Arabidopsis thaliana
  peptide (1)..(432): Ceres Seq. ID no. 4945026
  misc_feature (121)..(432): Homolog of NCBI NO: 30684716 NR Description: expressed protein [Arabidopsis thaliana]
  misc_feature (1)..(94): Homolog of NCBI NO: 30684716 NR Description: expressed protein [Arabidopsis thaliana]
  misc_feature (121)..(427): Homolog of NCBI NO: 15219459 NR Description: hypothetical protein; protein id: At1g73390.1, by cDNA: gi_18252172 [Arabidopsis thaliana]
  misc_feature (1)..(104): Homolog of NCBI NO: 15219459 NR Description: hypothetical protein; protein id: At1g73390.1, by cDNA: gi_18252172 [Arabidopsis thaliana]
  misc_feature (121)..(427): Homolog of NCBI NO: 25372891 NR Description: protein F2H15.16 [imported] - Arabidopsis >gi|9665071|gb|AAF97273.1|AC034106_16 F2H15.16 [Arabidopsis
  misc_feature (1)..(104): Homolog of NCBI NO: 25372891 NR Description: protein F2H15.16 [imported] - Arabidopsis >gi|9665071|gb|AAF97273.1|AC034106_16 F2H15.16 [Arabidopsis
  misc_feature (146)..(427): Homolog of NCBI NO: 15220908 NR Description: hypothetical protein; protein id: At1g17940.1
  misc_feature (1)..(95): Homolog of NCBI NO: 15220908 NR Description: hypothetical protein; protein id: At1g17940.1
  misc_feature (121)..(427): Homolog of NCBI NO: 38344447 NR Description: OSJNBa0038O10.19 [Oryza sativa (japonica
MGCAQSTIAVVGRKNKKRIIQESVVFVLQFRVPVQSDLQRQLKGVSPKTTINRLTCLRNQIELVAEDTGGSAISELRTALEEYLSLLSGLIKKSSCLQVLINLNSLVYSNGDIRIFNSTGKDGMEGCVELKWRTLGDGRRAEICCTNLWMEMLIVIHMMAALALTEANSLMIPKDCYASGSGNGVRVVSTDCRRDAVDLLLKASGYLEFCVREILTQLPHDIKSKLPDDMQESVLQTLSIQALGQGTEIQLGLAVDSQKATLSVKRRIACEQVIYFTQAYHCLSSCEAVSHGCAKKLLRFIYWKFLEAKVLYVYAAAYYYHGLVTDKGSEPACHLSAVCCFLAAAEILGESKKACLSFCLAPPVTRAPPMWGVMKHLSQKIPEVAFRKSQTYGYLLEEEEKAMQCLPELPDFQLSLRPDDFELPEIEDVSSS

SEQ ID NO: 72730 - protein, 309 aa, Arabidopsis thaliana
  peptide (1)..(309): Ceres Seq. ID no. 4945027
  misc_feature (1)..(309): Homolog of NCBI NO: 30684716 NR Description: expressed protein [Arabidopsis thaliana]
  misc_feature (1)..(304): Homolog of NCBI NO: 15219459 NR Description: hypothetical protein; protein id: At1g73390.1, by cDNA: gi_18252172 [Arabidopsis thaliana]
  misc_feature (1)..(304): Homolog of NCBI NO: 25372891 NR Description: protein F2H15.16 [imported] - Arabidopsis >gi|9665071|gb|AAF97273.1|AC034106_16 F2H15.16 [Arabidopsis
  misc_feature (23)..(304): Homolog of NCBI NO: 15220908 NR Description: hypothetical protein; protein id: At1g17940.1
  misc_feature (1)..(304): Homolog of NCBI NO: 38344447 NR Description: OSJNBa0038O10.19 [Oryza sativa (japonica
MEGCVELKWRTLGDGRRAEICCTNLWMEMLIVIHMMAALALTEANSLMIPKDCYASGSGNGVRVVSTDCRRDAVDLLLKASGYLEFCVREILTQLPHDIKSKLPDDMQESVLQTLSIQALGQGTEIQLGLAVDSQKATLSVKRRIACEQVIYFTQAYHCLSSCEAVSHGCAKKLLRFIYWKFLEAKVLYVYAAAYYYHGLVTDKGSEPACHLSAVCCFLAAAEILGESKKACLSFCLAPPVTRAPPMWGVMKHLSQKIPEVAFRKSQTYGYLLEEEEKAMQCLPELPDFQLSLRPDDFELPEIEDVSSS

SEQ ID NO: 72731 - protein, 283 aa, Arabidopsis thaliana
  peptide (1)..(283): Ceres Seq. ID no. 4945028
  misc_feature (1)..(283): Homolog of NCBI NO: 30684716 NR Description: expressed protein [Arabidopsis thaliana]
  misc_feature (1)..(278): Homolog of NCBI NO: 15219459 NR Description: hypothetical protein; protein id: At1g73390.1, by cDNA: gi_18252172 [Arabidopsis thaliana]
  misc_feature (1)..(278): Homolog of NCBI NO: 25372891 NR Description: protein F2H15.16 [imported] - Arabidopsis >gi|9665071|gb|AAF97273.1|AC034106_16 F2H15.16 [Arabidopsis
  misc_feature (1)..(278): Homolog of NCBI NO: 15220908 NR Description: hypothetical protein; protein id: At1g17940.1
  misc_feature (1)..(278): Homolog of NCBI NO: 38344447 NR Description: OSJNBa0038O10.19 [Oryza sativa (japonica
MEMLIVIHMMAALALTEANSLMIPKDCYASGSGNGVRVVSTDCRRDAVDLLLKASGYLEFCVREILTQLPHDIKSKLPDDMQESVLQTLSIQALGQGTEIQLGLAVDSQKATLSVKRRIACEQVIYFTQAYHCLSSCEAVSHGCAKKLLRFIYWKFLEAKVLYVYAAAYYYHGLVTDKGSEPACHLSAVCCFLAAAEILGESKKACLSFCLAPPVTRAPPMWGVMKHLSQKIPEVAFRKSQTYGYLLEEEEKAMQCLPELPDFQLSLRPDDFELPEIEDVSSS

SEQ ID NO: 72732 - DNA, 1206 bp, Arabidopsis thaliana
  misc_feature (1)..(1206): Ceres Seq. ID no. 4945202
  misc_feature: MA Experiment ID: 108461 Result: Up-regulated in Transcription
  misc_feature: MA Experiment 108461 PARAMETER Experiment Name: At_Germinating_Seeds_cDNA_P Parameter: Age (day) Value: 1 vs. 0
  misc_feature: MA Experiment 108461 PARAMETER Experiment Name: At_Germinating_Seeds_cDNA_P Parameter: Tissue Value: Germinating Seeds
  misc_feature: MA Experiment ID: 108462 Result: Up-regulated in Transcription
  misc_feature: MA Experiment 108462 PARAMETER Experiment Name: At_Germinating_Seeds_cDNA_P Parameter: Age (day) Value: 2 vs. 0
  misc_feature: MA Experiment 108462 PARAMETER Experiment Name: At_Germinating_Seeds_cDNA_P Parameter: Tissue Value: Germinating Seeds
  misc_feature: MA Experiment ID: 108463 Result: Up-regulated in Transcription
  misc_feature: MA Experiment 108463 PARAMETER Experiment Name: At_Germinating_Seeds_cDNA_P Parameter: Age (day) Value: 3 vs. 0
  misc_feature: MA Experiment 108463 PARAMETER Experiment Name: At_Germinating_Seeds_cDNA_P Parameter: Tissue Value: Germinating Seeds
  misc_feature: MA Experiment ID: 108464 Result: Up-regulated in Transcription
  misc_feature: MA Experiment 108464 PARAMETER Experiment Name: At_Germinating_Seeds_cDNA_P Parameter: Age (day) Value: 4 vs. 0
  misc_feature: MA Experiment 108464 PARAMETER Experiment Name: At_Germinating_Seeds_cDNA_P Parameter: Tissue Value: Germinating Seeds
  misc_feature: MA Experiment ID: 108473 Result: Down-regulated in Transcription
  misc_feature: MA Experiment 108473 PARAMETER Experiment Name: At_Drought_Flowers_cDNA_P Parameter: Timepoint (hr) Value: 7 d
  misc_feature: MA Experiment 108473 PARAMETER Experiment Name: At_Drought_Flowers_cDNA_P Parameter: Tissue Value: Flower
  misc_feature: MA Experiment 108473 PARAMETER Experiment Name: At_Drought_Flowers_cDNA_P Parameter: Treatment Value: Drought vs. No Drought
  misc_feature: MA Experiment ID: 108573 Result: Down-regulated in Transcription
  misc_feature: MA Experiment 108573 PARAMETER Experiment Name: At_Drought_cDNA_P Parameter: Timepoint (hr) Value: 6
  misc_feature: MA Experiment 108573 PARAMETER Experiment Name: At_Drought_cDNA_P Parameter: Tissue Value: Aerial
  misc_feature: MA Experiment 108573 PARAMETER Experiment Name: At_Drought_cDNA_P Parameter: Treatment Value: Drought vs. No Drought
  misc_feature: MA Experiment ID: 108579 Result: Down-regulated in Transcription
  misc_feature: MA Experiment 108579 PARAMETER Experiment Name: At_4deg_Cold_cDNA_P Parameter: Temperature (deg C) Value: 4 vs. 22
  misc_feature: MA Experiment 108579 PARAMETER Experiment Name: At_4deg_Cold_cDNA_P Parameter: Timepoint (hr) Value: 6
  misc_feature: MA Experiment 108579 PARAMETER Experiment Name: At_4deg_Cold_cDNA_P Parameter: Tissue Value: Aerial
  misc_feature: MA Experiment ID: 108585 Result: Down-regulated in Transcription
  misc_feature: MA Experiment 108585 PARAMETER Experiment Name: At_5mM_NaNP_cDNA_P Parameter: Timepoint (hr) Value: 6
  misc_feature: MA Experiment 108585 PARAMETER Experiment Name: At_5mM_NaNP_cDNA_P Parameter: Tissue Value: Aerial
  misc_feature: MA Experiment 108585 PARAMETER Experiment Name: At_5mM_NaNP_cDNA_P Parameter: Treatment Value: null
  misc_feature: MA Experiment ID: 108595 Result: Down-regulated in Transcription
  misc_feature: MA Experiment 108595 PARAMETER Experiment Name: At_Ler-pi_Ovule_cDNA_P Parameter: Plant Line Value: null
  misc_feature: MA Experiment ID: 20000166 Result: Up-regulated in Transcription
  misc_feature: MA Experiment 20000166 PARAMETER Experiment Name: At_100uM_ABA_P Parameter: Age (day) Value: 14
  misc_feature: MA Experiment 20000166 PARAMETER Experiment Name: At_100uM_ABA_P Parameter: Organism Value: A. thaliana
  misc_feature: MA Experiment 20000166 PARAMETER Experiment Name: At_100uM_ABA_P Parameter: Plant Line Value: WS
  misc_feature: MA Experiment 20000166 PARAMETER Experiment Name: At_100uM_ABA_P Parameter: Timepoint (hr) Value: 1
  misc_feature: MA Experiment 20000166 PARAMETER Experiment Name: At_100uM_ABA_P Parameter: Tissue Value: Aerial
  misc_feature: MA Experiment 20000166 PARAMETER Experiment Name: At_100uM_ABA_P Parameter: Treatment Value: 100uM ABA vs. No Treatment
  misc_feature: MA Experiment ID: 20000173 Result: Down-regulated in Transcription
  misc_feature: MA Experiment 20000173 PARAMETER Experiment Name: At_42deg_Heat_P Parameter: Age (day) Value: 14
  misc_feature: MA Experiment 20000173 PARAMETER Experiment Name: At_42deg_Heat_P Parameter: Organism Value: A. thaliana
  misc_feature: MA Experiment 20000173 PARAMETER Experiment Name: At_42deg_Heat_P Parameter: Plant Line Value: WS
  misc_feature: MA Experiment 20000173 PARAMETER Experiment Name: At_42deg_Heat_P Parameter: Temperature (deg C) Value: 42 vs. 22
  misc_feature: MA Experiment 20000173 PARAMETER Experiment Name: At_42deg_Heat_P Parameter: Timepoint (hr) Value: 6
  misc_feature: MA Experiment 20000173 PARAMETER Experiment Name: At_42deg_Heat_P Parameter: Tissue Value: Aerial
  misc_feature: MA Experiment ID: 20000180 Result: Up-regulated in Transcription
  misc_feature: MA Experiment 20000180 PARAMETER Experiment Name: At_Germinating_Seeds_P Parameter: Age (hr) Value: 24 vs. 0
  misc_feature: MA Experiment 20000180 PARAMETER Experiment Name: At_Germinating_Seeds_P Parameter: Tissue Value: Germinating Seeds
  misc_feature: MA Experiment ID: 20000185 Result: Down-regulated in Transcription
  misc_feature: MA Experiment 20000185 PARAMETER Experiment Name: At_Roots__P Parameter: Age (day) Value: 7 vs. 21
  misc_feature: MA Experiment 20000185 PARAMETER Experiment Name: At_Roots__P Parameter: Organism Value: A. thaliana
  misc_feature: MA Experiment 20000185 PARAMETER Experiment Name: At_Roots__P Parameter: Tissue Value: Roots vs. Whole Plant
  misc_feature: MA Experiment ID: 20000234 Result: Up-regulated in Transcription
  misc_feature: MA Experiment 20000234 PARAMETER Experiment Name: At_Siliques_P Parameter: Age (day) Value: 21
  misc_feature: MA Experiment 20000234 PARAMETER Experiment Name: At_Siliques_P Parameter: Organism Value: A. thaliana
  misc_feature: MA Experiment 20000234 PARAMETER Experiment Name: At_Siliques_P Parameter: Plant Line Value: WS
  misc_feature: MA Experiment 20000234 PARAMETER Experiment Name: At_Siliques_P Parameter: Tissue Value: Less Than 5mm Siliques vs. Whole Plant
  misc_feature: MA Experiment ID: 20000265 Result: Up-regulated in Transcription
  misc_feature: MA Experiment 20000265 PARAMETER Experiment Name: At_Open_Flower_P Parameter: Age (day) Value: 21
  misc_feature: MA Experiment 20000265 PARAMETER Experiment Name: At_Open_Flower_P Parameter: Plant Line Value: WS
  misc_feature: MA Experiment 20000265 PARAMETER Experiment Name: At_Open_Flower_P Parameter: Tissue Value: Closed Flower vs. Whole Plant
  misc_feature: MA Experiment ID: 20000437 Result: Down-regulated in Transcription
  misc_feature: MA Experiment 20000437 PARAMETER Experiment Name: At_Drought_P Parameter: Age (day) Value: 8
  misc_feature: MA Experiment 20000437 PARAMETER Experiment Name: At_Drought_P Parameter: Organism Value: A. thaliana
  misc_feature: MA Experiment 20000437 PARAMETER Experiment Name: At_Drought_P Parameter: Plant Line Value: WS
  misc_feature: MA Experiment 20000437 PARAMETER Experiment Name: At_Drought_P Parameter: Timepoint (hr) Value: 24
  misc_feature: MA Experiment 20000437 PARAMETER Experiment Name: At_Drought_P Parameter: Tissue Value: Whole Plant
  misc_feature: MA Experiment 20000437 PARAMETER Experiment Name: At_Drought_P Parameter: Treatment Value: Drought vs. No Drought
  misc_feature: MA Experiment ID: 20000439 Result: Down-regulated in Transcription
  misc_feature: MA Experiment 20000439 PARAMETER Experiment Name: At_Roots__P Parameter: Age (day) Value: 14 vs. 21
  misc_feature: MA Experiment 20000439 PARAMETER Experiment Name: At_Roots__P Parameter: Organism Value: A. thaliana
  misc_feature: MA Experiment 20000439 PARAMETER Experiment Name: At_Roots__P Parameter: Tissue Value: Roots vs. Whole Plant
  misc_feature: MA Experiment ID: 20000495 Result: Up-regulated in Transcription
  misc_feature: MA Experiment 20000495 PARAMETER Experiment Name: At_Guard_Cells_P Parameter: Harvest Date Value: 8/2/2002
  misc_feature: MA Experiment 20000495 PARAMETER Experiment Name: At_Guard_Cells_P Parameter: Organism Value: A. thaliana
  misc_feature: MA Experiment 20000495 PARAMETER Experiment Name: At_Guard_Cells_P Parameter: Tissue Value: Guard Cells vs. Leaves
  misc_feature: MA Experiment ID: 20001248 Result: Down-regulated in Transcription
  misc_feature: MA Experiment 20001248 PARAMETER Experiment Name: At_Far-red-induction_P Parameter: Age (day) Value: 7
  misc_feature: MA Experiment 20001248 PARAMETER Experiment Name: At_Far-red-induction_P Parameter: Light Value: Far-red vs. White
  misc_feature: MA Experiment 20001248 PARAMETER Experiment Name: At_Far-red-induction_P Parameter: Organism Value: A. thaliana
  misc_feature: MA Experiment 20001248 PARAMETER Experiment Name: At_Far-red-induction_P Parameter: Plant Line Value: Columbia
  misc_feature: MA Experiment 20001248 PARAMETER Experiment Name: At_Far-red-induction_P Parameter: Timepoint (hr) Value: 4
  misc_feature: MA Experiment 20001248 PARAMETER Experiment Name: At_Far-red-induction_P Parameter: Tissue Value: Whole Plant
  misc_feature: MA Experiment ID: 20001451 Result: Up-regulated in Transcription
  misc_feature: MA Experiment 20001451 PARAMETER Experiment Name: At_Far-red-induction_P Parameter: Age (day) Value: 7
  misc_feature: MA Experiment 20001451 PARAMETER Experiment Name: At_Far-red-induction_P Parameter: Light Value: Far-red vs. White
  misc_feature: MA Experiment 20001451 PARAMETER Experiment Name: At_Far-red-induction_P Parameter: Organism Value: A. thaliana
  misc_feature: MA Experiment 20001451 PARAMETER Experiment Name: At_Far-red-induction_P Parameter: Plant Line Value: Columbia
  misc_feature: MA Experiment 20001451 PARAMETER Experiment Name: At_Far-red-induction_P Parameter: Timepoint (hr) Value: 24
  misc_feature: MA Experiment 20001451 PARAMETER Experiment Name: At_Far-red-induction_P Parameter: Tissue Value: Whole Plant
  misc_feature: MA Experiment ID: 20001757 Result: Up-regulated in Transcription
  misc_feature: MA Experiment 20001757 PARAMETER Experiment Name: At_50mM_NH4NO3_L-to-H_P Parameter: Timepoint (hr) Value: 6
  misc_feature: MA Experiment 20001757 PARAMETER Experiment Name: At_50mM_NH4NO3_L-to-H_P Parameter: Tissue Value: Leaf
  misc_feature: MA Experiment 20001757 PARAMETER Experiment Name: At_50mM_NH4NO3_L-to-H_P Parameter: Treatment Value: 50mM NH4NO3 vs 100mM Mannitol
  misc_feature: MA Experiment ID: 20001904 Result: Down-regulated in Transcription
  misc_feature: MA Experiment 20001904 PARAMETER Experiment Name: At_Drought_Reproduction_P Parameter: Age (day) Value: 37
  misc_feature: MA Experiment 20001904 PARAMETER Experiment Name: At_Drought_Reproduction_P Parameter: Organism Value: A. thaliana
  misc_feature: MA Experiment 20001904 PARAMETER Experiment Name: At_Drought_Reproduction_P Parameter: Plant Line Value: WS
  misc_feature: MA Experiment 20001904 PARAMETER Experiment Name: At_Drought_Reproduction_P Parameter: Timepoint (day) Value: 7
  misc_feature: MA Experiment 20001904 PARAMETER Experiment Name: At_Drought_Reproduction_P Parameter: Tissue Value: Rosettes
  misc_feature: MA Experiment 20001904 PARAMETER Experiment Name: At_Drought_Reproduction_P Parameter: Treatment Value: Drought vs. No Drought
  misc_feature: MA Experiment ID: 20001905 Result: Down-regulated in Transcription
  misc_feature: MA Experiment 20001905 PARAMETER Experiment Name: At_Drought_Reproduction_P Parameter: Age (day) Value: 40
  misc_feature: MA Experiment 20001905 PARAMETER Experiment Name: At_Drought_Reproduction_P Parameter: Organism Value: A. thaliana
  misc_feature: MA Experiment 20001905 PARAMETER Experiment Name: At_Drought_Reproduction_P Parameter: Plant Line Value: WS
  misc_feature: MA Experiment 20001905 PARAMETER Experiment Name: At_Drought_Reproduction_P Parameter: Timepoint (day) Value: 10
  misc_feature: MA Experiment 20001905 PARAMETER Experiment Name: At_Drought_Reproduction_P Parameter: Tissue Value: Rosettes
  misc_feature: MA Experiment 20001905 PARAMETER Experiment Name: At_Drought_Reproduction_P Parameter: Treatment Value: Drought vs. No Drought
  misc_feature: MA Experiment ID: 20001906 Result: Down-regulated in Transcription
  misc_feature: MA Experiment 20001906 PARAMETER Experiment Name: At_Drought_Reproduction_P Parameter: Age (day) Value: 35
  misc_feature: MA Experiment 20001906 PARAMETER Experiment Name: At_Drought_Reproduction_P Parameter: Organism Value: A. thaliana
  misc_feature: MA Experiment 20001906 PARAMETER Experiment Name: At_Drought_Reproduction_P Parameter: Plant Line Value: WS
  misc_feature: MA Experiment 20001906 PARAMETER Experiment Name: At_Drought_Reproduction_P Parameter: Timepoint (day) Value: 5
  misc_feature: MA Experiment 20001906 PARAMETER Experiment Name: At_Drought_Reproduction_P Parameter: Tissue Value: Siliques
  misc_feature: MA Experiment 20001906 PARAMETER Experiment Name: At_Drought_Reproduction_P Parameter: Treatment Value: Drought vs. No Drought
  misc_feature: MA Experiment ID: 20001908 Result: Down-regulated in Transcription
  misc_feature: MA Experiment 20001908 PARAMETER Experiment Name: At_Drought_Reproduction_P Parameter: Age (day) Value: 40
  misc_feature: MA Experiment 20001908 PARAMETER Experiment Name: At_Drought_Reproduction_P Parameter: Organism Value: A. thaliana
  misc_feature: MA Experiment 20001908 PARAMETER Experiment Name: At_Drought_Reproduction_P Parameter: Plant Line Value: WS
  misc_feature: MA Experiment 20001908 PARAMETER Experiment Name: At_Drought_Reproduction_P Parameter: Timepoint (day) Value: 10
  misc_feature: MA Experiment 20001908 PARAMETER Experiment Name: At_Drought_Reproduction_P Parameter: Tissue Value: Siliques
  misc_feature: MA Experiment 20001908 PARAMETER Experiment Name: At_Drought_Reproduction_P Parameter: Treatment Value: Drought vs. No Drought
  misc_feature: MA Experiment ID: 20001911 Result: Down-regulated in Transcription
  misc_feature: MA Experiment 20001911 PARAMETER Experiment Name: At_Drought_Reproduction_P Parameter: Age (day) Value: 40
  misc_feature: MA Experiment 20001911 PARAMETER Experiment Name: At_Drought_Reproduction_P Parameter: Organism Value: A. thaliana
  misc_feature: MA Experiment 20001911 PARAMETER Experiment Name: At_Drought_Reproduction_P Parameter: Plant Line Value: WS
  misc_feature: MA Experiment 20001911 PARAMETER Experiment Name: At_Drought_Reproduction_P Parameter: Timepoint (day) Value: 10
  misc_feature: MA Experiment 20001911 PARAMETER Experiment Name: At_Drought_Reproduction_P Parameter: Tissue Value: Flowers
  misc_feature: MA Experiment 20001911 PARAMETER Experiment Name: At_Drought_Reproduction_P Parameter: Treatment Value: Drought vs. No Drought
cacttgtaacatttccacaactgtagccaaacttttgtgttctgatagtgatgatcatgatcatcacatgaataagtagaagatatctcttaccttctccttcttctaataagatcagagttttggttcttatttctttgctctcaaaacaatgggtagatcaccgtgttgtgacaaattgggtttgaagaaaggaccttggacaccagaggaggatcagaaacttttagcttatattgaagaacatggtcatggaagttggcgttcattgcctgagaaagctggtctccatcgatgcggaaagagttgtagactaagatggactaactacctaagacctgacatcaaaagaggcaaattcaacttacaagaagaacaaaccattatccaactccatgctctgttaggaaacagatggtcagcgattgctactcatttgccaaagagaacagacaacgagatcaagaactattggaacactcatttgaagaaacggttagtgaaaatggggattgatccagtgactcataaacccaaaaacgagactcctttatcttctcttggtctatccaagaacgcagctatacttagccacactgctcaatgggaaagtgcaaggcttgaagctgaagcaagactagctagagaatcaaagcttcttcatttacaacattaccaaaccaaaacatcatctcaacctcatcatcatcatggattcactcacaagtcattgttacctaattggacaacaaaaccacacgaagtgtcattctctgagatgaaggaatcaatcccggcgaagatagagtttgtcggatcatcaactggtgtgactctgatgaaagaacctgaacacgattggatcaattcaacgatgcacgagtttgaaactacgcagatgggagaaggaatcgaagaagggttcacgggtctcttgctcggtggtgattcaatcgaccggagtttctccggcgataaaaacgagacggccggcgagagtagtggtggtgactgcaactactatgaggacaacaagaactacttggacagcatttttaactttgtagatccttcaccgtcggattcaccgatgttctgaatctaagggttgatatttgttgggaatgtttttgattcttttttagtttctagtttttgtgcttaaactctgattagacaatttttaaactaatccaatttttgcgc

SEQ ID NO: 72733 - protein, 315 aa, Arabidopsis thaliana
  peptide (1)..(315): Ceres Seq. ID no. 4945203
  misc_feature (14)..(61): Pfam Name: Myb-like DNA-binding domain Pfam Description: Myb-like DNA-binding domain
  misc_feature (1)..(315): Homolog of NCBI NO: 15242272 NR Description: myb family transcription factor; protein id: supported by cDNA: gi_13877708 [Arabidopsis thaliana]
  misc_feature (1)..(220): Homolog of NCBI NO: 15232045 NR Description: myb family transcription factor; protein id:
  misc_feature (216)..(315): Homolog of NCBI NO: 15232045 NR Description: myb family transcription factor; protein id:
  misc_feature (1)..(169): Homolog of NCBI NO: 282964 NR Description: myb-related protein 1 - garden petunia
  misc_feature (223)..(315): Homolog of NCBI NO: 282964 NR Description: myb-related protein 1 - garden petunia
  misc_feature (119)..(315): Homolog of NCBI NO: 20340243 NR Description: myb-related protein-like protein [Thellungiella
  misc_feature (1)..(314): Homolog of NCBI NO: 38344966 NR Description: OSJNBa0072F16.11 [Oryza sativa (japonica
  misc_feature (1)..(169): Homolog of NCBI NO: 28628947 NR Description: MYB1 [Dendrobium sp. XMW-2002-1]
  misc_feature (1)..(202): Homolog of NCBI NO: 13346188 NR Description: GHMYB25 [Gossypium hirsutum]
  misc_feature (1)..(169): Homolog of NCBI NO: 27125807 NR Description: MYB27 protein [Oryza sativa (japonica
MGRSPCCDKLGLKKGPWTPEEDQKLLAYIEEHGHGSWRSLPEKAGLHRCGKSCRLRWTNYLRPDIKRGKFNLQEEQTIIQLHALLGNRWSAIATHLPKRTDNEIKNYWNTHLKKRLVKMGIDPVTHKPKNETPLSSLGLSKNAAILSHTAQWESARLEAEARLARESKLLHLQHYQTKTSSQPHHHHGFTHKSLLPNWTTKPHEVSFSEMKESIPAKIEFVGSSTGVTLMKEPEHDWINSTMHEFETTQMGEGIEEGFTGLLLGGDSIDRSFSGDKNETAGESSGGDCNYYEDNKNYLDSIFNFVDPSPSDSPMF

SEQ ID NO: 72734 - protein, 197 aa, Arabidopsis thaliana
  peptide (1)..(197): Ceres Seq. ID no. 4945204
  misc_feature (1)..(197): Homolog of NCBI NO: 15242272 NR Description: myb family transcription factor; protein id: supported by cDNA: gi_13877708 [Arabidopsis thaliana]
  misc_feature (1)..(102): Homolog of NCBI NO: 15232045 NR Description: myb family transcription factor; protein id:
  misc_feature (98)..(197): Homolog of NCBI NO: 15232045 NR Description: myb family transcription factor; protein id:
  misc_feature (1)..(51): Homolog of NCBI NO: 282964 NR Description: myb-related protein 1 - garden petunia
  misc_feature (105)..(197): Homolog of NCBI NO: 282964 NR Description: myb-related protein 1 - garden petunia
  misc_feature (1)..(197): Homolog of NCBI NO: 20340243 NR Description: myb-related protein-like protein [Thellungiella
  misc_feature (1)..(196): Homolog of NCBI NO: 38344966 NR Description: OSJNBa0072F16.11 [Oryza sativa (japonica
  misc_feature (1)..(51): Homolog of NCBI NO: 28628947 NR Description: MYB1 [Dendrobium sp. XMW-2002-1]
  misc_feature (1)..(84): Homolog of NCBI NO: 13346188 NR Description: GHMYB25 [Gossypium hirsutum]
  misc_feature (1)..(51): Homolog of NCBI NO: 27125807 NR Description: MYB27 protein [Oryza sativa (japonica
MGIDPVTHKPKNETPLSSLGLSKNAAILSHTAQWESARLEAEARLARESKLLHLQHYQTKTSSQPHHHHGFTHKSLLPNWTTKPHEVSFSEMKESIPAKIEFVGSSTGVTLMKEPEHDWINSTMHEFETTQMGEGIEEGFTGLLLGGDSIDRSFSGDKNETAGESSGGDCNYYEDNKNYLDSIFNFVDPSPSDSPMF

SEQ ID NO: 72735 - DNA, 1400 bp, Arabidopsis thaliana
  misc_feature (1)..(1400): Ceres Seq. ID no. 4945205
  misc_feature: MA Experiment ID: 108434 Result: Up-regulated in Transcription
  misc_feature: MA Experiment 108434 PARAMETER Experiment Name: At_Root_Tips_cDNA_P Parameter: Tissue Value: Root Tips
  misc_feature: MA Experiment ID: 108561 Result: Down-regulated in Transcription
  misc_feature: MA Experiment 108561 PARAMETER Experiment Name: At_100uM_ABA_cDNA_P Parameter: Timepoint (hr) Value: 6
  misc_feature: MA Experiment 108561 PARAMETER Experiment Name: At_100uM_ABA_cDNA_P Parameter: Tissue Value: Aerial
  misc_feature: MA Experiment 108561 PARAMETER Experiment Name: At_100uM_ABA_cDNA_P Parameter: Treatment Value: 100uM ABA vs. No Treatment
  misc_feature: MA Experiment ID: 108595 Result: Down-regulated in Transcription
  misc_feature: MA Experiment 108595 PARAMETER Experiment Name: At_Ler-pi_Ovule_cDNA_P Parameter: Plant Line Value: null
  misc_feature: MA Experiment ID: 20000069 Result: Down-regulated in Transcription
  misc_feature: MA Experiment 20000069 PARAMETER Experiment Name: At_100uM_ABA_Mutants_cDNA_P Parameter: Plant Line Value: CS23
  misc_feature: MA Experiment 20000069 PARAMETER Experiment Name: At_100uM_ABA_Mutants_cDNA_P Parameter: Timepoint (hr) Value: 6
  misc_feature: MA Experiment 20000069 PARAMETER Experiment Name: At_100uM_ABA_Mutants_cDNA_P Parameter: Tissue Value: Aerial
  misc_feature: MA Experiment 20000069 PARAMETER Experiment Name: At_100uM_ABA_Mutants_cDNA_P Parameter: Treatment Value: 100uM ABA vs. No Treatment
  misc_feature: MA Experiment ID: 20000070 Result: Down-regulated in Transcription
  misc_feature: MA Experiment 20000070 PARAMETER Experiment Name: At_100uM_ABA_Mutants_cDNA_P Parameter: Plant Line Value: CS24
  misc_feature: MA Experiment 20000070 PARAMETER Experiment Name: At_100uM_ABA_Mutants_cDNA_P Parameter: Timepoint (hr) Value: 6
  misc_feature: MA Experiment 20000070 PARAMETER Experiment Name: At_100uM_ABA_Mutants_cDNA_P Parameter: Tissue Value: Aerial
  misc_feature: MA Experiment 20000070 PARAMETER Experiment Name: At_100uM_ABA_Mutants_cDNA_P Parameter: Treatment Value: 100uM ABA vs. No Treatment
  misc_feature: MA Experiment ID: 20000071 Result: Down-regulated in Transcription
  misc_feature: MA Experiment 20000071 PARAMETER Experiment Name: At_100uM_ABA_Mutants_cDNA_P Parameter: Plant Line Value: CS8104
  misc_feature: MA Experiment 20000071 PARAMETER Experiment Name: At_100uM_ABA_Mutants_cDNA_P Parameter: Timepoint (hr) Value: 6
  misc_feature: MA Experiment 20000071 PARAMETER Experiment Name: At_100uM_ABA_Mutants_cDNA_P Parameter: Tissue Value: Aerial
  misc_feature: MA Experiment 20000071 PARAMETER Experiment Name: At_100uM_ABA_Mutants_cDNA_P Parameter: Treatment Value: 100uM ABA vs. No Treatment
  misc_feature: MA Experiment ID: 20000087 Result: Down-regulated in Transcription
  misc_feature: MA Experiment 20000087 PARAMETER Experiment Name: At_100uM_ABA_Mutants_cDNA_P Parameter: Plant Line Value: WS
  misc_feature: MA Experiment 20000087 PARAMETER Experiment Name: At_100uM_ABA_Mutants_cDNA_P Parameter: Timepoint (hr) Value: 6
  misc_feature: MA Experiment 20000087 PARAMETER Experiment Name: At_100uM_ABA_Mutants_cDNA_P Parameter: Tissue Value: Aerial
  misc_feature: MA Experiment 20000087 PARAMETER Experiment Name: At_100uM_ABA_Mutants_cDNA_P Parameter: Treatment Value: 100uM ABA vs. No Treatment
  misc_feature: MA Experiment ID: 20000089 Result: Down-regulated in Transcription
  misc_feature: MA Experiment ID: 20000117 Result: Down-regulated in Transcription
  misc_feature: MA Experiment 20000117 PARAMETER Experiment Name: At_100uM_ABA_Mutants_cDNA_P Parameter: Plant Line Value: Columbia
  misc_feature: MA Experiment 20000117 PARAMETER Experiment Name: At_100uM_ABA_Mutants_cDNA_P Parameter: Timepoint (hr) Value: 6
  misc_feature: MA Experiment 20000117 PARAMETER Experiment Name: At_100uM_ABA_Mutants_cDNA_P Parameter: Tissue Value: Aerial
  misc_feature: MA Experiment 20000117 PARAMETER Experiment Name: At_100uM_ABA_Mutants_cDNA_P Parameter: Treatment Value: 100uM ABA vs. No Treatment
gggttcgagacgacgacaagagacaagctctgtctgtggtcgggaaatcgaaaccagagccttggactgtgtctctgctctgtggagtatccattttcgatttcttgaaggtgaatccagcgaatccttaatctcaagctccgagactgtgcaataaacaaaacagtagctagcagcagcagcaacacatgaactcgtgcaaatcccttatccgtgcctcaatctcttcctttccatttgttcctcttccaaaccctaatttctctatcaccttcatctccgttcgcgccttttctcctctctctgtccttcatccaaattcatcatgtattgtaacagctcgacgcacatttcatggagctgtggctctttcaccggagagcttaacggaagagtctcccaaggatactgtgaaaggattgttaacaaccaatcgtggtgaggcctcaagcttgatgaagatggagcggaggtgtagcttaagcaatggtgagggtgattgtagaggatcttggtttccttacgaggataggttcaggtgtggtgaggtgcatcttagtagccgtgaggtgttggaggcggtgagtcctcatatgatggaagagaggacagataggttcaggcgtgtggtggagaatcgaagctactcggtgtgtcttgtggttgaaggtctctctgattttggaaacatctctgctgctttccgctcagctgatgcgttggggattcaatctgtacatgttgtttcctgtgacagctccaaaaggtgcccctttgaggtataacggaaatcgccatgtgagtatgggagctgagaaatggctggacattgagttttgggacacacctaaagaatgtttcaaagttttgaagtctcgcggttacagaatagctacaactcatttgggaatggacacggtttccatttacgatatggactggtcatgcccaacagcaatagttgttggaaacgagggcaggggaataagtgacgaagcgttggagttatcagatctgcgttgcagtattccgatgaatggaatggttgattcgtttaatgtctcagtggctgcagggattctgatgcaccacgcagtctctgatagaaccactcgtctgggaagccatggagatctgtcggaagcagagaaagagatattgatggctgagttctcacttcgtcacagtagaagctcaatttgcattgcttacgagttcgctaaacgtaaacaacaacactctacctcctcctaattttgaaaccgttgtcttattctctcgctgttttgcgtgttataggcttcgaatgacgcctataaaaactctttcgaactctttttttggtacgacgcttgcttcatgtacaactcttaaattctataaaagacatccttctgtcg

SEQ ID NO: 72736 - protein, 198 aa, Arabidopsis thaliana; identical to SEQ ID NO: 24596
  peptide (1)..(198): Ceres Seq. ID no. 4945206
  misc_feature (1)..(193): Homolog of NCBI NO: 15242287 NR Description: rRNA methylase - like protein; protein id:
  misc_feature (80)..(193): Homolog of NCBI NO: 34393586 NR Description: putative rRNA methylase [Oryza sativa (japonica
  misc_feature (110)..(187): Homolog of NCBI NO: 28207743 NR Description: CR004 protein [Chlamydomonas reinhardtii]
  misc_feature (136)..(187): Homolog of NCBI NO: 20808975 NR Description: rRNA methylase [Thermoanaerobacter tengcongensis]
  misc_feature (136)..(186): Homolog of NCBI NO: 27364301 NR Description: rRNA methylases [Vibrio vulnificus CMCP6]
  misc_feature (139)..(190): Homolog of NCBI NO: 23475629 NR Description: hypothetical protein [Desulfovibrio desulfuricans
  misc_feature (120)..(191): Homolog of NCBI NO: 21673707 NR Description: tRNA methyltransferase SpoU [Chlorobium tepidum >gi|21646829|gb|AAM72114.1| tRNA methyltransferase SpoU
  misc_feature (136)..(193): Homolog of NCBI NO: 33866213 NR Description: putative tRNA (guanosine-2'-O-)-methyltransferase
  misc_feature (139)..(192): Homolog of NCBI NO: 28896932 NR Description: tRNA methyltransferase [Vibrio parahaemolyticus
  misc_feature (136)..(186): Homolog of NCBI NO: 23026779 NR Description: hypothetical protein [Microbulbifer degradans

SEQ ID NO: 72737 - protein, 179 aa, Arabidopsis thaliana; identical to SEQ ID NO: 24597
  peptide (1)..(179): Ceres Seq. ID no. 4945207
  misc_feature (22)..(125): Pfam Name: SpoU rRNA Methylase family Pfam Description: SpoU rRNA Methylase family
  misc_feature (22)..(179): Homolog of NCBI NO: 15242287 NR Description: rRNA methylase - like protein; protein id:
  misc_feature (22)..(172): Homolog of NCBI NO: 34393586 NR Description: putative rRNA methylase [Oryza sativa (japonica
  misc_feature (13)..(171): Homolog of NCBI NO: 28207743 NR Description: CR004 protein [Chlamydomonas reinhardtii]
  misc_feature (26)..(150): Homolog of NCBI NO: 20808975 NR Description: rRNA methylase [Thermoanaerobacter tengcongensis]
  misc_feature (27)..(149): Homolog of NCBI NO: 27364301 NR Description: rRNA methylases [Vibrio vulnificus CMCP6]
  misc_feature (30)..(147): Homolog of NCBI NO: 23475629 NR Description: hypothetical protein [Desulfovibrio desulfuricans
  misc_feature (27)..(154): Homolog of NCBI NO: 21673707 NR Description: tRNA methyltransferase SpoU [Chlorobium tepidum >gi|21646829|gb|AAM72114.1| tRNA methyltransferase SpoU
  misc_feature (30)..(131): Homolog of NCBI NO: 33866213 NR Description: putative tRNA (guanosine-2'-O-)-methyltransferase
  misc_feature (28)..(131): Homolog of NCBI NO: 28896932 NR Description: tRNA methyltransferase [Vibrio parahaemolyticus
  misc_feature (16)..(124): Homolog of NCBI NO: 23026779 NR Description: hypothetical protein [Microbulbifer degradans

SEQ ID NO: 72738 - protein, 171 aa, Arabidopsis thaliana; identical to SEQ ID NO: 24598
  peptide (1)..(171): Ceres Seq. ID no. 4945208
  misc_feature (14)..(117): Pfam Name: SpoU rRNA Methylase family Pfam Description: SpoU rRNA Methylase family
  misc_feature (14)..(171): Homolog of NCBI NO: 15242287 NR Description: rRNA methylase - like protein; protein id:
  misc_feature (14)..(164): Homolog of NCBI NO: 34393586 NR Description: putative rRNA methylase [Oryza sativa (japonica
  misc_feature (5)..(163): Homolog of NCBI NO: 28207743 NR Description: CR004 protein [Chlamydomonas reinhardtii]
  misc_feature (18)..(142): Homolog of NCBI NO: 20808975 NR Description: rRNA methylase [Thermoanaerobacter tengcongensis]
  misc_feature (19)..(141): Homolog of NCBI NO: 27364301 NR Description: rRNA methylases [Vibrio vulnificus CMCP6]
  misc_feature (22)..(139): Homolog of NCBI NO: 23475629 NR Description: hypothetical protein [Desulfovibrio desulfuricans
  misc_feature (19)..(146): Homolog of NCBI NO: 21673707 NR Description: tRNA methyltransferase SpoU [Chlorobium tepidum >gi|21646829|gb|AAM72114.1| tRNA methyltransferase SpoU
  misc_feature (22)..(123): Homolog of NCBI NO: 33866213 NR Description: putative tRNA (guanosine-2'-O-)-methyltransferase
  misc_feature (20)..(123): Homolog of NCBI NO: 28896932 NR Description: tRNA methyltransferase [Vibrio parahaemolyticus
  misc_feature (8)..(116): Homolog of NCBI NO: 23026779 NR Description: hypothetical protein [Microbulbifer degradans

SEQ ID NO: 72739 - DNA, 1271 bp, Arabidopsis thaliana
  misc_feature (1)..(1271): Ceres Seq. ID no. 4945209
  misc_feature: MA Experiment ID: 108434 Result: Down-regulated in Transcription
  misc_feature: MA Experiment 108434 PARAMETER Experiment Name: At_Root_Tips_cDNA_P Parameter: Tissue Value: Root Tips
  misc_feature: MA Experiment ID: 108577 Result: Down-regulated in Transcription
  misc_feature: MA Experiment 108577 PARAMETER Experiment Name: At_42deg_Heat_cDNA_P Parameter: Temperature (deg C) Value: 42 vs. 22
  misc_feature: MA Experiment 108577 PARAMETER Experiment Name: At_42deg_Heat_cDNA_P Parameter: Timepoint (hr) Value: 6
  misc_feature: MA Experiment 108577 PARAMETER Experiment Name: At_42deg_Heat_cDNA_P Parameter: Tissue Value: Aerial
  misc_feature: MA Experiment ID: 108595 Result: Down-regulated in Transcription
  misc_feature: MA Experiment 108595 PARAMETER Experiment Name: At_Ler-pi_Ovule_cDNA_P Parameter: Plant Line Value: null
  misc_feature: MA Experiment ID: 20000069 Result: Down-regulated in Transcription
  misc_feature: MA Experiment 20000069 PARAMETER Experiment Name: At_100uM_ABA_Mutants_cDNA_P Parameter: Plant Line Value: CS23
  misc_feature: MA Experiment 20000069 PARAMETER Experiment Name: At_100uM_ABA_Mutants_cDNA_P Parameter: Timepoint (hr) Value: 6
  misc_feature: MA Experiment 20000069 PARAMETER Experiment Name: At_100uM_ABA_Mutants_cDNA_P Parameter: Tissue Value: Aerial
  misc_feature: MA Experiment 20000069 PARAMETER Experiment Name: At_100uM_ABA_Mutants_cDNA_P Parameter: Treatment Value: 100uM ABA vs. No Treatment
  misc_feature: MA Experiment ID: 20000070 Result: Down-regulated in Transcription
  misc_feature: MA Experiment 20000070 PARAMETER Experiment Name: At_100uM_ABA_Mutants_cDNA_P Parameter: Plant Line Value: CS24
  misc_feature: MA Experiment 20000070 PARAMETER Experiment Name: At_100uM_ABA_Mutants_cDNA_P Parameter: Timepoint (hr) Value: 6
  misc_feature: MA Experiment 20000070 PARAMETER Experiment Name: At_100uM_ABA_Mutants_cDNA_P Parameter: Tissue Value: Aerial
  misc_feature: MA Experiment 20000070 PARAMETER Experiment Name: At_100uM_ABA_Mutants_cDNA_P Parameter: Treatment Value: 100uM ABA vs. No Treatment
  misc_feature: MA Experiment ID: 20000071 Result: Down-regulated in Transcription
  misc_feature: MA Experiment 20000071 PARAMETER Experiment Name: At_100uM_ABA_Mutants_cDNA_P Parameter: Plant Line Value: CS8104
  misc_feature: MA Experiment 20000071 PARAMETER Experiment Name: At_100uM_ABA_Mutants_cDNA_P Parameter: Timepoint (hr) Value: 6
  misc_feature: MA Experiment 20000071 PARAMETER Experiment Name: At_100uM_ABA_Mutants_cDNA_P Parameter: Tissue Value: Aerial
  misc_feature: MA Experiment 20000071 PARAMETER Experiment Name: At_100uM_ABA_Mutants_cDNA_P Parameter: Treatment Value: 100uM ABA vs. No Treatment
  misc_feature: MA Experiment ID: 20000072 Result: Down-regulated in Transcription
  misc_feature: MA Experiment 20000072 PARAMETER Experiment Name: At_100uM_ABA_Mutants_cDNA_P Parameter: Plant Line Value: CS8105
  misc_feature: MA Experiment 20000072 PARAMETER Experiment Name: At_100uM_ABA_Mutants_cDNA_P Parameter: Timepoint (hr) Value: 6
  misc_feature: MA Experiment 20000072 PARAMETER Experiment Name: At_100uM_ABA_Mutants_cDNA_P Parameter: Tissue Value: Aerial
  misc_feature: MA Experiment 20000072 PARAMETER Experiment Name: At_100uM_ABA_Mutants_cDNA_P Parameter: Treatment Value: 100uM ABA vs. No Treatment
  misc_feature: MA Experiment ID: 20000086 Result: Down-regulated in Transcription
  misc_feature: MA Experiment 20000086 PARAMETER Experiment Name: At_100uM_ABA_Mutants_cDNA_P Parameter: Plant Line Value: CS22
  misc_feature: MA Experiment 20000086 PARAMETER Experiment Name: At_100uM_ABA_Mutants_cDNA_P Parameter: Timepoint (hr) Value: 6
  misc_feature: MA Experiment 20000086 PARAMETER Experiment Name: At_100uM_ABA_Mutants_cDNA_P Parameter: Tissue Value: Aerial
  misc_feature: MA Experiment 20000086 PARAMETER Experiment Name: At_100uM_ABA_Mutants_cDNA_P Parameter: Treatment Value: 100uM ABA vs. No Treatment
  misc_feature: MA Experiment ID: 20000093 Result: Down-regulated in Transcription
  misc_feature: MA Experiment 20000093 PARAMETER Experiment Name: At_42deg_Heat_cDNA_P Parameter: Temperature (deg C) Value: 42 vs. 22
  misc_feature: MA Experiment 20000093 PARAMETER Experiment Name: At_42deg_Heat_cDNA_P Parameter: Timepoint (hr) Value: 0.5
  misc_feature: MA Experiment 20000093 PARAMETER Experiment Name: At_42deg_Heat_cDNA_P Parameter: Tissue Value: Aerial
  misc_feature: MA Experiment ID: 20000111 Result: Down-regulated in Transcription
  misc_feature: MA Experiment 20000111 PARAMETER Experiment Name: At_42deg_Heat_cDNA_P Parameter: Temperature (deg C) Value: 42 vs. 22
  misc_feature: MA Experiment 20000111 PARAMETER Experiment Name: At_42deg_Heat_cDNA_P Parameter: Timepoint (hr) Value: 6
  misc_feature: MA Experiment 20000111 PARAMETER Experiment Name: At_42deg_Heat_cDNA_P Parameter: Tissue Value: Aerial
  misc_feature: MA Experiment ID: 20000117 Result: Down-regulated in Transcription
  misc_feature: MA Experiment 20000117 PARAMETER Experiment Name: At_100uM_ABA_Mutants_cDNA_P Parameter: Plant Line Value: Columbia
  misc_feature: MA Experiment 20000117 PARAMETER Experiment Name: At_100uM_ABA_Mutants_cDNA_P Parameter: Timepoint (hr) Value: 6
  misc_feature: MA Experiment 20000117 PARAMETER Experiment Name: At_100uM_ABA_Mutants_cDNA_P Parameter: Tissue Value: Aerial
  misc_feature: MA Experiment 20000117 PARAMETER Experiment Name: At_100uM_ABA_Mutants_cDNA_P Parameter: Treatment Value: 100uM ABA vs. No Treatment
  misc_feature: MA Experiment ID: 20000144 Result: Down-regulated in Transcription
  misc_feature: MA Experiment 20000144 PARAMETER Experiment Name: At_42deg_Heat_cDNA_P Parameter: Temperature (deg C) Value: 42 vs. 22
  misc_feature: MA Experiment 20000144 PARAMETER Experiment Name: At_42deg_Heat_cDNA_P Parameter: Timepoint (hr) Value: 1
  misc_feature: MA Experiment 20000144 PARAMETER Experiment Name: At_42deg_Heat_cDNA_P Parameter: Tissue Value: Aerial
  misc_feature: MA Experiment ID: 20000166 Result: Down-regulated in Transcription
  misc_feature: MA Experiment 20000166 PARAMETER Experiment Name: At_100uM_ABA_P Parameter: Age (day) Value: 14
  misc_feature: MA Experiment 20000166 PARAMETER Experiment Name: At_100uM_ABA_P Parameter: Organism Value: A. thaliana
  misc_feature: MA Experiment 20000166 PARAMETER Experiment Name: At_100uM_ABA_P Parameter: Plant Line Value: WS
  misc_feature: MA Experiment 20000166 PARAMETER Experiment Name: At_100uM_ABA_P Parameter: Timepoint (hr) Value: 1
  misc_feature: MA Experiment 20000166 PARAMETER Experiment Name: At_100uM_ABA_P Parameter: Tissue Value: Aerial
  misc_feature: MA Experiment 20000166 PARAMETER Experiment Name: At_100uM_ABA_P Parameter: Treatment Value: 100uM ABA vs. No Treatment
  misc_feature: MA Experiment ID: 20000171 Result: Down-regulated in Transcription
  misc_feature: MA Experiment 20000171 PARAMETER Experiment Name: At_42deg_Heat_P Parameter: Age (day) Value: 14
  misc_feature: MA Experiment 20000171 PARAMETER Experiment Name: At_42deg_Heat_P Parameter: Organism Value: A. thaliana
  misc_feature: MA Experiment 20000171 PARAMETER Experiment Name: At_42deg_Heat_P Parameter: Plant Line Value: WS
  misc_feature: MA Experiment 20000171 PARAMETER Experiment Name: At_42deg_Heat_P Parameter: Temperature (deg C) Value: 42 vs. 22
  misc_feature: MA Experiment 20000171 PARAMETER Experiment Name: At_42deg_Heat_P Parameter: Timepoint (hr) Value: 1
  misc_feature: MA Experiment 20000171 PARAMETER Experiment Name: At_42deg_Heat_P Parameter: Tissue Value: Aerial
  misc_feature: MA Experiment ID: 20000173 Result: Down-regulated in Transcription
  misc_feature: MA Experiment 20000173 PARAMETER Experiment Name: At_42deg_Heat_P Parameter: Age (day) Value: 14
  misc_feature: MA Experiment 20000173 PARAMETER Experiment Name: At_42deg_Heat_P Parameter: Organism Value: A. thaliana
  misc_feature: MA Experiment 20000173 PARAMETER Experiment Name: At_42deg_Heat_P Parameter: Plant Line Value: WS
  misc_feature: MA Experiment 20000173 PARAMETER Experiment Name: At_42deg_Heat_P Parameter: Temperature (deg C) Value: 42 vs. 22
  misc_feature: MA Experiment 20000173 PARAMETER Experiment Name: At_42deg_Heat_P Parameter: Timepoint (hr) Value: 6
  misc_feature: MA Experiment 20000173 PARAMETER Experiment Name: At_42deg_Heat_P Parameter: Tissue Value: Aerial
  misc_feature: MA Experiment ID: 20000184 Result: Up-regulated in Transcription
  misc_feature: MA Experiment 20000184 PARAMETER Experiment Name: At_Shoots__P Parameter: Age (day) Value: 7
  misc_feature: MA Experiment 20000184 PARAMETER Experiment Name: At_Shoots__P Parameter: Tissue Value: Shoots vs. Whole Plant
  misc_feature: MA Experiment ID: 20000185 Result: Down-regulated in Transcription
  misc_feature: MA Experiment 20000185 PARAMETER Experiment Name: At_Roots__P Parameter: Age (day) Value: 7 vs. 21
  misc_feature: MA Experiment 20000185 PARAMETER Experiment Name: At_Roots__P Parameter: Organism Value: A. thaliana
  misc_feature: MA Experiment 20000185 PARAMETER Experiment Name: At_Roots__P Parameter: Tissue Value: Roots vs. Whole Plant
  misc_feature: MA Experiment ID: 20000234 Result: Up-regulated in Transcription
  misc_feature: MA Experiment 20000234 PARAMETER Experiment Name: At_Siliques_P Parameter: Age (day) Value: 21
  misc_feature: MA Experiment 20000234 PARAMETER Experiment Name: At_Siliques_P Parameter: Organism Value: A. thaliana
  misc_feature: MA Experiment 20000234 PARAMETER Experiment Name: At_Siliques_P Parameter: Plant Line Value: WS
  misc_feature: MA Experiment 20000234 PARAMETER Experiment Name: At_Siliques_P Parameter: Tissue Value: Less Than 5mm Siliques vs. Whole Plant
  misc_feature: MA Experiment ID: 20000265 Result: Up-regulated in Transcription
  misc_feature: MA Experiment 20000265 PARAMETER Experiment Name: At_Open_Flower_P Parameter: Age (day) Value: 21
  misc_feature: MA Experiment 20000265 PARAMETER Experiment Name: At_Open_Flower_P Parameter: Plant Line Value: WS
  misc_feature: MA Experiment 20000265 PARAMETER Experiment Name: At_Open_Flower_P Parameter: Tissue Value: Closed Flower vs. Whole Plant
  misc_feature: MA Experiment ID: 20000437 Result: Down-regulated in Transcription
  misc_feature: MA Experiment 20000437 PARAMETER Experiment Name: At_Drought_P Parameter: Age (day) Value: 8
  misc_feature: MA Experiment 20000437 PARAMETER Experiment Name: At_Drought_P Parameter: Organism Value: A. thaliana
  misc_feature: MA Experiment 20000437 PARAMETER Experiment Name: At_Drought_P Parameter: Plant Line Value: WS
  misc_feature: MA Experiment 20000437 PARAMETER Experiment Name: At_Drought_P Parameter: Timepoint (hr) Value: 24
  misc_feature: MA Experiment 20000437 PARAMETER Experiment Name: At_Drought_P Parameter: Tissue Value: Whole Plant
  misc_feature: MA Experiment 20000437 PARAMETER Experiment Name: At_Drought_P Parameter: Treatment Value: Drought vs. No Drought
  misc_feature: MA Experiment ID: 20000438 Result: Up-regulated in Transcription
  misc_feature: MA Experiment 20000438 PARAMETER Experiment Name: At_Shoots__P Parameter: Age (day) Value: 14
  misc_feature: MA Experiment 20000438 PARAMETER Experiment Name: At_Shoots__P Parameter: Tissue Value: Shoots vs. Whole Plant
  misc_feature: MA Experiment ID: 20000439 Result: Down-regulated in Transcription
  misc_feature: MA Experiment 20000439 PARAMETER Experiment Name: At_Roots__P Parameter: Age (day) Value: 14 vs. 21
  misc_feature: MA Experiment 20000439 PARAMETER Experiment Name: At_Roots__P Parameter: Organism Value: A. thaliana
  misc_feature: MA Experiment 20000439 PARAMETER Experiment Name: At_Roots__P Parameter: Tissue Value: Roots vs. Whole Plant
  misc_feature: MA Experiment ID: 20000452 Result: Down-regulated in Transcription
  misc_feature: MA Experiment 20000452 PARAMETER Experiment Name: At_CS6879_Shoots-Roots_P Parameter: Age (day) Value: 14
  misc_feature: MA Experiment 20000452 PARAMETER Experiment Name: At_CS6879_Shoots-Roots_P Parameter: Organism Value: A. thaliana
  misc_feature: MA Experiment 20000452 PARAMETER Experiment Name: At_CS6879_Shoots-Roots_P Parameter: Plant Line Value: CS6879 vs. WS
  misc_feature: MA Experiment 20000452 PARAMETER Experiment Name: At_CS6879_Shoots-Roots_P Parameter: Tissue Value: Shoots
  misc_feature: MA Experiment ID: 20001248 Result: Down-regulated in Transcription
  misc_feature: MA Experiment 20001248 PARAMETER Experiment Name: At_Far-red-induction_P Parameter: Age (day) Value: 7
  misc_feature: MA Experiment 20001248 PARAMETER Experiment Name: At_Far-red-induction_P Parameter: Light Value: Far-red vs. White
  misc_feature: MA Experiment 20001248 PARAMETER Experiment Name: At_Far-red-induction_P Parameter: Organism Value: A. thaliana
  misc_feature: MA Experiment 20001248 PARAMETER Experiment Name: At_Far-red-induction_P Parameter: Plant Line Value: Columbia
  misc_feature: MA Experiment 20001248 PARAMETER Experiment Name: At_Far-red-induction_P Parameter: Timepoint (hr) Value: 4
  misc_feature: MA Experiment 20001248 PARAMETER Experiment Name: At_Far-red-induction_P Parameter: Tissue Value: Whole Plant
  misc_feature: MA Experiment ID: 20001557 Result: Up-regulated in Transcription
  misc_feature: MA Experiment 20001557 PARAMETER Experiment Name: At_Drought_Soil_Dry_P Parameter: Age (day) Value: 27
  misc_feature: MA Experiment 20001557 PARAMETER Experiment Name: At_Drought_Soil_Dry_P Parameter: Organism Value: A. thaliana
  misc_feature: MA Experiment 20001557 PARAMETER Experiment Name: At_Drought_Soil_Dry_P Parameter: Plant Line Value: WS
  misc_feature: MA Experiment 20001557 PARAMETER Experiment Name: At_Drought_Soil_Dry_P Parameter: Post Timepoint (hr) Value: 3
  misc_feature: MA Experiment 20001557 PARAMETER Experiment Name: At_Drought_Soil_Dry_P Parameter: Post-Treatment Value: Re-Water vs. No Drought
  misc_feature: MA Experiment 20001557 PARAMETER Experiment Name: At_Drought_Soil_Dry_P Parameter: Timepoint (day) Value: 13
  misc_feature: MA Experiment 20001557 PARAMETER Experiment Name: At_Drought_Soil_Dry_P Parameter: Treatment Value: Drought vs. No Drought
  misc_feature: MA Experiment ID: 20001558 Result: Up-regulated in Transcription
  misc_feature: MA Experiment 20001558 PARAMETER Experiment Name: At_Drought_Soil_Dry_P Parameter: Age (day) Value: 27
  misc_feature: MA Experiment 20001558 PARAMETER Experiment Name: At_Drought_Soil_Dry_P Parameter: Organism Value: A. thaliana
  misc_feature: MA Experiment 20001558 PARAMETER Experiment Name: At_Drought_Soil_Dry_P Parameter: Plant Line Value: WS
  misc_feature: MA Experiment 20001558 PARAMETER Experiment Name: At_Drought_Soil_Dry_P Parameter: Post Timepoint (hr) Value: 6
  misc_feature: MA Experiment 20001558 PARAMETER Experiment Name: At_Drought_Soil_Dry_P Parameter: Post-Treatment Value: Re-Water vs. No Drought
  misc_feature: MA Experiment 20001558 PARAMETER Experiment Name: At_Drought_Soil_Dry_P Parameter: Timepoint (day) Value: 13
  misc_feature: MA Experiment 20001558 PARAMETER Experiment Name: At_Drought_Soil_Dry_P Parameter: Treatment Value: Drought vs. No Drought
  misc_feature: MA Experiment ID: 20001757 Result: Up-regulated in Transcription
  misc_feature: MA Experiment 20001757 PARAMETER Experiment Name: At_50mM_NH4NO3_L-to-H_P Parameter: Timepoint (hr) Value: 6
  misc_feature: MA Experiment 20001757 PARAMETER Experiment Name: At_50mM_NH4NO3_L-to-H_P Parameter: Tissue Value: Leaf
  misc_feature: MA Experiment 20001757 PARAMETER Experiment Name: At_50mM_NH4NO3_L-to-H_P Parameter: Treatment Value: 50mM NH4NO3 vs 100mM Mannitol
accttatctttacttctatcatctattcttcttcttcctccatctctagaaaattataatacttcttgtttcttaaatcttatttgtattacaataaccaaaacccaagtttacaaaacatttcttcttcttgtttttcgaaaccctaaatgttttgagttgtcatggatgtaatagctactacaactactatagtatccgacttggattcacgacaacccgaaatcgaagctccgatccggatccagcccgcgaagcctatttctttctcaaacggcaaacgctgccaccaccatcatcttgcatctgaagcggttgcggttgcgacttataaagaatgtctaaagaatcacgcagcaggtatcggcggtcacgctttagacggatgcggcgagtttatgccgtcaccgtcgtttaactccaatgaccccgcttcactaacgtgcgctgcttgtggttgccaccgtaacttccaccgccgtgaggaggatccatcttctctctctgccatcgtccctgcgatcgaatttcgacctcacaaccgtcaccagcttcctccaccgcctcctcctcatctggcggggattcgtagtccagacgacgatgattcagcttctccaccgccgatctcgtcttcttacatgcttctcgcactctctggaggaagaggaggagctaacacggcggttccaatgtctaggaaacgttttaggacgaagtttagtcagtatcagaaggagaagatgttcgagttctcggagagagttgggtggaggatgccgaaagctgatgacgtggtggttaaggagttttgtcgggagattggagttgataaaagcgttttcaaagtgtggatgcataacaacaagatttcaggacgcagcggcgctagaagagctaacggcggagtagtagtaggaggagtaggagatagtcgtcagagtgttgttccgacaaatgggtcgttttcttcgacgtgaggaaaagaatggaaagcgttgaaaaagcgtcgtcgttttagaggctaattcttttttggtttttcttctctgtgttttgaagattttttatttttagtcaacgggtcaaaatcttttttctattccactttgttttgttatgtcttgtagtttgtactcttgttagtagtttatctttgttagagaggtgatttgagttgtatctttcgaccaaatgtgagaagaaagataaatgagtaacctcctaaaaccgaataacaaagtcaattaatccaattgttttctaaattc

SEQ ID NO: 72740 - protein, 271 aa, Arabidopsis thaliana; identical to SEQ ID NO: 25961
  peptide (1)..(271): Ceres Seq. ID no. 4945210
  misc_feature (51)..(112): Pfam Name: ZF-HD protein dimerisation region Pfam Description: ZF-HD protein dimerisation region
  misc_feature (1)..(271): Homolog of NCBI NO: 15242243 NR Description: putative protein; protein id: At5g15210.1
  misc_feature (1)..(182): Homolog of NCBI NO: 18421904 NR Description: putative protein; protein id: At5g39760.1, by cDNA: 249321., supported by cDNA: gi_20259469 [Arabidopsis >gi|10177976|dbj|BAB11382.1| gene_id:MKM21.8~pir||T00609~similar
  misc_feature (1)..(182): Homolog of NCBI NO: 21592512 NR Description: unknown [Arabidopsis thaliana]
  misc_feature (16)..(182): Homolog of NCBI NO: 15228530 NR Description: unknown protein; protein id: At3g28920.1, by cDNA: gi_20260543 [Arabidopsis thaliana] contains similarity to unknown
  misc_feature (14)..(235): Homolog of NCBI NO: 13277216 NR Description: ZF-HD homeobox protein [Flaveria trinervia]
  misc_feature (37)..(235): Homolog of NCBI NO: 13277218 NR Description: ZF-HD homeobox protein [Flaveria bidentis]
  misc_feature (6)..(167): Homolog of NCBI NO: 13277220 NR Description: ZF-HD homeobox protein [Flaveria bidentis]
  misc_feature (56)..(244): Homolog of NCBI NO: 15222382 NR Description: hypothetical protein; protein id: At1g69600.1
  misc_feature (56)..(237): Homolog of NCBI NO: 15233925 NR Description: putative protein; protein id: At4g24660.1, by cDNA: gi_16612294 [Arabidopsis thaliana]
  misc_feature (37)..(265): Homolog of NCBI NO: 15226993 NR Description: hypothetical protein; protein id: At2g02540.1, by cDNA: gi_20148767 [Arabidopsis thaliana]

SEQ ID NO: 72741 - protein, 193 aa, Arabidopsis thaliana; identical to SEQ ID NO: 25962
  peptide (1)..(193): Ceres Seq. ID no. 4945211
  misc_feature (1)..(193): Homolog of NCBI NO: 15242243 NR Description: putative protein; protein id: At5g15210.1
  misc_feature (1)..(104): Homolog of NCBI NO: 18421904 NR Description: putative protein; protein id: At5g39760.1, by cDNA: 249321., supported by cDNA: gi_20259469 [Arabidopsis >gi|10177976|dbj|BAB11382.1| gene_id:MKM21.8~pir||T00609~similar
  misc_feature (1)..(104): Homolog of NCBI NO: 21592512 NR Description: unknown [Arabidopsis thaliana]
  misc_feature (1)..(104): Homolog of NCBI NO: 15228530 NR Description: unknown protein; protein id: At3g28920.1, by cDNA: gi_20260543 [Arabidopsis thaliana] contains similarity to unknown
  misc_feature (1)..(157): Homolog of NCBI NO: 13277216 NR Description: ZF-HD homeobox protein [Flaveria trinervia]
  misc_feature (1)..(157): Homolog of NCBI NO: 13277218 NR Description: ZF-HD homeobox protein [Flaveria bidentis]
  misc_feature (1)..(89): Homolog of NCBI NO: 13277220 NR Description: ZF-HD homeobox protein [Flaveria bidentis]
  misc_feature (1)..(166): Homolog of NCBI NO: 15222382 NR Description: hypothetical protein; protein id: At1g69600.1
  misc_feature (1)..(159): Homolog of NCBI NO: 15233925 NR Description: putative protein; protein id: At4g24660.1, by cDNA: gi_16612294 [Arabidopsis thaliana]
  misc_feature (1)..(187): Homolog of NCBI NO: 15226993 NR Description: hypothetical protein; protein id: At2g02540.1, by cDNA: gi_20148767 [Arabidopsis thaliana]

SEQ ID NO: 72742 - DNA, 2064 bp, Arabidopsis thaliana
  misc_feature (1)..(2064): Ceres Seq. ID no. 4945238
  misc_feature: MA Experiment ID: 20000267 Result: Up-regulated in Transcription
  misc_feature: MA Experiment 20000267 PARAMETER Experiment Name: At_Drought_P Parameter: Age (day) Value: 7
  misc_feature: MA Experiment 20000267 PARAMETER Experiment Name: At_Drought_P Parameter: Organism Value: A. thaliana
  misc_feature: MA Experiment 20000267 PARAMETER Experiment Name: At_Drought_P Parameter: Plant Line Value: WS
  misc_feature: MA Experiment 20000267 PARAMETER Experiment Name: At_Drought_P Parameter: Timepoint (hr) Value: 6
  misc_feature: MA Experiment 20000267 PARAMETER Experiment Name: At_Drought_P Parameter: Tissue Value: Whole Plant
  misc_feature: MA Experiment 20000267 PARAMETER Experiment Name: At_Drought_P Parameter: Treatment Value: Drought vs. No Drought
  misc_feature: MA Experiment ID: 20001556 Result: Up-regulated in Transcription
  misc_feature: MA Experiment 20001556 PARAMETER Experiment Name: At_Drought_Soil_Dry_P Parameter: Age (day) Value: 26
  misc_feature: MA Experiment 20001556 PARAMETER Experiment Name: At_Drought_Soil_Dry_P Parameter: Organism Value: A. thaliana
  misc_feature: MA Experiment 20001556 PARAMETER Experiment Name: At_Drought_Soil_Dry_P Parameter: Plant Line Value: WS
  misc_feature: MA Experiment 20001556 PARAMETER Experiment Name: At_Drought_Soil_Dry_P Parameter: Post Timepoint (hr) Value: None
  misc_feature: MA Experiment 20001556 PARAMETER Experiment Name: At_Drought_Soil_Dry_P Parameter: Post-Treatment Value: None
  misc_feature: MA Experiment 20001556 PARAMETER Experiment Name: At_Drought_Soil_Dry_P Parameter: Timepoint (day) Value: 12
  misc_feature: MA Experiment 20001556 PARAMETER Experiment Name: At_Drought_Soil_Dry_P Parameter: Treatment Value: Drought vs. No Drought
  misc_feature: MA Experiment ID: 20001757 Result: Down-regulated in Transcription
  misc_feature: MA Experiment 20001757 PARAMETER Experiment Name: At_50mM_NH4NO3_L-to-H_P Parameter: Timepoint (hr) Value: 6
  misc_feature: MA Experiment 20001757 PARAMETER Experiment Name: At_50mM_NH4NO3_L-to-H_P Parameter: Tissue Value: Leaf
  misc_feature: MA Experiment 20001757 PARAMETER Experiment Name: At_50mM_NH4NO3_L-to-H_P Parameter: Treatment Value: 50mM NH4NO3 vs 100mM Mannitol
atgaaaatggcatcatcatcatcagctttgtctttccctctctccaacatcccaacctgtagtaagaagtctcaacaatttcaaaaaccggcttctttatccaaatccagtcacacacataaacctagtctcaaaacccaaattttacaccacaaattcactaagagaaatttactgagtttgacgactgccttgggatttacgtcagcgctaggaactgttcttgctcaccccgcaaaagctgaaccagaagctcccatcgaagccacttccaatagaatgtcgtattcgagattcctgcagcatctgaaagagaatgaagtgaagaaagttgacttgatcgagaacggaacggttgcgatcgtagagatctctaatccagtagtaggaaagatccagagggttagggttaaccttcccggtttaccagtcgatctggtgagggagatgaaggagaagaacgtcgatttcgctgctcatcccatgaatgtgaactggggagctttcttgctcaacttcttggggaatttagggtttcctttgatcttgcttgtctctctgcttttaacatcttcttcaagaagaaaccctgctggacctaacttgccttttggtcttggaagcaaagctaagtttcagatggagcctaacacagggataacgttcgaggatgtagcaggagtagacgaagccaagcaagactttgaagagatcgttgaatttttgaaaaccccagagaaattctcagctttgggggctaaaatcccaaaaggcgtcttgttgaccggaccgccaggaaccggaaagacactcttggccaaggctatagccggagaagccggtgttccttttttttcattgtctggttcggagttcatagagatgtttgttggtgtaggagcatctagagctagagacttgtttaacaaggcaaaggctaattcaccttgtatagtgttcattgatgagattgatgctgttgggagaatgagaggaaccggtataggaggaggaaacgacgaacgtgagcagacgctaaaccagatattaaccgaaatggatgggtttgcggggaataccggagtaattgtgatcgctgcaacgaaccggccagagattctagactctgctttgctccgaccaggaagattcgataggcaggtttctgttggtttaccggatataagaggaagagaggagatattaaaagttcacagcagaagcaagaaactcgacaaagatgtatctttgagcgtaattgccatgagaactccaggttttagtggagctgacttggccaatcttatgaacgaagcagcgattctcgccggaagaagaggaaaagacaagattacccttacagagatcgacgactctatcgatcggatagtcgccggaatggaagggacaaagatgatcgacggtaaaagtaaagcgattgtagcgtaccatgaagtaggacatgcaatttgtgcgactttgacggagggtcatgatccggttcagaaagttacgttggttcctagaggtcaagcacgtggtctcacgtggttcttaccgggagaagatccgacattggtgtctaaacagcaattgttcgctagaatcgtcggaggactcggaggcagagccgccgaagatgtaatttttggagaaccggagataaccaccggcgctgccggtgatctccagcaagtcactgagatagcaagacagatggtgacgatgtttggtatgtcggaaatcggtccatgggcactaaccgacccagcggttaagcaaaacgatgtggttctacggatgctagcgaggaactcaatgtccgagaaacttgcggaggatattgattcttgcgtgaagaaaataatcggtgacgcttacgaggttgcgaaaaagcacgtgaggaataatagagaagctatagacaagcttgttgatgttttgttggagaaagaaaccttaacgggagacgagtttcgagcaattctgtctgagtatactgatcaaccgttaaataccgatggcgatgtaagaattcgaatcaatgacttgattagtgtctaa

SEQ ID NO: 72743 - protein, 687 aa, Arabidopsis thaliana
  peptide (1)..(687): Ceres Seq. ID no. 4945239
  misc_feature (451)..(662): Pfam Name: Peptidase family M41 Pfam Description: Peptidase family M41
  misc_feature (31)..(670): Homolog of NCBI NO: 4325041 NR Description: FtsH-like protein Pftf precursor [Nicotiana
  misc_feature (3)..(670): Homolog of NCBI NO: 30684767 NR Description: FtsH protease (VAR2) [Arabidopsis thaliana]
  misc_feature (3)..(670): Homolog of NCBI NO: 16930423 NR Description: At1g06430/F12K11_24 [Arabidopsis thaliana] At1g06430/F12K11_24 [Arabidopsis thaliana]
  misc_feature (66)..(670): Homolog of NCBI NO: 3808101 NR Description: chloroplast protease [Capsicum annuum]
  misc_feature (3)..(666): Homolog of NCBI NO: 6692685 NR Description: F12K11.22 [Arabidopsis thaliana]
  misc_feature (190)..(670): Homolog of NCBI NO: 21954076 NR Description: putative FtsH protease [Arabidopsis thaliana]
  misc_feature (82)..(670): Homolog of NCBI NO: 22298276 NR Description: cell division protein [Thermosynechococcus BP-1] >gi|22294455|dbj|BAC08285.1| cell division protein
  misc_feature (52)..(674): Homolog of NCBI NO: 11467752 NR Description: hypothetical chloroplast RF25 [Guillardia theta] Cell division protein ftsH homolog >gi|3603077|gb|AAC35738.1|
  misc_feature (79)..(670): Homolog of NCBI NO: 23123765 NR Description: hypothetical protein [Nostoc punctiforme]
  misc_feature (84)..(671): Homolog of NCBI NO: 37522147 NR Description: cell division protein [Gloeobacter violaceus]
MKMASSSSALSFPLSNIPTCSKKSQQFQKPASLSKSSHTHKPSLKTQILHHKFTKRNLLSLTTALGFTSALGTVLAHPAKAEPEAPIEATSNRMSYSRFLQHLKENEVKKVDLIENGTVAIVEISNPVVGKIQRVRVNLPGLPVDLVREMKEKNVDFAAHPMNVNWGAFLLNFLGNLGFPLILLVSLLLTSSSRRNPAGPNLPFGLGSKAKFQMEPNTGITFEDVAGVDEAKQDFEEIVEFLKTPEKFSALGAKIPKGVLLTGPPGTGKTLLAKAIAGEAGVPFFSLSGSEFIEMFVGVGASRARDLFNKAKANSPCIVFIDEIDAVGRMRGTGIGGGNDEREQTLNQILTEMDGFAGNTGVIVIAATNRPEILDSALLRPGRFDRQVSVGLPDIRGREEILKVHSRSKKLDKDVSLSVIAMRTPGFSGADLANLMNEAAILAGRRGKDKITLTEIDDSIDRIVAGMEGTKMIDGKSKAIVAYHEVGHAICATLTEGHDPVQKVTLVPRGQARGLTWFLPGEDPTLVSKQQLFARIVGGLGGRAAEDVIFGEPEITTGAAGDLQQVTEIARQMVTMFGMSEIGPWALTDPAVKQNDVVLRMLARNSMSEKLAEDIDSCVKKIIGDAYEVAKKHVRNNREAIDKLVDVLLEKETLTGDEFRAILSEYTDQPLNTDGDVRIRINDLISV

SEQ ID NO: 72744 - protein, 685 aa, Arabidopsis thaliana
  peptide (1)..(685): Ceres Seq. ID no. 4945240
  misc_feature (449)..(660): Pfam Name: Peptidase family M41 Pfam Description: Peptidase family M41
  misc_feature (29)..(668): Homolog of NCBI NO: 4325041 NR Description: FtsH-like protein Pftf precursor [Nicotiana
  misc_feature (1)..(668): Homolog of NCBI NO: 30684767 NR Description: FtsH protease (VAR2) [Arabidopsis thaliana]
  misc_feature (1)..(668): Homolog of NCBI NO: 16930423 NR Description: At1g06430/F12K11_24 [Arabidopsis thaliana] At1g06430/F12K11_24 [Arabidopsis thaliana]
  misc_feature (64)..(668): Homolog of NCBI NO: 3808101 NR Description: chloroplast protease [Capsicum annuum]
  misc_feature (1)..(664): Homolog of NCBI NO: 6692685 NR Description: F12K11.22 [Arabidopsis thaliana]
  misc_feature (188)..(668): Homolog of NCBI NO: 21954076 NR Description: putative FtsH protease [Arabidopsis thaliana]
  misc_feature (80)..(668): Homolog of NCBI NO: 22298276 NR Description: cell division protein [Thermosynechococcus BP-1] >gi|22294455|dbj|BAC08285.1| cell division protein
  misc_feature (50)..(672): Homolog of NCBI NO: 11467752 NR Description: hypothetical chloroplast RF25 [Guillardia theta] Cell division protein ftsH homolog >gi|3603077|gb|AAC35738.1|
  misc_feature (77)..(668): Homolog of NCBI NO: 23123765 NR Description: hypothetical protein [Nostoc punctiforme]
  misc_feature (82)..(669): Homolog of NCBI NO: 37522147 NR Description: cell division protein [Gloeobacter violaceus]
MASSSSALSFPLSNIPTCSKKSQQFQKPASLSKSSHTHKPSLKTQILHHKFTKRNLLSLTTALGFTSALGTVLAHPAKAEPEAPIEATSNRMSYSRFLQHLKENEVKKVDLIENGTVAIVEISNPVVGKIQRVRVNLPGLPVDLVREMKEKNVDFAAHPMNVNWGAFLLNFLGNLGFPLILLVSLLLTSSSRRNPAGPNLPFGLGSKAKFQMEPNTGITFEDVAGVDEAKQDFEEIVEFLKTPEKFSALGAKIPKGVLLTGPPGTGKTLLAKAIAGEAGVPFFSLSGSEFIEMFVGVGASRARDLFNKAKANSPCIVFIDEIDAVGRMRGTGIGGGNDEREQTLNQILTEMDGFAGNTGVIVIAATNRPEILDSALLRPGRFDRQVSVGLPDIRGREEILKVHSRSKKLDKDVSLSVIAMRTPGFSGADLANLMNEAAILAGRRGKDKITLTEIDDSIDRIVAGMEGTKMIDGKSKAIVAYHEVGHAICATLTEGHDPVQKVTLVPRGQARGLTWFLPGEDPTLVSKQQLFARIVGGLGGRAAEDVIFGEPEITTGAAGDLQQVTEIARQMVTMFGMSEIGPWALTDPAVKQNDVVLRMLARNSMSEKLAEDIDSCVKKIIGDAYEVAKKHVRNNREAIDKLVDVLLEKETLTGDEFRAILSEYTDQPLNTDGDVRIRINDLISV

SEQ ID NO: 72745 - protein, 594 aa, Arabidopsis thaliana
  peptide (1)..(594): Ceres Seq. ID no. 4945241
  misc_feature (358)..(569): Pfam Name: Peptidase family M41 Pfam Description: Peptidase family M41
  misc_feature (1)..(577): Homolog of NCBI NO: 4325041 NR Description: FtsH-like protein Pftf precursor [Nicotiana
  misc_feature (1)..(577): Homolog of NCBI NO: 30684767 NR Description: FtsH protease (VAR2) [Arabidopsis thaliana]
  misc_feature (1)..(577): Homolog of NCBI NO: 16930423 NR Description: At1g06430/F12K11_24 [Arabidopsis thaliana] At1g06430/F12K11_24 [Arabidopsis thaliana]
  misc_feature (1)..(577): Homolog of NCBI NO: 3808101 NR Description: chloroplast protease [Capsicum annuum]
  misc_feature (1)..(573): Homolog of NCBI NO: 6692685 NR Description: F12K11.22 [Arabidopsis thaliana]
  misc_feature (97)..(577): Homolog of NCBI NO: 21954076 NR Description: putative FtsH protease [Arabidopsis thaliana]
  misc_feature (1)..(577): Homolog of NCBI NO: 22298276 NR Description: cell division protein [Thermosynechococcus BP-1] >gi|22294455|dbj|BAC08285.1| cell division protein
  misc_feature (1)..(581): Homolog of NCBI NO: 11467752 NR Description: hypothetical chloroplast RF25 [Guillardia theta] Cell division protein ftsH homolog >gi|3603077|gb|AAC35738.1|
  misc_feature (1)..(577): Homolog of NCBI NO: 23123765 NR Description: hypothetical protein [Nostoc punctiforme]
  misc_feature (1)..(578): Homolog of NCBI NO: 37522147 NR Description: cell division protein [Gloeobacter violaceus]
MSYSRFLQHLKENEVKKVDLIENGTVAIVEISNPVVGKIQRVRVNLPGLPVDLVREMKEKNVDFAAHPMNVNWGAFLLNFLGNLGFPLILLVSLLLTSSSRRNPAGPNLPFGLGSKAKFQMEPNTGITFEDVAGVDEAKQDFEEIVEFLKTPEKFSALGAKIPKGVLLTGPPGTGKTLLAKAIAGEAGVPFFSLSGSEFIEMFVGVGASRARDLFNKAKANSPCIVFIDEIDAVGRMRGTGIGGGNDEREQTLNQILTEMDGFAGNTGVIVIAATNRPEILDSALLRPGRFDRQVSVGLPDIRGREEILKVHSRSKKLDKDVSLSVIAMRTPGFSGADLANLMNEAAILAGRRGKDKITLTEIDDSIDRIVAGMEGTKMIDGKSKAIVAYHEVGHAICATLTEGHDPVQKVTLVPRGQARGLTWFLPGEDPTLVSKQQLFARIVGGLGGRAAEDVIFGEPEITTGAAGDLQQVTEIARQMVTMFGMSEIGPWALTDPAVKQNDVVLRMLARNSMSEKLAEDIDSCVKKIIGDAYEVAKKHVRNNREAIDKLVDVLLEKETLTGDEFRAILSEYTDQPLNTDGDVRIRINDLISV

SEQ ID NO: 72746 - DNA, 1344 bp, Arabidopsis thaliana
  misc_feature (1)..(1344): Ceres Seq. ID no. 4945326
  misc_feature: MA Experiment ID: 20000315 Result: Down-regulated in Transcription
  misc_feature: MA Experiment 20000315 PARAMETER Experiment Name: At_14day_Shoots-Roots_Sub_P Parameter: Age (day) Value: 14
  misc_feature: MA Experiment 20000315 PARAMETER Experiment Name: At_14day_Shoots-Roots_Sub_P Parameter: Organism Value: A. thaliana
  misc_feature: MA Experiment 20000315 PARAMETER Experiment Name: At_14day_Shoots-Roots_Sub_P Parameter: Plant Line Value: WS
  misc_feature: MA Experiment 20000315 PARAMETER Experiment Name: At_14day_Shoots-Roots_Sub_P Parameter: Tissue Value: Shoots vs. Whole Plant
  misc_feature: MA Experiment ID: 20000328 Result: Down-regulated in Transcription
  misc_feature: MA Experiment 20000328 PARAMETER Experiment Name: At_42deg_Heat_Sub_P Parameter: Age (day) Value: 14
  misc_feature: MA Experiment 20000328 PARAMETER Experiment Name: At_42deg_Heat_Sub_P Parameter: Organism Value: A. thaliana
  misc_feature: MA Experiment 20000328 PARAMETER Experiment Name: At_42deg_Heat_Sub_P Parameter: Plant Line Value: WS
  misc_feature: MA Experiment 20000328 PARAMETER Experiment Name: At_42deg_Heat_Sub_P Parameter: Temperature (deg C) Value: 42 vs. 22
  misc_feature: MA Experiment 20000328 PARAMETER Experiment Name: At_42deg_Heat_Sub_P Parameter: Timepoint (hr) Value: 6
  misc_feature: MA Experiment 20000328 PARAMETER Experiment Name: At_42deg_Heat_Sub_P Parameter: Tissue Value: Aerial
atggttgatgatccgttgaccaatgaggtcgtttcgtggagcagcgggaacaacagcttcgtcgtctggagtgccccggagttctcgaaggtgctcttgcccaagtatttcaagcacaacaacttctccagcttcgtcagacagttaaatacttatggtttcagaaaagttgatcctgaccgatgggaatttgcaaatgaaggatttcttagaggccgaaaacaactactgaagagtattgtcaggagaaaaccttcgcatgtgcagcagaatcagcaacaaactcaagttcagagctcatctgttggtgcttgtgtcgaggtggggaagtttggaatagaagaagaagtggaaagacttaagcgggataagaatgttcttatgcaagaactcgtcaggttaaggcagcaacagcaagctactgaaaaccaactgcagaatgtgggacagaaagttcaggtgatggagcaaaggcaacaacaaatgatgtcgtttttagcaaaggctgttcaaagtccaggtttcttaaaccagttagtacaacagaataataatgatggcaacagacaaattccaggaagcaacaaaaagaggagacttcctgtagatgagcaggagaatcgtggtgacaatgtggctaatggtcttaaccgccagattgttagatatcagccgtcgataaacgaagcagcacaaaatatgcttcgacagttcttaaatactagtacctcacctcggtatgaatcagtttcaaacaatcctgacagtttcctattgggtgatgttcccagttctacctctgtagacaatgggaacccttcaagtagagtttctggagtaacattggccgagttttcacccaacacagttcagtcagcaacgaatcaagtacccgaagcaagtttggctcatcatcctcaagctggtctggttcagccaaatataggtcaaagtccggctcaaggagcagcacctgcagactcttggagccctgaatttgatttagttggatgcgagacagatagtggagagtgttttgatccaataatggctgttttagatgagtcagaaggcgatgcaatttctcctgaaggtgagggcaagatgaatgagttactggagggagtccctaagctgcccggaatccaagatccattctgggaacagttcttttctgttgaactcccagcgattgcagatacagacgatattctatcaggatcagtggagaataatgacttggtattggaacaagaaccaaacgagtggacccgtaatgaacaacaaatgaagtatcttactgaacaaatgggactgctttcctcagaagcacagaggaaataa

SEQ ID NO: 72747 - protein, 447 aa, Arabidopsis thaliana
  peptide (1)..(447): Ceres Seq. ID no. 4945327
  misc_feature (1)..(166): Pfam Name: HSF-type DNA-binding Pfam Description: HSF-type DNA-binding
  misc_feature (1)..(447): Homolog of NCBI NO: 25296101 NR Description: heat shock transcription factor HSF3 [imported] - thaliana (fragment) >gi|3256068|emb|CAA74397.1| Heat Shock Factor
  misc_feature (1)..(447): Homolog of NCBI NO: 11357325 NR Description: Heat Shock Factor 3 - Arabidopsis thaliana
  misc_feature (1)..(447): Homolog of NCBI NO: 30686034 NR Description: heat shock transcription factor 3 (HSF3) thaliana] >gi|30686038|ref|NP_850832.1| heat shock transcription
  misc_feature (1)..(447): Homolog of NCBI NO: 15228440 NR Description: putative heat shock transcription factor; protein At3g02990.1 [Arabidopsis thaliana] Heat shock factor protein 2 (HSF 2) (Heat shock transcription
  misc_feature (1)..(447): Homolog of NCBI NO: 6624612 NR Description: heat shock factor 2 [Arabidopsis thaliana]
  misc_feature (1)..(349): Homolog of NCBI NO: 27261140 NR Description: HSF3 DNA-binding domain/VP16 activation domain
  misc_feature (1)..(442): Homolog of NCBI NO: 29126355 NR Description: putative heat shock transcription factor [Oryza
  misc_feature (1)..(295): Homolog of NCBI NO: 729775 NR Description: HEAT SHOCK FACTOR PROTEIN HSF8 (HEAT SHOCK FACTOR 8) (HSTF 8) (HEAT STRESS TRANSCRIPTION FACTOR)
  misc_feature (1)..(295): Homolog of NCBI NO: 11386827 NR Description: Heat shock factor protein HSF8 (Heat shock factor 8) (HSTF 8) (Heat stress transcription factor)
  misc_feature (1)..(443): Homolog of NCBI NO: 15223168 NR Description: heat shock transcription factor HSF8, putative; id: At1g32330.1 [Arabidopsis thaliana] >gi|25296102|pir||H86447
MVDDPLTNEVVSWSSGNNSFVVWSAPEFSKVLLPKYFKHNNFSSFVRQLNTYGFRKVDPDRWEFANEGFLRGRKQLLKSIVRRKPSHVQQNQQQTQVQSSSVGACVEVGKFGIEEEVERLKRDKNVLMQELVRLRQQQQATENQLQNVGQKVQVMEQRQQQMMSFLAKAVQSPGFLNQLVQQNNNDGNRQIPGSNKKRRLPVDEQENRGDNVANGLNRQIVRYQPSINEAAQNMLRQFLNTSTSPRYESVSNNPDSFLLGDVPSSTSVDNGNPSSRVSGVTLAEFSPNTVQSATNQVPEASLAHHPQAGLVQPNIGQSPAQGAAPADSWSPEFDLVGCETDSGECFDPIMAVLDESEGDAISPEGEGKMNELLEGVPKLPGIQDPFWEQFFSVELPAIADTDDILSGSVENNDLVLEQEPNEWTRNEQQMKYLTEQMGLLSSEAQRK

SEQ ID NO: 72748 - protein, 320 aa, Arabidopsis thaliana
  peptide (1)..(320): Ceres Seq. ID no. 4945328
  misc_feature (1)..(320): Homolog of NCBI NO: 25296101 NR Description: heat shock transcription factor HSF3 [imported] - thaliana (fragment) >gi|3256068|emb|CAA74397.1| Heat Shock Factor
  misc_feature (1)..(320): Homolog of NCBI NO: 11357325 NR Description: Heat Shock Factor 3 - Arabidopsis thaliana
  misc_feature (1)..(320): Homolog of NCBI NO: 30686034 NR Description: heat shock transcription factor 3 (HSF3) thaliana] >gi|30686038|ref|NP_850832.1| heat shock transcription
  misc_feature (1)..(320): Homolog of NCBI NO: 15228440 NR Description: putative heat shock transcription factor; protein At3g02990.1 [Arabidopsis thaliana] Heat shock factor protein 2 (HSF 2) (Heat shock transcription
  misc_feature (1)..(320): Homolog of NCBI NO: 6624612 NR Description: heat shock factor 2 [Arabidopsis thaliana]
  misc_feature (1)..(222): Homolog of NCBI NO: 27261140 NR Description: HSF3 DNA-binding domain/VP16 activation domain
  misc_feature (1)..(315): Homolog of NCBI NO: 29126355 NR Description: putative heat shock transcription factor [Oryza
  misc_feature (1)..(168): Homolog of NCBI NO: 729775 NR Description: HEAT SHOCK FACTOR PROTEIN HSF8 (HEAT SHOCK FACTOR 8) (HSTF 8) (HEAT STRESS TRANSCRIPTION FACTOR)
  misc_feature (1)..(168): Homolog of NCBI NO: 11386827 NR Description: Heat shock factor protein HSF8 (Heat shock factor 8) (HSTF 8) (Heat stress transcription factor)
  misc_feature (1)..(316): Homolog of NCBI NO: 15223168 NR Description: heat shock transcription factor HSF8, putative; id: At1g32330.1 [Arabidopsis thaliana] >gi|25296102|pir||H86447
MQELVRLRQQQQATENQLQNVGQKVQVMEQRQQQMMSFLAKAVQSPGFLNQLVQQNNNDGNRQIPGSNKKRRLPVDEQENRGDNVANGLNRQIVRYQPSINEAAQNMLRQFLNTSTSPRYESVSNNPDSFLLGDVPSSTSVDNGNPSSRVSGVTLAEFSPNTVQSATNQVPEASLAHHPQAGLVQPNIGQSPAQGAAPADSWSPEFDLVGCETDSGECFDPIMAVLDESEGDAISPEGEGKMNELLEGVPKLPGIQDPFWEQFFSVELPAIADTDDILSGSVENNDLVLEQEPNEWTRNEQQMKYLTEQMGLLSSEAQRK

SEQ ID NO: 72749 - protein, 293 aa, Arabidopsis thaliana
  peptide (1)..(293): Ceres Seq. ID no. 4945329
  misc_feature (1)..(293): Homolog of NCBI NO: 25296101 NR Description: heat shock transcription factor HSF3 [imported] - thaliana (fragment) >gi|3256068|emb|CAA74397.1| Heat Shock Factor
  misc_feature (1)..(293): Homolog of NCBI NO: 11357325 NR Description: Heat Shock Factor 3 - Arabidopsis thaliana
  misc_feature (1)..(293): Homolog of NCBI NO: 30686034 NR Description: heat shock transcription factor 3 (HSF3) thaliana] >gi|30686038|ref|NP_850832.1| heat shock transcription
  misc_feature (1)..(293): Homolog of NCBI NO: 15228440 NR Description: putative heat shock transcription factor; protein At3g02990.1 [Arabidopsis thaliana] Heat shock factor protein 2 (HSF 2) (Heat shock transcription
  misc_feature (1)..(293): Homolog of NCBI NO: 6624612 NR Description: heat shock factor 2 [Arabidopsis thaliana]
  misc_feature (1)..(195): Homolog of NCBI NO: 27261140 NR Description: HSF3 DNA-binding domain/VP16 activation domain
  misc_feature (1)..(288): Homolog of NCBI NO: 29126355 NR Description: putative heat shock transcription factor [Oryza
  misc_feature (1)..(141): Homolog of NCBI NO: 729775 NR Description: HEAT SHOCK FACTOR PROTEIN HSF8 (HEAT SHOCK FACTOR 8) (HSTF 8) (HEAT STRESS TRANSCRIPTION FACTOR)
  misc_feature (1)..(141): Homolog of NCBI NO: 11386827 NR Description: Heat shock factor protein HSF8 (Heat shock factor 8) (HSTF 8) (Heat stress transcription factor)
  misc_feature (1)..(289): Homolog of NCBI NO: 15223168 NR Description: heat shock transcription factor HSF8, putative; id: At1g32330.1 [Arabidopsis thaliana] >gi|25296102|pir||H86447
MEQRQQQMMSFLAKAVQSPGFLNQLVQQNNNDGNRQIPGSNKKRRLPVDEQENRGDNVANGLNRQIVRYQPSINEAAQNMLRQFLNTSTSPRYESVSNNPDSFLLGDVPSSTSVDNGNPSSRVSGVTLAEFSPNTVQSATNQVPEASLAHHPQAGLVQPNIGQSPAQGAAPADSWSPEFDLVGCETDSGECFDPIMAVLDESEGDAISPEGEGKMNELLEGVPKLPGIQDPFWEQFFSVELPAIADTDDILSGSVENNDLVLEQEPNEWTRNEQQMKYLTEQMGLLSSEAQRK

SEQ ID NO: 72750 - DNA, 1680 bp, Arabidopsis thaliana
  misc_feature (1)..(1680): Ceres Seq. ID no. 4945606
atgggattttcattttcttcaaaccgttttggttacttgacagtcacattccttctcgttatctcttgtcttctgttgggtttcttcacgaatcctgttgattcaagtgctctaagacctaaatcagagcatgattgtagtgccctgaagcactttcatgactacaaatcaaagtgtgcttacctgaaatcgattgatccatgtgctagtcaaggtttcttcgattacctctcttttctctactgtaatttcgaaggtttcccaattttgggtcagtttcttctcttcctctggttgcttctcttgttctatctattgggtcatacggcctctgagtacttttgttcatctcttgaaagtctctcaaagctgcttaatttgtcaccaactgttgctggtgttactcttttgtcgcttggtaatggtgctcctgatttgtttgcaagtttggtctctttcatgggagaatctaaaggtacttatgatgttggtctcaacactgttgtgggaggttctggttttgttacctgtgttgttgttgggatcattagcatttcgttgcataagagacgtgtgaggattgagagagctgcgtttataagagacatttgcttcttctgtgctgctattggttctttggctttgattttggtctatggaaagatcaatttctggggtgctcttgggttttgttcattgtatgctgtttatgttgcctttgtggttctctcttggagatttggtggagatcaaggtgctgaatctgatcttgagtcaatccataagcgtggtagtcttagtgaaccaatcttgcagagagacggtcttgaggaaattgaagatggtgttgttaatggagagcatcagattgttgatgatgatgatgatcaccagagatattattactggaaaagattggtcatttgggctatcactctgcctctcaacttgccaaggatattaacaattcctgtagtgagtgaagacaaatggtctaaaccattagctgttgcctcggtcacatttgccccggttctgttgtcgtttttatggaactggaagcggaaaccgacgagttttgaggcgggggttgtttatctcatcgggtgtttgatcggtatagctcttggtttcattgcaggagccacgacgaagaaattaaccccaccaaagaaatggttgttgccttggttagcaggagggtttgtaatgagcatgacatggagttacatatcagcacaagagctagttgcgcttttgacctcactaggatacattttcggtgtaagcccttcgatcttaggcttaacggtcctcgcttggggtaattcaattggagatctaataaccaacttgacaatggcgctacacgatgggaacgaaggagctcaagtggctgtatcgggatgttacgccggtccgatcttcaatacattgtttgctctcgggatatcgcttgtgggatgtgcatgggaggcttatccgttgagcattgtgattaagacagatcctcgtttgttggagagtcttggatttctggtcgcaggactggtatggtcgttcttggttctgtttagtaaccgtatgaggcttggtggtgtgatgggcatagggcttttggttatttacttggcttcattgtctctaagaattatgcaaaccgttggagatgctcactaa

SEQ ID NO: 72751 - protein, 559 aa, Arabidopsis thaliana
  peptide (1)..(559): Ceres Seq. ID no. 4945607
  misc_feature (407)..(550): Pfam Name: Sodium/calcium exchanger protein Pfam Description: Sodium/calcium exchanger protein
  misc_feature (1)..(559): Homolog of NCBI NO: 15238663 NR Description: potassium-dependent sodium-calcium exchanger -
  misc_feature (4)..(556): Homolog of NCBI NO: 15238665 NR Description: potassium-dependent sodium-calcium exchanger - protein; protein id: At5g17860.1, supported by cDNA: gi_18087574 thaliana] >gi|10177887|dbj|BAB11219.1| contains similarity to
  misc_feature (4)..(556): Homolog of NCBI NO: 18087575 NR Description: AT5g17860/MVA3_210 [Arabidopsis thaliana]
  misc_feature (314)..(556): Homolog of NCBI NO: 18404796 NR Description: unknown protein; protein id: At1g54115.1
  misc_feature (35)..(241): Homolog of NCBI NO: 18404796 NR Description: unknown protein; protein id: At1g54115.1
  misc_feature (311)..(556): Homolog of NCBI NO: 18400266 NR Description: similar to potassium-dependent sodium-calcium
  misc_feature (34)..(242): Homolog of NCBI NO: 18400266 NR Description: similar to potassium-dependent sodium-calcium
  misc_feature (292)..(556): Homolog of NCBI NO: 24960738 NR Description: Putative potassium-dependent sodium-calcium
  misc_feature (46)..(242): Homolog of NCBI NO: 24960738 NR Description: Putative potassium-dependent sodium-calcium
  misc_feature (35)..(556): Homolog of NCBI NO: 18483233 NR Description: K-exchanger-like protein [Sorghum bicolor]
MGFSFSSNRFGYLTVTFLLVISCLLLGFFTNPVDSSALRPKSEHDCSALKHFHDYKSKCAYLKSIDPCASQGFFDYLSFLYCNFEGFPILGQFLLFLWLLLLFYLLGHTASEYFCSSLESLSKLLNLSPTVAGVTLLSLGNGAPDLFASLVSFMGESKGTYDVGLNTVVGGSGFVTCVVVGIISISLHKRRVRIERAAFIRDICFFCAAIGSLALILVYGKINFWGALGFCSLYAVYVAFVVLSWRFGGDQGAESDLESIHKRGSLSEPILQRDGLEEIEDGVVNGEHQIVDDDDDHQRYYYWKRLVIWAITLPLNLPRILTIPVVSEDKWSKPLAVASVTFAPVLLSFLWNWKRKPTSFEAGVVYLIGCLIGIALGFIAGATTKKLTPPKKWLLPWLAGGFVMSMTWSYISAQELVALLTSLGYIFGVSPSILGLTVLAWGNSIGDLITNLTMALHDGNEGAQVAVSGCYAGPIFNTLFALGISLVGCAWEAYPLSIVIKTDPRLLESLGFLVAGLVWSFLVLFSNRMRLGGVMGIGLLVIYLASLSLRIMQTVGDAH

SEQ ID NO: 72752 - protein, 406 aa, Arabidopsis thaliana
  peptide (1)..(406): Ceres Seq. ID no. 4945608
  misc_feature (254)..(397): Pfam Name: Sodium/calcium exchanger protein Pfam Description: Sodium/calcium exchanger protein
  misc_feature (1)..(406): Homolog of NCBI NO: 15238663 NR Description: potassium-dependent sodium-calcium exchanger -
  misc_feature (1)..(403): Homolog of NCBI NO: 15238665 NR Description: potassium-dependent sodium-calcium exchanger - protein; protein id: At5g17860.1, supported by cDNA: gi_18087574 thaliana] >gi|10177887|dbj|BAB11219.1| contains similarity to
  misc_feature (1)..(403): Homolog of NCBI NO: 18087575 NR Description: AT5g17860/MVA3_210 [Arabidopsis thaliana]
  misc_feature (161)..(403): Homolog of NCBI NO: 18404796 NR Description: unknown protein; protein id: At1g54115.1
  misc_feature (1)..(88): Homolog of NCBI NO: 18404796 NR Description: unknown protein; protein id: At1g54115.1
  misc_feature (158)..(403): Homolog of NCBI NO: 18400266 NR Description: similar to potassium-dependent sodium-calcium
  misc_feature (1)..(89): Homolog of NCBI NO: 18400266 NR Description: similar to potassium-dependent sodium-calcium
  misc_feature (139)..(403): Homolog of NCBI NO: 24960738 NR Description: Putative potassium-dependent sodium-calcium
  misc_feature (1)..(89): Homolog of NCBI NO: 24960738 NR Description: Putative potassium-dependent sodium-calcium
  misc_feature (1)..(403): Homolog of NCBI NO: 18483233 NR Description: K-exchanger-like protein [Sorghum bicolor]
MGESKGTYDVGLNTVVGGSGFVTCVVVGIISISLHKRRVRIERAAFIRDICFFCAAIGSLALILVYGKINFWGALGFCSLYAVYVAFVVLSWRFGGDQGAESDLESIHKRGSLSEPILQRDGLEEIEDGVVNGEHQIVDDDDDHQRYYYWKRLVIWAITLPLNLPRILTIPVVSEDKWSKPLAVASVTFAPVLLSFLWNWKRKPTSFEAGVVYLIGCLIGIALGFIAGATTKKLTPPKKWLLPWLAGGFVMSMTWSYISAQELVALLTSLGYIFGVSPSILGLTVLAWGNSIGDLITNLTMALHDGNEGAQVAVSGCYAGPIFNTLFALGISLVGCAWEAYPLSIVIKTDPRLLESLGFLVAGLVWSFLVLFSNRMRLGGVMGIGLLVIYLASLSLRIMQTVGDAH

SEQ ID NO: 72753 - DNA, 1257 bp, Arabidopsis thaliana
  misc_feature (1)..(1257): Ceres Seq. ID no. 4945794
  misc_feature: MA Experiment ID: 20001557 Result: Down-regulated in Transcription
  misc_feature: MA Experiment 20001557 PARAMETER Experiment Name: At_Drought_Soil_Dry_P Parameter: Age (day) Value: 27
  misc_feature: MA Experiment 20001557 PARAMETER Experiment Name: At_Drought_Soil_Dry_P Parameter: Organism Value: A. thaliana
  misc_feature: MA Experiment 20001557 PARAMETER Experiment Name: At_Drought_Soil_Dry_P Parameter: Plant Line Value: WS
  misc_feature: MA Experiment 20001557 PARAMETER Experiment Name: At_Drought_Soil_Dry_P Parameter: Post Timepoint (hr) Value: 3
  misc_feature: MA Experiment 20001557 PARAMETER Experiment Name: At_Drought_Soil_Dry_P Parameter: Post-Treatment Value: Re-Water vs. No Drought
  misc_feature: MA Experiment 20001557 PARAMETER Experiment Name: At_Drought_Soil_Dry_P Parameter: Timepoint (day) Value: 13
  misc_feature: MA Experiment 20001557 PARAMETER Experiment Name: At_Drought_Soil_Dry_P Parameter: Treatment Value: Drought vs. No Drought
  misc_feature: MA Experiment ID: 20001558 Result: Down-regulated in Transcription
  misc_feature: MA Experiment 20001558 PARAMETER Experiment Name: At_Drought_Soil_Dry_P Parameter: Age (day) Value: 27
  misc_feature: MA Experiment 20001558 PARAMETER Experiment Name: At_Drought_Soil_Dry_P Parameter: Organism Value: A. thaliana
  misc_feature: MA Experiment 20001558 PARAMETER Experiment Name: At_Drought_Soil_Dry_P Parameter: Plant Line Value: WS
  misc_feature: MA Experiment 20001558 PARAMETER Experiment Name: At_Drought_Soil_Dry_P Parameter: Post Timepoint (hr) Value: 6
  misc_feature: MA Experiment 20001558 PARAMETER Experiment Name: At_Drought_Soil_Dry_P Parameter: Post-Treatment Value: Re-Water vs. No Drought
  misc_feature: MA Experiment 20001558 PARAMETER Experiment Name: At_Drought_Soil_Dry_P Parameter: Timepoint (day) Value: 13
  misc_feature: MA Experiment 20001558 PARAMETER Experiment Name: At_Drought_Soil_Dry_P Parameter: Treatment Value: Drought vs. No Drought
  misc_feature: MA Experiment ID: 20001905 Result: Down-regulated in Transcription
  misc_feature: MA Experiment 20001905 PARAMETER Experiment Name: At_Drought_Reproduction_P Parameter: Age (day) Value: 40
  misc_feature: MA Experiment 20001905 PARAMETER Experiment Name: At_Drought_Reproduction_P Parameter: Organism Value: A. thaliana
  misc_feature: MA Experiment 20001905 PARAMETER Experiment Name: At_Drought_Reproduction_P Parameter: Plant Line Value: WS
  misc_feature: MA Experiment 20001905 PARAMETER Experiment Name: At_Drought_Reproduction_P Parameter: Timepoint (day) Value: 10
  misc_feature: MA Experiment 20001905 PARAMETER Experiment Name: At_Drought_Reproduction_P Parameter: Tissue Value: Rosettes
  misc_feature: MA Experiment 20001905 PARAMETER Experiment Name: At_Drought_Reproduction_P Parameter: Treatment Value: Drought vs. No Drought
atggaaggctcttcaattcaaccgcccagaaattttgttctcgctaaagattcttctactggttcttcttcttcttcttcttcttctcagtatgaggttttaatcaatgattgttatcaggttaaagaacaatctgttgaagatgtatccagatctcagccaagtggaagccaattggatgtttctatccaaataccaccaaaaccgacgcctagtttaggaattttgagaaatctgagtctgaaaaggaaagcttctctaccaaactatgagagaagattgctactaagtcctagtgtttcagaaaccagtgaaaagcctcttgttgcaagtccgatcacatcgccttactggaaaaggtgtttgtcacttccttctagtaattctgctaaactgtctctggttgtatctacaacgcctgtttccgctgtggtgcatagtgaacagcctaagtctaataaagatggtcttcatgcatctgtttcaagatccttgtccatgaacagagtgattgtacgagctgtctcttttgacgacaacaaaaatcacatttcaaatgaagcaaatggcgatcaaatcactccagttcctgcagaagaaacagaagaagaaattcctgaagaagaagcagtatgcaggatttgtcttgatgtgtgcgaagaaggtaacacactgaaaatggaatgcagttgcaaaggtgacctcagacttgttcacgagcattgtgccattaagtggtttagtacaaaaggaacacgaatctgcgatgtatgcagacaagaagtccggaacttaccagtgatactcctccgtgtcccaacaattaatcaacttaccaatagacgggaactcactcagcagagttcagagccacaaagcatcagtgttgggcaagagtttgtagtgcttgtactcatcagcaccgtctgctacttcttcttccttgaacatttactggcaatatttgttgcagcgccattttcattcacccttgcactcttagcctcaacttttgccgtcatcctcgcgatcagagaatacatatggacatacgcagctcttgagtttgcactagtggcattgcttgttcatctattatatgctacagtaagtaatactaaaccggatactgggtttcgggatggcaatgtgcttaaacttgttgtgcatttgttattcctctcggcctgtgcggtttccgcggaatacaaacttagtataaagatagtctcttctgttcttaaagttcggatttga

SEQ ID NO: 72754 - protein, 418 aa, Arabidopsis thaliana
  peptide (1)..(418): Ceres Seq. ID no. 4945795
  misc_feature (212)..(258): Pfam Name: Zinc finger, C3HC4 type (RING finger) Pfam Description: Zinc finger, C3HC4 type (RING finger)
  misc_feature (1)..(370): Homolog of NCBI NO: 30686985 NR Description: zinc finger (C3HC4-type RING finger) protein
  misc_feature (1)..(370): Homolog of NCBI NO: 26452687 NR Description: unknown protein [Arabidopsis thaliana]
  misc_feature (1)..(370): Homolog of NCBI NO: 18397535 NR Description: expressed protein; protein id: At3g06330.1, by cDNA: 6790., supported by cDNA: gi_16226606 [Arabidopsis >gi|6437553|gb|AAF08580.1|AC011623_13 unknown protein
  misc_feature (1)..(370): Homolog of NCBI NO: 21594296 NR Description: unknown [Arabidopsis thaliana]
  misc_feature (62)..(370): Homolog of NCBI NO: 18424371 NR Description: putative protein; protein id: At5g60580.1, by cDNA: gi_13605862 [Arabidopsis thaliana] emb|CAB86085.1~gene_id:MUF9.21~similar to unknown protein
  misc_feature (62)..(370): Homolog of NCBI NO: 30697388 NR Description: zinc finger (C3HC4-type RING finger) protein
  misc_feature (45)..(367): Homolog of NCBI NO: 32489688 NR Description: OSJNBb0004G23.1 [Oryza sativa (japonica
  misc_feature (95)..(370): Homolog of NCBI NO: 18398630 NR Description: expressed protein; protein id: At3g09760.1, by cDNA: gi_15809926 [Arabidopsis thaliana] At3g09760/F8A24.19 [Arabidopsis thaliana]
  misc_feature (153)..(370): Homolog of NCBI NO: 9757769 NR Description: gene_id:MOK16.9~unknown protein [Arabidopsis
  misc_feature (153)..(370): Homolog of NCBI NO: 11290062 NR Description: hypothetical protein F15A17.210 - Arabidopsis >gi|7413595|emb|CAB86085.1| putative protein [Arabidopsis
MEGSSIQPPRNFVLAKDSSTGSSSSSSSSQYEVLINDCYQVKEQSVEDVSRSQPSGSQLDVSIQIPPKPTPSLGILRNLSLKRKASLPNYERRLLLSPSVSETSEKPLVASPITSPYWKRCLSLPSSNSAKLSLVVSTTPVSAVVHSEQPKSNKDGLHASVSRSLSMNRVIVRAVSFDDNKNHISNEANGDQITPVPAEETEEEIPEEEAVCRICLDVCEEGNTLKMECSCKGDLRLVHEHCAIKWFSTKGTRICDVCRQEVRNLPVILLRVPTINQLTNRRELTQQSSEPQSISVGQEFVVLVLISTVCYFFFLEHLLAIFVAAPFSFTLALLASTFAVILAIREYIWTYAALEFALVALLVHLLYATVSNTKPDTGFRDGNVLKLVVHLLFLSACAVSAEYKLSIKIVSSVLKVRI

SEQ ID NO: 72755 - protein, 252 aa, Arabidopsis thaliana
  peptide (1)..(252): Ceres Seq. ID no. 4945796
  misc_feature (46)..(92): Pfam Name: Zinc finger, C3HC4 type (RING finger) Pfam Description: Zinc finger, C3HC4 type (RING finger)
  misc_feature (1)..(204): Homolog of NCBI NO: 30686985 NR Description: zinc finger (C3HC4-type RING finger) protein
  misc_feature (1)..(204): Homolog of NCBI NO: 26452687 NR Description: unknown protein [Arabidopsis thaliana]
  misc_feature (1)..(204): Homolog of NCBI NO: 18397535 NR Description: expressed protein; protein id: At3g06330.1, by cDNA: 6790., supported by cDNA: gi_16226606 [Arabidopsis >gi|6437553|gb|AAF08580.1|AC011623_13 unknown protein
  misc_feature (1)..(204): Homolog of NCBI NO: 21594296 NR Description: unknown [Arabidopsis thaliana]
  misc_feature (1)..(204): Homolog of NCBI NO: 18424371 NR Description: putative protein; protein id: At5g60580.1, by cDNA: gi_13605862 [Arabidopsis thaliana] emb|CAB86085.1~gene_id:MUF9.21~similar to unknown protein
  misc_feature (1)..(204): Homolog of NCBI NO: 30697388 NR Description: zinc finger (C3HC4-type RING finger) protein
  misc_feature (1)..(201): Homolog of NCBI NO: 32489688 NR Description: OSJNBb0004G23.1 [Oryza sativa (japonica
  misc_feature (1)..(204): Homolog of NCBI NO: 18398630 NR Description: expressed protein; protein id: At3g09760.1, by cDNA: gi_15809926 [Arabidopsis thaliana] At3g09760/F8A24.19 [Arabidopsis thaliana]
  misc_feature (1)..(204): Homolog of NCBI NO: 9757769 NR Description: gene_id:MOK16.9~unknown protein [Arabidopsis
  misc_feature (1)..(204): Homolog of NCBI NO: 11290062 NR Description: hypothetical protein F15A17.210 - Arabidopsis >gi|7413595|emb|CAB86085.1| putative protein [Arabidopsis
MNRVIVRAVSFDDNKNHISNEANGDQITPVPAEETEEEIPEEEAVCRICLDVCEEGNTLKMECSCKGDLRLVHEHCAIKWFSTKGTRICDVCRQEVRNLPVILLRVPTINQLTNRRELTQQSSEPQSISVGQEFVVLVLISTVCYFFFLEHLLAIFVAAPFSFTLALLASTFAVILAIREYIWTYAALEFALVALLVHLLYATVSNTKPDTGFRDGNVLKLVVHLLFLSACAVSAEYKLSIKIVSSVLKVRI

SEQ ID NO: 72756 - DNA, 705 bp, Arabidopsis thaliana
  misc_feature (1)..(705): Ceres Seq. ID no. 4945938
  misc_feature: MA Experiment ID: 20000227 Result: Down-regulated in Transcription
  misc_feature: MA Experiment 20000227 PARAMETER Experiment Name: At_Root-Tips-vs-Tops_P Parameter: Tissue Value: Root Tips vs. Root Tops
  misc_feature: MA Experiment ID: 20000439 Result: Up-regulated in Transcription
  misc_feature: MA Experiment 20000439 PARAMETER Experiment Name: At_Roots__P Parameter: Age (day) Value: 14 vs. 21
  misc_feature: MA Experiment 20000439 PARAMETER Experiment Name: At_Roots__P Parameter: Organism Value: A. thaliana
  misc_feature: MA Experiment 20000439 PARAMETER Experiment Name: At_Roots__P Parameter: Tissue Value: Roots vs. Whole Plant
atgctgagtaggttgtcaaggcgttgctactgcacttcttctgttcatcggccatggctgtttctaggactgggcaatccaggtgacaaatacaaaggaactagacacaacattggattcgaaatgattgatgttttcgctgagtcagtggggattcaaatgaacttggtaaatttcaaggctataatgggacaaggtttcgtggcagatcttcccgtcatccttgcaaaaccgcaaacctacatgaacttgagcggtgaatcaagtggacctctcgcagcttattacaagttacctctcaatcgtgtgcttgtggttcatgatgacatgcaattgccatgtggtgttcttcgtcttcaagaaaaaggaggccatggatgtcacaacgggttaaaaagtgtaatgaaccatttccgaggcaacagggaatttgcaaggctacgaatcggaattggaaagcctccgggacaaatggacccaaaggcgttcttgttgcagaagttcagcatgccagctcgtgaacgggaattgtatttatggctccctgtgtattgtgtgtttctcggaaagatggataaagctttagcagaaggggtggatgctctgaagctcgtcttggctaaagactttggagaaagctggagattgttcaatgtggaacagaagtacaaacacttaaaacaacacacaatactatcagcttga

SEQ ID NO: 72757 - protein, 234 aa, Arabidopsis thaliana
  peptide (1)..(234): Ceres Seq. ID no. 4945939
  misc_feature (1)..(234): Homolog of NCBI NO: 30687503 NR Description: expressed protein [Arabidopsis thaliana]
  misc_feature (16)..(229): Homolog of NCBI NO: 40889732 NR Description: Chain A, Structure Of The Chloroplast Group Ii
  misc_feature (16)..(224): Homolog of NCBI NO: 6752919 NR Description: CRS2 [Zea mays]
  misc_feature (16)..(224): Homolog of NCBI NO: 40889730 NR Description: Chain A, Crystal Structure Of The Chloroplast
  misc_feature (16)..(227): Homolog of NCBI NO: 15237280 NR Description: CRS2-like protein; protein id: At5g16140.1
  misc_feature (16)..(224): Homolog of NCBI NO: 40889731 NR Description: Chain A, Structure Of The Group Ii Intron
  misc_feature (16)..(227): Homolog of NCBI NO: 15240875 NR Description: CRS2 -like protein; protein id: At5g38290.1
  misc_feature (16)..(227): Homolog of NCBI NO: 26451849 NR Description: putative CRS2 [Arabidopsis thaliana]
  misc_feature (18)..(226): Homolog of NCBI NO: 30685853 NR Description: expressed protein [Arabidopsis thaliana]
  misc_feature (18)..(226): Homolog of NCBI NO: 26453108 NR Description: unknown protein [Arabidopsis thaliana]
MLSRLSRRCYCTSSVHRPWLFLGLGNPGDKYKGTRHNIGFEMIDVFAESVGIQMNLVNFKAIMGQGFVADLPVILAKPQTYMNLSGESSGPLAAYYKLPLNRVLVVHDDMQLPCGVLRLQEKGGHGCHNGLKSVMNHFRGNREFARLRIGIGKPPGQMDPKAFLLQKFSMPARERELYLWLPVYCVFLGKMDKALAEGVDALKLVLAKDFGESWRLFNVEQKYKHLKQHTILSA

SEQ ID NO: 72758 - protein, 193 aa, Arabidopsis thaliana
  peptide (1)..(193): Ceres Seq. ID no. 4945940
  misc_feature (1)..(193): Homolog of NCBI NO: 30687503 NR Description: expressed protein [Arabidopsis thaliana]
  misc_feature (1)..(188): Homolog of NCBI NO: 40889732 NR Description: Chain A, Structure Of The Chloroplast Group Ii
  misc_feature (1)..(183): Homolog of NCBI NO: 6752919 NR Description: CRS2 [Zea mays]
  misc_feature (1)..(183): Homolog of NCBI NO: 40889730 NR Description: Chain A, Crystal Structure Of The Chloroplast
  misc_feature (1)..(186): Homolog of NCBI NO: 15237280 NR Description: CRS2-like protein; protein id: At5g16140.1
  misc_feature (1)..(183): Homolog of NCBI NO: 40889731 NR Description: Chain A, Structure Of The Group Ii Intron
  misc_feature (1)..(186): Homolog of NCBI NO: 15240875 NR Description: CRS2 -like protein; protein id: At5g38290.1
  misc_feature (1)..(186): Homolog of NCBI NO: 26451849 NR Description: putative CRS2 [Arabidopsis thaliana]
  misc_feature (1)..(185): Homolog of NCBI NO: 30685853 NR Description: expressed protein [Arabidopsis thaliana]
  misc_feature (1)..(185): Homolog of NCBI NO: 26453108 NR Description: unknown protein [Arabidopsis thaliana]
MIDVFAESVGIQMNLVNFKAIMGQGFVADLPVILAKPQTYMNLSGESSGPLAAYYKLPLNRVLVVHDDMQLPCGVLRLQEKGGHGCHNGLKSVMNHFRGNREFARLRIGIGKPPGQMDPKAFLLQKFSMPARERELYLWLPVYCVFLGKMDKALAEGVDALKLVLAKDFGESWRLFNVEQKYKHLKQHTILSA

SEQ ID NO: 72759 - protein, 181 aa, Arabidopsis thaliana
  peptide (1)..(181): Ceres Seq. ID no. 4945941
  misc_feature (1)..(181): Homolog of NCBI NO: 30687503 NR Description: expressed protein [Arabidopsis thaliana]
  misc_feature (1)..(176): Homolog of NCBI NO: 40889732 NR Description: Chain A, Structure Of The Chloroplast Group Ii
  misc_feature (1)..(171): Homolog of NCBI NO: 6752919 NR Description: CRS2 [Zea mays]
  misc_feature (1)..(171): Homolog of NCBI NO: 40889730 NR Description: Chain A, Crystal Structure Of The Chloroplast
  misc_feature (1)..(174): Homolog of NCBI NO: 15237280 NR Description: CRS2-like protein; protein id: At5g16140.1
  misc_feature (1)..(171): Homolog of NCBI NO: 40889731 NR Description: Chain A, Structure Of The Group Ii Intron
  misc_feature (1)..(174): Homolog of NCBI NO: 15240875 NR Description: CRS2 -like protein; protein id: At5g38290.1
  misc_feature (1)..(174): Homolog of NCBI NO: 26451849 NR Description: putative CRS2 [Arabidopsis thaliana]
  misc_feature (1)..(173): Homolog of NCBI NO: 30685853 NR Description: expressed protein [Arabidopsis thaliana]
  misc_feature (1)..(173): Homolog of NCBI NO: 26453108 NR Description: unknown protein [Arabidopsis thaliana]
MNLVNFKAIMGQGFVADLPVILAKPQTYMNLSGESSGPLAAYYKLPLNRVLVVHDDMQLPCGVLRLQEKGGHGCHNGLKSVMNHFRGNREFARLRIGIGKPPGQMDPKAFLLQKFSMPARERELYLWLPVYCVFLGKMDKALAEGVDALKLVLAKDFGESWRLFNVEQKYKHLKQHTILSA

SEQ ID NO: 72760 - DNA, 1803 bp, Arabidopsis thaliana
  misc_feature (1)..(1803): Ceres Seq. ID no. 4945965
  misc_feature: MA Experiment ID: 20000315 Result: Down-regulated in Transcription
  misc_feature: MA Experiment 20000315 PARAMETER Experiment Name: At_14day_Shoots-Roots_Sub_P Parameter: Age (day) Value: 14
  misc_feature: MA Experiment 20000315 PARAMETER Experiment Name: At_14day_Shoots-Roots_Sub_P Parameter: Organism Value: A. thaliana
  misc_feature: MA Experiment 20000315 PARAMETER Experiment Name: At_14day_Shoots-Roots_Sub_P Parameter: Plant Line Value: WS
  misc_feature: MA Experiment 20000315 PARAMETER Experiment Name: At_14day_Shoots-Roots_Sub_P Parameter: Tissue Value: Shoots vs. Whole Plant
  misc_feature: MA Experiment ID: 20000328 Result: Down-regulated in Transcription
  misc_feature: MA Experiment 20000328 PARAMETER Experiment Name: At_42deg_Heat_Sub_P Parameter: Age (day) Value: 14
  misc_feature: MA Experiment 20000328 PARAMETER Experiment Name: At_42deg_Heat_Sub_P Parameter: Organism Value: A. thaliana
  misc_feature: MA Experiment 20000328 PARAMETER Experiment Name: At_42deg_Heat_Sub_P Parameter: Plant Line Value: WS
  misc_feature: MA Experiment 20000328 PARAMETER Experiment Name: At_42deg_Heat_Sub_P Parameter: Temperature (deg C) Value: 42 vs. 22
  misc_feature: MA Experiment 20000328 PARAMETER Experiment Name: At_42deg_Heat_Sub_P Parameter: Timepoint (hr) Value: 6
  misc_feature: MA Experiment 20000328 PARAMETER Experiment Name: At_42deg_Heat_Sub_P Parameter: Tissue Value: Aerial
atggaggttagatctgagctccgaaaacagtcacgaagtggaaagaggaaatgggctattttagttgggattgtggctcttactcatatcttgttattactttcatatggtgacgccttaagatatctgttgcctgatggtagaagactgaaacttcccaatgagaacaatgcgttgttgatgactccatcacgaaacacacttgcggttaacgtttctgaggattctgcagtctcggggattcatgtcttggagaaaaatgggtatgtttcaggttttggtctaaggaatgagtctgaggatgatgaagggtttgttggaaatgttgattttgagagctttgaagatgtgaaagacagtatcatcatcaaagaagttgctggaagcagtgataatctttttccttcagagactactgtaatgcaaaaggagagtgtttcaacgagtaataatggttatcaggtgcaaaatgtgacggttcaaagtcagaagaacgtcaaaagctctattttaagtgggggctcctccattgctagtcctgcatctggaaatagttccttgcttgtttctaagaaagtaagtaagaagaagaaaatgcggtgtgatcttccaccaaaatctgtgacaacaatagatgagatgaatcggatattagcaaggcaccgtagaacttcacgagcaatggagatattgactgcaaggaaggagatagagaatgctccggttgcaaaacttgaacgggagctctaccctccaatattccgtaatgtttccctgtttaaaaggagttacgaacttatggaacggatactcaaagtttacgtatataaggaagggaaccgccccatctttcatactccgatactcaagggattgtatgcatcagagggatggttcatgaagttgatggaaggaaacaagcagtacactgtaaaggacccaagaaaggctcacttgtactatatgccatttagtgcacggatgctagaatacacactttatgtgcgtaattctcacaaccgcactaacctacgccagtttcttaaggaatatacggagcacatcagttccaagtaccctttcttcaatagaaccgatggagccgatcattttcttgttgcttgtcatgattgggcaccatatgagactaggcaccacatggagcattgcattaaagctttatgcaatgcagacgtaaccgcaggctttaagattggaagagacatctcactccctgaaacatatgtcagagccgccaaaaatccgcttcgtgatttgggtggaaaaccgccgtctcagaggcggaccctggctttctatgctggaagcatgcacggttacttacgtcagattctgctacagcattggaaagacaaagacccggacatgaaaatcttcgggcgaatgccatttggtgtggcgagcaagatgaattacatcgagcagatgaaaagcagcaagtactgcatttgtcctaaagggtacgaagtcaacagcccgagggtggttgaatcgattttctatgagtgtgtccctgtgatcatctccgacaactttgtgccacctttcttcgaggttcttgattggagtgcgttctcggtcattgttgcggagaaagacatcccgaggttgaaagatatcttgttatcaataccagaagacaaatacgtgaagatgcaaatggcggtgagaaaggcgcaaaggcactttctgtggcatgctaaacctgagaaatatgatctgtttcatatggttttgcattctatttggtataacagagtgttccaagcaaagcgtagatga

SEQ ID NO: 72761 - protein, 600 aa, Arabidopsis thaliana
  peptide (1)..(600): Ceres Seq. ID no. 4945966
  misc_feature (273)..(563): Pfam Name: Exostosin family Pfam Description: Exostosin family
  misc_feature (198)..(596): Homolog of NCBI NO: 15239502 NR Description: putative protein; protein id: At5g25820.1
  misc_feature (137)..(596): Homolog of NCBI NO: 15233924 NR Description: putative protein; protein id: At4g32790.1
  misc_feature (132)..(596): Homolog of NCBI NO: 30683790 NR Description: expressed protein [Arabidopsis thaliana] unknown protein [Arabidopsis thaliana]
  misc_feature (204)..(596): Homolog of NCBI NO: 15239118 NR Description: putative protein; protein id: At5g11610.1
  misc_feature (204)..(596): Homolog of NCBI NO: 26450497 NR Description: unknown protein [Arabidopsis thaliana]
  misc_feature (124)..(600): Homolog of NCBI NO: 9758523 NR Description: contains similarity to limonene
  misc_feature (233)..(596): Homolog of NCBI NO: 34911614 NR Description: limonene cyclase-like protein [Oryza sativa
  misc_feature (63)..(576): Homolog of NCBI NO: 15239475 NR Description: putative protein; protein id: At5g37000.1
  misc_feature (132)..(596): Homolog of NCBI NO: 7488129 NR Description: probable limonene cyclase - Arabidopsis thaliana limonene cyclase like protein [Arabidopsis thaliana]
  misc_feature (361)..(596): Homolog of NCBI NO: 34894122 NR Description: P0005A05.26 [Oryza sativa (japonica
MEVRSELRKQSRSGKRKWAILVGIVALTHILLLLSYGDALRYLLPDGRRLKLPNENNALLMTPSRNTLAVNVSEDSAVSGIHVLEKNGYVSGFGLRNESEDDEGFVGNVDFESFEDVKDSIIIKEVAGSSDNLFPSETTVMQKESVSTSNNGYQVQNVTVQSQKNVKSSILSGGSSIASPASGNSSLLVSKKVSKKKKMRCDLPPKSVTTIDEMNRILARHRRTSRAMEILTARKEIENAPVAKLERELYPPIFRNVSLFKRSYELMERILKVYVYKEGNRPIFHTPILKGLYASEGWFMKLMEGNKQYTVKDPRKAHLYYMPFSARMLEYTLYVRNSHNRTNLRQFLKEYTEHISSKYPFFNRTDGADHFLVACHDWAPYETRHHMEHCIKALCNADVTAGFKIGRDISLPETYVRAAKNPLRDLGGKPPSQRRTLAFYAGSMHGYLRQILLQHWKDKDPDMKIFGRMPFGVASKMNYIEQMKSSKYCICPKGYEVNSPRVVESIFYECVPVIISDNFVPPFFEVLDWSAFSVIVAEKDIPRLKDILLSIPEDKYVKMQMAVRKAQRHFLWHAKPEKYDLFHMVLHSIWYNRVFQAKRR

SEQ ID NO: 72762 - protein, 540 aa, Arabidopsis thaliana
  peptide (1)..(540): Ceres Seq. ID no. 4945967
  misc_feature (213)..(503): Pfam Name: Exostosin family Pfam Description: Exostosin family
  misc_feature (138)..(536): Homolog of NCBI NO: 15239502 NR Description: putative protein; protein id: At5g25820.1
  misc_feature (77)..(536): Homolog of NCBI NO: 15233924 NR Description: putative protein; protein id: At4g32790.1
  misc_feature (72)..(536): Homolog of NCBI NO: 30683790 NR Description: expressed protein [Arabidopsis thaliana] unknown protein [Arabidopsis thaliana]
  misc_feature (144)..(536): Homolog of NCBI NO: 15239118 NR Description: putative protein; protein id: At5g11610.1
  misc_feature (144)..(536): Homolog of NCBI NO: 26450497 NR Description: unknown protein [Arabidopsis thaliana]
  misc_feature (64)..(540): Homolog of NCBI NO: 9758523 NR Description: contains similarity to limonene
  misc_feature (173)..(536): Homolog of NCBI NO: 34911614 NR Description: limonene cyclase-like protein [Oryza sativa
  misc_feature (3)..(516): Homolog of NCBI NO: 15239475 NR Description: putative protein; protein id: At5g37000.1
  misc_feature (72)..(536): Homolog of NCBI NO: 7488129 NR Description: probable limonene cyclase - Arabidopsis thaliana limonene cyclase like protein [Arabidopsis thaliana]
  misc_feature (301)..(536): Homolog of NCBI NO: 34894122 NR Description: P0005A05.26 [Oryza sativa (japonica
MTPSRNTLAVNVSEDSAVSGIHVLEKNGYVSGFGLRNESEDDEGFVGNVDFESFEDVKDSIIIKEVAGSSDNLFPSETTVMQKESVSTSNNGYQVQNVTVQSQKNVKSSILSGGSSIASPASGNSSLLVSKKVSKKKKMRCDLPPKSVTTIDEMNRILARHRRTSRAMEILTARKEIENAPVAKLERELYPPIFRNVSLFKRSYELMERILKVYVYKEGNRPIFHTPILKGLYASEGWFMKLMEGNKQYTVKDPRKAHLYYMPFSARMLEYTLYVRNSHNRTNLRQFLKEYTEHISSKYPFFNRTDGADHFLVACHDWAPYETRHHMEHCIKALCNADVTAGFKIGRDISLPETYVRAAKNPLRDLGGKPPSQRRTLAFYAGSMHGYLRQILLQHWKDKDPDMKIFGRMPFGVASKMNYIEQMKSSKYCICPKGYEVNSPRVVESIFYECVPVIISDNFVPPFFEVLDWSAFSVIVAEKDIPRLKDILLSIPEDKYVKMQMAVRKAQRHFLWHAKPEKYDLFHMVLHSIWYNRVFQAKRR

SEQ ID NO: 72763 - protein, 460 aa, Arabidopsis thaliana
  peptide (1)..(460): Ceres Seq. ID no. 4945968
  misc_feature (133)..(423): Pfam Name: Exostosin family Pfam Description: Exostosin family
  misc_feature (58)..(456): Homolog of NCBI NO: 15239502 NR Description: putative protein; protein id: At5g25820.1
  misc_feature (1)..(456): Homolog of NCBI NO: 15233924 NR Description: putative protein; protein id: At4g32790.1
  misc_feature (1)..(456): Homolog of NCBI NO: 30683790 NR Description: expressed protein [Arabidopsis thaliana] unknown protein [Arabidopsis thaliana]
  misc_feature (64)..(456): Homolog of NCBI NO: 15239118 NR Description: putative protein; protein id: At5g11610.1
  misc_feature (64)..(456): Homolog of NCBI NO: 26450497 NR Description: unknown protein [Arabidopsis thaliana]
  misc_feature (1)..(460): Homolog of NCBI NO: 9758523 NR Description: contains similarity to limonene
  misc_feature (93)..(456): Homolog of NCBI NO: 34911614 NR Description: limonene cyclase-like protein [Oryza sativa
  misc_feature (1)..(436): Homolog of NCBI NO: 15239475 NR Description: putative protein; protein id: At5g37000.1
  misc_feature (1)..(456): Homolog of NCBI NO: 7488129 NR Description: probable limonene cyclase - Arabidopsis thaliana limonene cyclase like protein [Arabidopsis thaliana]
  misc_feature (221)..(456): Homolog of NCBI NO: 34894122 NR Description: P0005A05.26 [Oryza sativa (japonica
MQKESVSTSNNGYQVQNVTVQSQKNVKSSILSGGSSIASPASGNSSLLVSKKVSKKKKMRCDLPPKSVTTIDEMNRILARHRRTSRAMEILTARKEIENAPVAKLERELYPPIFRNVSLFKRSYELMERILKVYVYKEGNRPIFHTPILKGLYASEGWFMKLMEGNKQYTVKDPRKAHLYYMPFSARMLEYTLYVRNSHNRTNLRQFLKEYTEHISSKYPFFNRTDGADHFLVACHDWAPYETRHHMEHCIKALCNADVTAGFKIGRDISLPETYVRAAKNPLRDLGGKPPSQRRTLAFYAGSMHGYLRQILLQHWKDKDPDMKIFGRMPFGVASKMNYIEQMKSSKYCICPKGYEVNSPRVVESIFYECVPVIISDNFVPPFFEVLDWSAFSVIVAEKDIPRLKDILLSIPEDKYVKMQMAVRKAQRHFLWHAKPEKYDLFHMVLHSIWYNRVFQAKRR

SEQ ID NO: 72764 - DNA, 2250 bp, Arabidopsis thaliana
  misc_feature (1)..(2250): Ceres Seq. ID no. 4946067
  misc_feature: MA Experiment ID: 108434 Result: Down-regulated in Transcription
  misc_feature: MA Experiment 108434 PARAMETER Experiment Name: At_Root_Tips_cDNA_P Parameter: Tissue Value: Root Tips
  misc_feature: MA Experiment ID: 108435 Result: Down-regulated in Transcription
  misc_feature: MA Experiment 108435 PARAMETER Experiment Name: At_stm_Mutants_cDNA_P Parameter: Plant Line Value: wt Landsburg vs stm
  misc_feature: MA Experiment 108435 PARAMETER Experiment Name: At_stm_Mutants_cDNA_P Parameter: Tissue Value: Shoot Apical Meristem Region
  misc_feature: MA Experiment ID: 108462 Result: Down-regulated in Transcription
  misc_feature: MA Experiment 108462 PARAMETER Experiment Name: At_Germinating_Seeds_cDNA_P Parameter: Age (day) Value: 2 vs. 0
  misc_feature: MA Experiment 108462 PARAMETER Experiment Name: At_Germinating_Seeds_cDNA_P Parameter: Tissue Value: Germinating Seeds
  misc_feature: MA Experiment ID: 108463 Result: Down-regulated in Transcription
  misc_feature: MA Experiment 108463 PARAMETER Experiment Name: At_Germinating_Seeds_cDNA_P Parameter: Age (day) Value: 3 vs. 0
  misc_feature: MA Experiment 108463 PARAMETER Experiment Name: At_Germinating_Seeds_cDNA_P Parameter: Tissue Value: Germinating Seeds
  misc_feature: MA Experiment ID: 108469 Result: Up-regulated in Transcription
  misc_feature: MA Experiment ID: 108489 Result: Up-regulated in Transcription
  misc_feature: MA Experiment ID: 108501 Result: Down-regulated in Transcription
  misc_feature: MA Experiment 108501 PARAMETER Experiment Name: At_ap2_floral_buds_cDNA_P Parameter: Plant Line Value: ap2 (Ler.)
  misc_feature: MA Experiment 108501 PARAMETER Experiment Name: At_ap2_floral_buds_cDNA_P Parameter: Tissue Value: Closed Flower
  misc_feature: MA Experiment ID: 108561 Result: Up-regulated in Transcription
  misc_feature: MA Experiment 108561 PARAMETER Experiment Name: At_100uM_ABA_cDNA_P Parameter: Timepoint (hr) Value: 6
  misc_feature: MA Experiment 108561 PARAMETER Experiment Name: At_100uM_ABA_cDNA_P Parameter: Tissue Value: Aerial
  misc_feature: MA Experiment 108561 PARAMETER Experiment Name: At_100uM_ABA_cDNA_P Parameter: Treatment Value: 100uM ABA vs. No Treatment
  misc_feature: MA Experiment ID: 108569 Result: Down-regulated in Transcription
  misc_feature: MA Experiment 108569 PARAMETER Experiment Name: At_0.001%_MeJA__cDNA_P Parameter: Timepoint (hr) Value: 6
  misc_feature: MA Experiment 108569 PARAMETER Experiment Name: At_0.001%_MeJA__cDNA_P Parameter: Tissue Value: Aerial
  misc_feature: MA Experiment 108569 PARAMETER Experiment Name: At_0.001%_MeJA__cDNA_P Parameter: Treatment Value: 0.001% MeJA vs. No Treatment
  misc_feature: MA Experiment ID: 108573 Result: Up-regulated in Transcription
  misc_feature: MA Experiment 108573 PARAMETER Experiment Name: At_Drought_cDNA_P Parameter: Timepoint (hr) Value: 6
  misc_feature: MA Experiment 108573 PARAMETER Experiment Name: At_Drought_cDNA_P Parameter: Tissue Value: Aerial
  misc_feature: MA Experiment 108573 PARAMETER Experiment Name: At_Drought_cDNA_P Parameter: Treatment Value: Drought vs. No Drought
  misc_feature: MA Experiment ID: 108574 Result: Down-regulated in Transcription
  misc_feature: MA Experiment 108574 PARAMETER Experiment Name: At_Wounding__cDNA_P Parameter: Timepoint (hr) Value: 1
  misc_feature: MA Experiment 108574 PARAMETER Experiment Name: At_Wounding__cDNA_P Parameter: Tissue Value: Aerial
  misc_feature: MA Experiment 108574 PARAMETER Experiment Name: At_Wounding__cDNA_P Parameter: Treatment Value: Wounding vs. No Wounding
  misc_feature: MA Experiment ID: 108577 Result: Down-regulated in Transcription
  misc_feature: MA Experiment 108577 PARAMETER Experiment Name: At_42deg_Heat_cDNA_P Parameter: Temperature (deg C) Value: 42 vs. 22
  misc_feature: MA Experiment 108577 PARAMETER Experiment Name: At_42deg_Heat_cDNA_P Parameter: Timepoint (hr) Value: 6
  misc_feature: MA Experiment 108577 PARAMETER Experiment Name: At_42deg_Heat_cDNA_P Parameter: Tissue Value: Aerial
  misc_feature: MA Experiment ID: 108579 Result: Down-regulated in Transcription
  misc_feature: MA Experiment 108579 PARAMETER Experiment Name: At_4deg_Cold_cDNA_P Parameter: Temperature (deg C) Value: 4 vs. 22
  misc_feature: MA Experiment 108579 PARAMETER Experiment Name: At_4deg_Cold_cDNA_P Parameter: Timepoint (hr) Value: 6
  misc_feature: MA Experiment 108579 PARAMETER Experiment Name: At_4deg_Cold_cDNA_P Parameter: Tissue Value: Aerial
  misc_feature: MA Experiment ID: 108585 Result: Up-regulated in Transcription
  misc_feature: MA Experiment 108585 PARAMETER Experiment Name: At_5mM_NaNP_cDNA_P Parameter: Timepoint (hr) Value: 6
  misc_feature: MA Experiment 108585 PARAMETER Experiment Name: At_5mM_NaNP_cDNA_P Parameter: Tissue Value: Aerial
  misc_feature: MA Experiment 108585 PARAMETER Experiment Name: At_5mM_NaNP_cDNA_P Parameter: Treatment Value: null
  misc_feature: MA Experiment ID: 108594 Result: Up-regulated in Transcription
  misc_feature: MA Experiment 108594 PARAMETER Experiment Name: At_Ler-rhl_Root_cDNA_P Parameter: Plant Line Value: null
  misc_feature: MA Experiment ID: 108595 Result: Down-regulated in Transcription
  misc_feature: MA Experiment 108595 PARAMETER Experiment Name: At_Ler-pi_Ovule_cDNA_P Parameter: Plant Line Value: null
  misc_feature: MA Experiment ID: 108608 Result: Down-regulated in Transcription
  misc_feature: MA Experiment 108608 PARAMETER Experiment Name: At_100uM_ABA_cDNA_P Parameter: Timepoint (hr) Value: 1
  misc_feature: MA Experiment 108608 PARAMETER Experiment Name: At_100uM_ABA_cDNA_P Parameter: Tissue Value: Aerial
  misc_feature: MA Experiment 108608 PARAMETER Experiment Name: At_100uM_ABA_cDNA_P Parameter: Treatment Value: 100uM ABA vs. No Treatment
  misc_feature: MA Experiment ID: 20000087 Result: Up-regulated in Transcription
  misc_feature: MA Experiment 20000087 PARAMETER Experiment Name: At_100uM_ABA_Mutants_cDNA_P Parameter: Plant Line Value: WS
  misc_feature: MA Experiment 20000087 PARAMETER Experiment Name: At_100uM_ABA_Mutants_cDNA_P Parameter: Timepoint (hr) Value: 6
  misc_feature: MA Experiment 20000087 PARAMETER Experiment Name: At_100uM_ABA_Mutants_cDNA_P Parameter: Tissue Value: Aerial
  misc_feature: MA Experiment 20000087 PARAMETER Experiment Name: At_100uM_ABA_Mutants_cDNA_P Parameter: Treatment Value: 100uM ABA vs. No Treatment
  misc_feature: MA Experiment ID: 20000089 Result: Up-regulated in Transcription
  misc_feature: MA Experiment ID: 20000090 Result: Up-regulated in Transcription
  misc_feature: MA Experiment ID: 20000166 Result: Down-regulated in Transcription
  misc_feature: MA Experiment 20000166 PARAMETER Experiment Name: At_100uM_ABA_P Parameter: Age (day) Value: 14
  misc_feature: MA Experiment 20000166 PARAMETER Experiment Name: At_100uM_ABA_P Parameter: Organism Value: A. thaliana
  misc_feature: MA Experiment 20000166 PARAMETER Experiment Name: At_100uM_ABA_P Parameter: Plant Line Value: WS
  misc_feature: MA Experiment 20000166 PARAMETER Experiment Name: At_100uM_ABA_P Parameter: Timepoint (hr) Value: 1
  misc_feature: MA Experiment 20000166 PARAMETER Experiment Name: At_100uM_ABA_P Parameter: Tissue Value: Aerial
  misc_feature: MA Experiment 20000166 PARAMETER Experiment Name: At_100uM_ABA_P Parameter: Treatment Value: 100uM ABA vs. No Treatment
  misc_feature: MA Experiment ID: 20000185 Result: Down-regulated in Transcription
  misc_feature: MA Experiment 20000185 PARAMETER Experiment Name: At_Roots__P Parameter: Age (day) Value: 7 vs. 21
  misc_feature: MA Experiment 20000185 PARAMETER Experiment Name: At_Roots__P Parameter: Organism Value: A. thaliana
  misc_feature: MA Experiment 20000185 PARAMETER Experiment Name: At_Roots__P Parameter: Tissue Value: Roots vs. Whole Plant
  misc_feature: MA Experiment ID: 20000227 Result: Down-regulated in Transcription
  misc_feature: MA Experiment 20000227 PARAMETER Experiment Name: At_Root-Tips-vs-Tops_P Parameter: Tissue Value: Root Tips vs. Root Tops
  misc_feature: MA Experiment ID: 20000234 Result: Down-regulated in Transcription
  misc_feature: MA Experiment 20000234 PARAMETER Experiment Name: At_Siliques_P Parameter: Age (day) Value: 21
  misc_feature: MA Experiment 20000234 PARAMETER Experiment Name: At_Siliques_P Parameter: Organism Value: A. thaliana
  misc_feature: MA Experiment 20000234 PARAMETER Experiment Name: At_Siliques_P Parameter: Plant Line Value: WS
  misc_feature: MA Experiment 20000234 PARAMETER Experiment Name: At_Siliques_P Parameter: Tissue Value: Less Than 5mm Siliques vs. Whole Plant
  misc_feature: MA Experiment ID: 20000264 Result: Down-regulated in Transcription
  misc_feature: MA Experiment 20000264 PARAMETER Experiment Name: At_Open_Flower_P Parameter: Age (day) Value: 21
  misc_feature: MA Experiment 20000264 PARAMETER Experiment Name: At_Open_Flower_P Parameter: Plant Line Value: WS
  misc_feature: MA Experiment 20000264 PARAMETER Experiment Name: At_Open_Flower_P Parameter: Tissue Value: Open Flower vs. Whole Plant
  misc_feature: MA Experiment ID: 20000265 Result: Down-regulated in Transcription
  misc_feature: MA Experiment 20000265 PARAMETER Experiment Name: At_Open_Flower_P Parameter: Age (day) Value: 21
  misc_feature: MA Experiment 20000265 PARAMETER Experiment Name: At_Open_Flower_P Parameter: Plant Line Value: WS
  misc_feature: MA Experiment 20000265 PARAMETER Experiment Name: At_Open_Flower_P Parameter: Tissue Value: Closed Flower vs. Whole Plant
  misc_feature: MA Experiment ID: 20000268 Result: Down-regulated in Transcription
  misc_feature: MA Experiment 20000268 PARAMETER Experiment Name: At_100mM_NaCl__P Parameter: Age (day) Value: 14
  misc_feature: MA Experiment 20000268 PARAMETER Experiment Name: At_100mM_NaCl__P Parameter: Organism Value: A. thaliana
  misc_feature: MA Experiment 20000268 PARAMETER Experiment Name: At_100mM_NaCl__P Parameter: Plant Line Value: WS
  misc_feature: MA Experiment 20000268 PARAMETER Experiment Name: At_100mM_NaCl__P Parameter: Timepoint (hr) Value: 6
  misc_feature: MA Experiment 20000268 PARAMETER Experiment Name: At_100mM_NaCl__P Parameter: Tissue Value: Whole Plant
  misc_feature: MA Experiment 20000268 PARAMETER Experiment Name: At_100mM_NaCl__P Parameter: Treatment Value: 100mM NaCl vs. No Treatment
  misc_feature: MA Experiment ID: 20000286 Result: Down-regulated in Transcription
  misc_feature: MA Experiment 20000286 PARAMETER Experiment Name: At_Open_Flower_P Parameter: Age (day) Value: 21
  misc_feature: MA Experiment 20000286 PARAMETER Experiment Name: At_Open_Flower_P Parameter: Plant Line Value: WS
  misc_feature: MA Experiment 20000286 PARAMETER Experiment Name: At_Open_Flower_P Parameter: Tissue Value: Half Open vs. Whole Plant
  misc_feature: MA Experiment ID: 20000308 Result: Down-regulated in Transcription
  misc_feature: MA Experiment 20000308 PARAMETER Experiment Name: At_100mM_NaCl__P Parameter: Age (day) Value: 17
  misc_feature: MA Experiment 20000308 PARAMETER Experiment Name: At_100mM_NaCl__P Parameter: Organism Value: A. thaliana
  misc_feature: MA Experiment 20000308 PARAMETER Experiment Name: At_100mM_NaCl__P Parameter: Plant Line Value: WS
  misc_feature: MA Experiment 20000308 PARAMETER Experiment Name: At_100mM_NaCl__P Parameter: Timepoint (hr) Value: 72
  misc_feature: MA Experiment 20000308 PARAMETER Experiment Name: At_100mM_NaCl__P Parameter: Tissue Value: Whole Plant
  misc_feature: MA Experiment 20000308 PARAMETER Experiment Name: At_100mM_NaCl__P Parameter: Treatment Value: 100mM NaCl vs. No Treatment
  misc_feature: MA Experiment ID: 20000437 Result: Down-regulated in Transcription
  misc_feature: MA Experiment 20000437 PARAMETER Experiment Name: At_Drought_P Parameter: Age (day) Value: 8
  misc_feature: MA Experiment 20000437 PARAMETER Experiment Name: At_Drought_P Parameter: Organism Value: A. thaliana
  misc_feature: MA Experiment 20000437 PARAMETER Experiment Name: At_Drought_P Parameter: Plant Line Value: WS
  misc_feature: MA Experiment 20000437 PARAMETER Experiment Name: At_Drought_P Parameter: Timepoint (hr) Value: 24
  misc_feature: MA Experiment 20000437 PARAMETER Experiment Name: At_Drought_P Parameter: Tissue Value: Whole Plant
  misc_feature: MA Experiment 20000437 PARAMETER Experiment Name: At_Drought_P Parameter: Treatment Value: Drought vs. No Drought
  misc_feature: MA Experiment ID: 20000438 Result: Down-regulated in Transcription
  misc_feature: MA Experiment 20000438 PARAMETER Experiment Name: At_Shoots__P Parameter: Age (day) Value: 14
  misc_feature: MA Experiment 20000438 PARAMETER Experiment Name: At_Shoots__P Parameter: Tissue Value: Shoots vs. Whole Plant
  misc_feature: MA Experiment ID: 20000439 Result: Down-regulated in Transcription
  misc_feature: MA Experiment 20000439 PARAMETER Experiment Name: At_Roots__P Parameter: Age (day) Value: 14 vs. 21
  misc_feature: MA Experiment 20000439 PARAMETER Experiment Name: At_Roots__P Parameter: Organism Value: A. thaliana
  misc_feature: MA Experiment 20000439 PARAMETER Experiment Name: At_Roots__P Parameter: Tissue Value: Roots vs. Whole Plant
  misc_feature: MA Experiment ID: 20000441 Result: Up-regulated in Transcription
  misc_feature: MA Experiment 20000441 PARAMETER Experiment Name: At_1uM_BR-BRZ__P Parameter: Tissue Value: Shoot Apices
  misc_feature: MA Experiment 20000441 PARAMETER Experiment Name: At_1uM_BR-BRZ__P Parameter: Treatment Value: 1uM BR vs. No Treatment
  misc_feature: MA Experiment ID: 20000443 Result: Up-regulated in Transcription
  misc_feature: MA Experiment 20000443 PARAMETER Experiment Name: At_1uM_BR-BRZ__P Parameter: Tissue Value: Shoot Apices
  misc_feature: MA Experiment 20000443 PARAMETER Experiment Name: At_1uM_BR-BRZ__P Parameter: Treatment Value: 1uM BRZ vs. No Treatment
  misc_feature: MA Experiment ID: 20000451 Result: Down-regulated in Transcription
  misc_feature: MA Experiment 20000451 PARAMETER Experiment Name: At_CS6879_Shoots-Roots_P Parameter: Age (day) Value: 14
  misc_feature: MA Experiment 20000451 PARAMETER Experiment Name: At_CS6879_Shoots-Roots_P Parameter: Organism Value: A. thaliana
  misc_feature: MA Experiment 20000451 PARAMETER Experiment Name: At_CS6879_Shoots-Roots_P Parameter: Plant Line Value: CS6879 vs. WS
  misc_feature: MA Experiment 20000451 PARAMETER Experiment Name: At_CS6879_Shoots-Roots_P Parameter: Tissue Value: Roots
  misc_feature: MA Experiment ID: 20000452 Result: Down-regulated in Transcription
  misc_feature: MA Experiment 20000452 PARAMETER Experiment Name: At_CS6879_Shoots-Roots_P Parameter: Age (day) Value: 14
  misc_feature: MA Experiment 20000452 PARAMETER Experiment Name: At_CS6879_Shoots-Roots_P Parameter: Organism Value: A. thaliana
  misc_feature: MA Experiment 20000452 PARAMETER Experiment Name: At_CS6879_Shoots-Roots_P Parameter: Plant Line Value: CS6879 vs. WS
  misc_feature: MA Experiment 20000452 PARAMETER Experiment Name: At_CS6879_Shoots-Roots_P Parameter: Tissue Value: Shoots
  misc_feature: MA Experiment ID: 20000455 Result: Down-regulated in Transcription
  misc_feature: MA Experiment 20000455 PARAMETER Experiment Name: At_100uM_ABA_P Parameter: Age (day) Value: 16
  misc_feature: MA Experiment 20000455 PARAMETER Experiment Name: At_100uM_ABA_P Parameter: Organism Value: A. thaliana
  misc_feature: MA Experiment 20000455 PARAMETER Experiment Name: At_100uM_ABA_P Parameter: Plant Line Value: WS
  misc_feature: MA Experiment 20000455 PARAMETER Experiment Name: At_100uM_ABA_P Parameter: Timepoint (hr) Value: 48
  misc_feature: MA Experiment 20000455 PARAMETER Experiment Name: At_100uM_ABA_P Parameter: Tissue Value: Aerial
  misc_feature: MA Experiment 20000455 PARAMETER Experiment Name: At_100uM_ABA_P Parameter: Treatment Value: 100uM ABA vs. No Treatment
  misc_feature: MA Experiment ID: 20000527 Result: Up-regulated in Transcription
  misc_feature: MA Experiment 20000527 PARAMETER Experiment Name: At_10percent_PEG_P Parameter: Age (day) Value: 20
  misc_feature: MA Experiment 20000527 PARAMETER Experiment Name: At_10percent_PEG_P Parameter: Organism Value: A. thaliana
  misc_feature: MA Experiment 20000527 PARAMETER Experiment Name: At_10percent_PEG_P Parameter: Plant Line Value: WS
  misc_feature: MA Experiment 20000527 PARAMETER Experiment Name: At_10percent_PEG_P Parameter: Timepoint (day) Value: 20
  misc_feature: MA Experiment 20000527 PARAMETER Experiment Name: At_10percent_PEG_P Parameter: Tissue Value: Whole Plant
  misc_feature: MA Experiment 20000527 PARAMETER Experiment Name: At_10percent_PEG_P Parameter: Treatment Value: 10percent PEG vs. No Treatment
  misc_feature: MA Experiment ID: 20000573 Result: Up-regulated in Transcription
  misc_feature: MA Experiment 20000573 PARAMETER Experiment Name: At_100uM_ABA_Mutants__P Parameter: Organism Value: A. thaliana
  misc_feature: MA Experiment 20000573 PARAMETER Experiment Name: At_100uM_ABA_Mutants__P Parameter: Plant Line Value: CS22 vs. Ler wt
  misc_feature: MA Experiment 20000573 PARAMETER Experiment Name: At_100uM_ABA_Mutants__P Parameter: Timepoint (hr) Value: N/A
  misc_feature: MA Experiment 20000573 PARAMETER Experiment Name: At_100uM_ABA_Mutants__P Parameter: Tissue Value: Whole Plant
  misc_feature: MA Experiment 20000573 PARAMETER Experiment Name: At_100uM_ABA_Mutants__P Parameter: Treatment Value: None
  misc_feature: MA Experiment ID: 20001247 Result: Up-regulated in Transcription
  misc_feature: MA Experiment 20001247 PARAMETER Experiment Name: At_Far-red-induction_P Parameter: Age (day) Value: 7
  misc_feature: MA Experiment 20001247 PARAMETER Experiment Name: At_Far-red-induction_P Parameter: Light Value: Far-red vs. White
  misc_feature: MA Experiment 20001247 PARAMETER Experiment Name: At_Far-red-induction_P Parameter: Organism Value: A. thaliana
  misc_feature: MA Experiment 20001247 PARAMETER Experiment Name: At_Far-red-induction_P Parameter: Plant Line Value: Columbia
  misc_feature: MA Experiment 20001247 PARAMETER Experiment Name: At_Far-red-induction_P Parameter: Timepoint (hr) Value: 1
  misc_feature: MA Experiment 20001247 PARAMETER Experiment Name: At_Far-red-induction_P Parameter: Tissue Value: Whole Plant
  misc_feature: MA Experiment ID: 20001248 Result: Up-regulated in Transcription
  misc_feature: MA Experiment 20001248 PARAMETER Experiment Name: At_Far-red-induction_P Parameter: Age (day) Value: 7
  misc_feature: MA Experiment 20001248 PARAMETER Experiment Name: At_Far-red-induction_P Parameter: Light Value: Far-red vs. White
  misc_feature: MA Experiment 20001248 PARAMETER Experiment Name: At_Far-red-induction_P Parameter: Organism Value: A. thaliana
  misc_feature: MA Experiment 20001248 PARAMETER Experiment Name: At_Far-red-induction_P Parameter: Plant Line Value: Columbia
  misc_feature: MA Experiment 20001248 PARAMETER Experiment Name: At_Far-red-induction_P Parameter: Timepoint (hr) Value: 4
  misc_feature: MA Experiment 20001248 PARAMETER Experiment Name: At_Far-red-induction_P Parameter: Tissue Value: Whole Plant
  misc_feature: MA Experiment ID: 20001450 Result: Up-regulated in Transcription
  misc_feature: MA Experiment 20001450 PARAMETER Experiment Name: At_Far-red-induction_P Parameter: Age (day) Value: 7
  misc_feature: MA Experiment 20001450 PARAMETER Experiment Name: At_Far-red-induction_P Parameter: Light Value: Far-red vs. White
  misc_feature: MA Experiment 20001450 PARAMETER Experiment Name: At_Far-red-induction_P Parameter: Organism Value: A. thaliana
  misc_feature: MA Experiment 20001450 PARAMETER Experiment Name: At_Far-red-induction_P Parameter: Plant Line Value: Columbia
  misc_feature: MA Experiment 20001450 PARAMETER Experiment Name: At_Far-red-induction_P Parameter: Timepoint (hr) Value: 8
  misc_feature: MA Experiment 20001450 PARAMETER Experiment Name: At_Far-red-induction_P Parameter: Tissue Value: Whole Plant
  misc_feature: MA Experiment ID: 20001459 Result: Down-regulated in Transcription
  misc_feature: MA Experiment 20001459 PARAMETER Experiment Name: At_50mM_NH4NO3_L-to-H_P Parameter: Age (day) Value: Undefined
  misc_feature: MA Experiment 20001459 PARAMETER Experiment Name: At_50mM_NH4NO3_L-to-H_P Parameter: Organism Value: Undefined
  misc_feature: MA Experiment 20001459 PARAMETER Experiment Name: At_50mM_NH4NO3_L-to-H_P Parameter: Plant Line Value: Undefined
  misc_feature: MA Experiment 20001459 PARAMETER Experiment Name: At_50mM_NH4NO3_L-to-H_P Parameter: Timepoint (hr) Value: 4
  misc_feature: MA Experiment 20001459 PARAMETER Experiment Name: At_50mM_NH4NO3_L-to-H_P Parameter: Tissue Value: Siliques
  misc_feature: MA Experiment 20001459 PARAMETER Experiment Name: At_50mM_NH4NO3_L-to-H_P Parameter: Treatment Value: 50mM NH4NO3 vs. 100mM Manitol
  misc_feature: MA Experiment ID: 20001554 Result: Down-regulated in Transcription
  misc_feature: MA Experiment 20001554 PARAMETER Experiment Name: At_Drought_Soil_Dry_P Parameter: Age (day) Value: 21
  misc_feature: MA Experiment 20001554 PARAMETER Experiment Name: At_Drought_Soil_Dry_P Parameter: Organism Value: A. thaliana
  misc_feature: MA Experiment 20001554 PARAMETER Experiment Name: At_Drought_Soil_Dry_P Parameter: Plant Line Value: WS
  misc_feature: MA Experiment 20001554 PARAMETER Experiment Name: At_Drought_Soil_Dry_P Parameter: Post Timepoint (hr) Value: None
  misc_feature: MA Experiment 20001554 PARAMETER Experiment Name: At_Drought_Soil_Dry_P Parameter: Post-Treatment Value: None
  misc_feature: MA Experiment 20001554 PARAMETER Experiment Name: At_Drought_Soil_Dry_P Parameter: Timepoint (day) Value: 7
  misc_feature: MA Experiment 20001554 PARAMETER Experiment Name: At_Drought_Soil_Dry_P Parameter: Treatment Value: Drought vs. No Drought
  misc_feature: MA Experiment ID: 20001555 Result: Down-regulated in Transcription
  misc_feature: MA Experiment 20001555 PARAMETER Experiment Name: At_Drought_Soil_Dry_P Parameter: Age (day) Value: 24
  misc_feature: MA Experiment 20001555 PARAMETER Experiment Name: At_Drought_Soil_Dry_P Parameter: Organism Value: A. thaliana
  misc_feature: MA Experiment 20001555 PARAMETER Experiment Name: At_Drought_Soil_Dry_P Parameter: Plant Line Value: WS
  misc_feature: MA Experiment 20001555 PARAMETER Experiment Name: At_Drought_Soil_Dry_P Parameter: Post Timepoint (hr) Value: None
  misc_feature: MA Experiment 20001555 PARAMETER Experiment Name: At_Drought_Soil_Dry_P Parameter: Post-Treatment Value: None
  misc_feature: MA Experiment 20001555 PARAMETER Experiment Name: At_Drought_Soil_Dry_P Parameter: Timepoint (day) Value: 10
  misc_feature: MA Experiment 20001555 PARAMETER Experiment Name: At_Drought_Soil_Dry_P Parameter: Treatment Value: Drought vs. No Drought
  misc_feature: MA Experiment ID: 20001556 Result: Down-regulated in Transcription
  misc_feature: MA Experiment 20001556 PARAMETER Experiment Name: At_Drought_Soil_Dry_P Parameter: Age (day) Value: 26
  misc_feature: MA Experiment 20001556 PARAMETER Experiment Name: At_Drought_Soil_Dry_P Parameter: Organism Value: A. thaliana
  misc_feature: MA Experiment 20001556 PARAMETER Experiment Name: At_Drought_Soil_Dry_P Parameter: Plant Line Value: WS
  misc_feature: MA Experiment 20001556 PARAMETER Experiment Name: At_Drought_Soil_Dry_P Parameter: Post Timepoint (hr) Value: None
  misc_feature: MA Experiment 20001556 PARAMETER Experiment Name: At_Drought_Soil_Dry_P Parameter: Post-Treatment Value: None
  misc_feature: MA Experiment 20001556 PARAMETER Experiment Name: At_Drought_Soil_Dry_P Parameter: Timepoint (day) Value: 12
  misc_feature: MA Experiment 20001556 PARAMETER Experiment Name: At_Drought_Soil_Dry_P Parameter: Treatment Value: Drought vs. No Drought
  misc_feature: MA Experiment ID: 20001559 Result: Down-regulated in Transcription
  misc_feature: MA Experiment 20001559 PARAMETER Experiment Name: At_Drought_Soil_Dry_P Parameter: Age (day) Value: 28
  misc_feature: MA Experiment 20001559 PARAMETER Experiment Name: At_Drought_Soil_Dry_P Parameter: Organism Value: A. thaliana
  misc_feature: MA Experiment 20001559 PARAMETER Experiment Name: At_Drought_Soil_Dry_P Parameter: Plant Line Value: WS
  misc_feature: MA Experiment 20001559 PARAMETER Experiment Name: At_Drought_Soil_Dry_P Parameter: Post Timepoint (hr) Value: 29
  misc_feature: MA Experiment 20001559 PARAMETER Experiment Name: At_Drought_Soil_Dry_P Parameter: Post-Treatment Value: Re-Water vs. No Drought
  misc_feature: MA Experiment 20001559 PARAMETER Experiment Name: At_Drought_Soil_Dry_P Parameter: Timepoint (day) Value: 14
  misc_feature: MA Experiment 20001559 PARAMETER Experiment Name: At_Drought_Soil_Dry_P Parameter: Treatment Value: Drought vs. No Drought
  misc_feature: MA Experiment ID: 20001560 Result: Down-regulated in Transcription
  misc_feature: MA Experiment 20001560 PARAMETER Experiment Name: At_Drought_Soil_Dry_P Parameter: Age (day) Value: 28
  misc_feature: MA Experiment 20001560 PARAMETER Experiment Name: At_Drought_Soil_Dry_P Parameter: Organism Value: A. thaliana
  misc_feature: MA Experiment 20001560 PARAMETER Experiment Name: At_Drought_Soil_Dry_P Parameter: Plant Line Value: WS
  misc_feature: MA Experiment 20001560 PARAMETER Experiment Name: At_Drought_Soil_Dry_P Parameter: Post Timepoint (hr) Value: None
  misc_feature: MA Experiment 20001560 PARAMETER Experiment Name: At_Drought_Soil_Dry_P Parameter: Post-Treatment Value: None
  misc_feature: MA Experiment 20001560 PARAMETER Experiment Name: At_Drought_Soil_Dry_P Parameter: Timepoint (day) Value: 14
  misc_feature: MA Experiment 20001560 PARAMETER Experiment Name: At_Drought_Soil_Dry_P Parameter: Treatment Value: Drought vs. No Drought
  misc_feature: MA Experiment ID: 20001755 Result: Down-regulated in Transcription
  misc_feature: MA Experiment 20001755 PARAMETER Experiment Name: At_50mM_NH4NO3_L-to-H_P Parameter: Timepoint (hr) Value: 2
  misc_feature: MA Experiment 20001755 PARAMETER Experiment Name: At_50mM_NH4NO3_L-to-H_P Parameter: Tissue Value: Leaf
  misc_feature: MA Experiment 20001755 PARAMETER Experiment Name: At_50mM_NH4NO3_L-to-H_P Parameter: Treatment Value: 50mM NH4NO3 vs 100mM Mannitol
  misc_feature: MA Experiment ID: 20001757 Result: Up-regulated in Transcription
  misc_feature: MA Experiment 20001757 PARAMETER Experiment Name: At_50mM_NH4NO3_L-to-H_P Parameter: Timepoint (hr) Value: 6
  misc_feature: MA Experiment 20001757 PARAMETER Experiment Name: At_50mM_NH4NO3_L-to-H_P Parameter: Tissue Value: Leaf
  misc_feature: MA Experiment 20001757 PARAMETER Experiment Name: At_50mM_NH4NO3_L-to-H_P Parameter: Treatment Value: 50mM NH4NO3 vs 100mM Mannitol
  misc_feature: MA Experiment ID: 20001768 Result: Down-regulated in Transcription
  misc_feature: MA Experiment 20001768 PARAMETER Experiment Name: At_Far-red-enriched-adult_P Parameter: Age (day) Value: 28
  misc_feature: MA Experiment 20001768 PARAMETER Experiment Name: At_Far-red-enriched-adult_P Parameter: Light Value: Far-red enriched vs. White
  misc_feature: MA Experiment 20001768 PARAMETER Experiment Name: At_Far-red-enriched-adult_P Parameter: Organism Value: A. thaliana
  misc_feature: MA Experiment 20001768 PARAMETER Experiment Name: At_Far-red-enriched-adult_P Parameter: Plant Line Value: Columbia
  misc_feature: MA Experiment 20001768 PARAMETER Experiment Name: At_Far-red-enriched-adult_P Parameter: Timepoint (hr) Value: 1
  misc_feature: MA Experiment 20001768 PARAMETER Experiment Name: At_Far-red-enriched-adult_P Parameter: Tissue Value: Aerial
  misc_feature: MA Experiment ID: 20001774 Result: Down-regulated in Transcription
  misc_feature: MA Experiment 20001774 PARAMETER Experiment Name: At_Far-red-enriched-adult_P Parameter: Age (day) Value: 31
  misc_feature: MA Experiment 20001774 PARAMETER Experiment Name: At_Far-red-enriched-adult_P Parameter: Light Value: Far-red enriched vs. White
  misc_feature: MA Experiment 20001774 PARAMETER Experiment Name: At_Far-red-enriched-adult_P Parameter: Organism Value: A. thaliana
  misc_feature: MA Experiment 20001774 PARAMETER Experiment Name: At_Far-red-enriched-adult_P Parameter: Plant Line Value: Columbia
  misc_feature: MA Experiment 20001774 PARAMETER Experiment Name: At_Far-red-enriched-adult_P Parameter: Timepoint (hr) Value: 72
  misc_feature: MA Experiment 20001774 PARAMETER Experiment Name: At_Far-red-enriched-adult_P Parameter: Tissue Value: Aerial
  misc_feature: MA Experiment ID: 20001906 Result: Down-regulated in Transcription
  misc_feature: MA Experiment 20001906 PARAMETER Experiment Name: At_Drought_Reproduction_P Parameter: Age (day) Value: 35
  misc_feature: MA Experiment 20001906 PARAMETER Experiment Name: At_Drought_Reproduction_P Parameter: Organism Value: A. thaliana
  misc_feature: MA Experiment 20001906 PARAMETER Experiment Name: At_Drought_Reproduction_P Parameter: Plant Line Value: WS
  misc_feature: MA Experiment 20001906 PARAMETER Experiment Name: At_Drought_Reproduction_P Parameter: Timepoint (day) Value: 5
  misc_feature: MA Experiment 20001906 PARAMETER Experiment Name: At_Drought_Reproduction_P Parameter: Tissue Value: Siliques
  misc_feature: MA Experiment 20001906 PARAMETER Experiment Name: At_Drought_Reproduction_P Parameter: Treatment Value: Drought vs. No Drought
  misc_feature: Pfam Name: Raffinose_syn Pfam Description: Raffinose synthase or seed imbibition protein Sip1
atgacgattaaaccggcggttcgtatttccgacgggaatctaatcatcaaaaaccggacgattctaaccggtgtaccagataatgtcatcacgacgtcagcatcggaagctggaccggtagaaggagtcttcgtcggagctgtatttaacaaggaagagagtaaacacatcgtaccgatcggtacgcttcgcaattcccggtttatgtcttgtttccggtttaagctctggtggatggcccagagaatgggagaaatgggccgagatattccctacgagacgcagttcttattggtcgagagcaacgatgggtcccaccttgagtctgacggagctaacggcgtcgagtgtaaccagaaagtttacaccgttttcttgccgttaatcgaaggatctttccgttcgtgtctccaaggaaacgttaacgatgaggttgagctctgtttggagagtggtgacgtggacactaaacggtcgtcgtttactcactctctgtatattcacgccggtacagatccgtttcagacaataacggacgctattcgcaccgttaagttgcatctgaatagtttccgtcaacgtcacgaaaagaagcttccagggatcgttgactacttcggatggtgcacttgggacgcgttttatcaagaagtgactcaggaaggcgtcgaagctggtcttaagtctctcgccgccggtggtacgccgccgaagtttgttatcatagacgacggttggcaatcagttgagagagatgccacggtggaggccggagatgagaagaaagagtcaccgatttttcgactgacggggatcaaggagaacgaaaagtttaagaagaaggatgatccaaacgttgggattaagaacattgtcaagattgctaaggagaaacacggtttgaaatatgtttacgtgtggcacgcgataacgggttattggggcggagttagacccggggaagaatacggatctgttatgaaatatcctaatatgtcaaagggtgtggtggagaatgatccgacgtggaagactgatgtaatgacgctgcaagggttgggtttggttagccccaagaaagtgtataagttttacaatgagcttcatagttacttggctgatgctggcgtggacggtgtgaaagtggatgtgcagtgtgtattggagactttgggtggtggtttaggcggtcgggttgagctgactcgtcagtttcatcaagctcttgactcctctgttgctaagaacttcccggataatggctgcattgcttgtatgagccataatacggatgctctttactgctcgaagcaagcagctgtgattagagcatcagatgatttctatccacgggatccggtgtctcataccatccatatagcctccgttgcttataacagtgtgttcttgggagagtttatgcagcctgactgggatatgttccattccgtgcaccctgctgcagagtatcatgcctctgctagggccatcagtggtgggcctctctatgtcagtgattctcctggaaagcacaactttgagcttctaagaaagcttgtattgcctgatggatcgattcttcgtgctcgactccctggtagaccaactcgcgattgtttgttcgctgatcctgcccgtgatggtgtcagcttgctaaagatatggaacatgaacaagtacactggagttcttggcgtgtataactgccaaggagcagcttggagcagcacagagagaaaaaacattttccaccagactaaaactgatagcctcactggctccattcgtggtcgtgatgtgcattcaatatcggaggcctccactgatccaacaacctggaatggagactgtgctgtttactcccagagcagaggcgaacttattgttatgccatacaatgtgtctcttccagtctcactcaaaatccgtgagcacgagatcttcacggtgagccccattagtcatcttgttgatggtgtatcttttgccccaattggtctagtaaacatgtacaattcgggaggagctatcgaaggacttagatatgaagccgagaagatgaaagtggtaatggaagttaaaggatgtggcaaattcggatcttactcttctgtgaagcctaagagatgcgttgttgagtcaaatgagattgcattcgagtacgattcctcctctggattggtcacctttgagttagacaaaatgcctatagagaacaaacgatttcatctgatccaagttgagttatga

SEQ ID NO: 72765 - protein, 749 aa, Arabidopsis thaliana; identical to SEQ ID NO: 44843
  peptide (1)..(749): Ceres Seq. ID no. 4946068
  misc_feature: Pfam Name: Raffinose_syn Pfam Description: Raffinose synthase or seed imbibition protein Sip1
  misc_feature (1)..(680): Homolog of NCBI NO: 15292677 NR Description: putative imbibition protein homolog [Arabidopsis
  misc_feature (689)..(744): Homolog of NCBI NO: 15292677 NR Description: putative imbibition protein homolog [Arabidopsis
  misc_feature (1)..(680): Homolog of NCBI NO: 15230330 NR Description: glycosyl hydrolase family 36; protein id: supported by cDNA: gi_15292676 [Arabidopsis thaliana]
  misc_feature (689)..(744): Homolog of NCBI NO: 15230330 NR Description: glycosyl hydrolase family 36; protein id: supported by cDNA: gi_15292676 [Arabidopsis thaliana]
  misc_feature (1)..(680): Homolog of NCBI NO: 629602 NR Description: probable imbibition protein - wild cabbage
  misc_feature (689)..(749): Homolog of NCBI NO: 629602 NR Description: probable imbibition protein - wild cabbage
  misc_feature (1)..(749): Homolog of NCBI NO: 282994 NR Description: Sip1 protein - barley >gi|167100|gb|AAA32975.1|
  misc_feature (1)..(678): Homolog of NCBI NO: 7242785 NR Description: putative seed imbibition protein [Persea
  misc_feature (689)..(748): Homolog of NCBI NO: 7242785 NR Description: putative seed imbibition protein [Persea
  misc_feature (1)..(678): Homolog of NCBI NO: 29838631 NR Description: alkaline alpha galactosidase II [Cucumis melo]

SEQ ID NO: 72766 - protein, 681 aa, Arabidopsis thaliana
  peptide (1)..(681): Ceres Seq. ID no. 4946069
  misc_feature: Pfam Name: Raffinose_syn Pfam Description: Raffinose synthase or seed imbibition protein Sip1
  misc_feature (1)..(612): Homolog of NCBI NO: 15292677 NR Description: putative imbibition protein homolog [Arabidopsis
  misc_feature (621)..(676): Homolog of NCBI NO: 15292677 NR Description: putative imbibition protein homolog [Arabidopsis
  misc_feature (1)..(612): Homolog of NCBI NO: 15230330 NR Description: glycosyl hydrolase family 36; protein id: supported by cDNA: gi_15292676 [Arabidopsis thaliana]
  misc_feature (621)..(676): Homolog of NCBI NO: 15230330 NR Description: glycosyl hydrolase family 36; protein id: supported by cDNA: gi_15292676 [Arabidopsis thaliana]
  misc_feature (1)..(612): Homolog of NCBI NO: 629602 NR Description: probable imbibition protein - wild cabbage
  misc_feature (621)..(681): Homolog of NCBI NO: 629602 NR Description: probable imbibition protein - wild cabbage
  misc_feature (1)..(681): Homolog of NCBI NO: 282994 NR Description: Sip1 protein - barley >gi|167100|gb|AAA32975.1|
  misc_feature (1)..(610): Homolog of NCBI NO: 7242785 NR Description: putative seed imbibition protein [Persea
  misc_feature (621)..(680): Homolog of NCBI NO: 7242785 NR Description: putative seed imbibition protein [Persea
  misc_feature (1)..(610): Homolog of NCBI NO: 29838631 NR Description: alkaline alpha galactosidase II [Cucumis melo]
MSCFRFKLWWMAQRMGEMGRDIPYETQFLLVESNDGSHLESDGANGVECNQKVYTVFLPLIEGSFRSCLQGNVNDEVELCLESGDVDTKRSSFTHSLYIHAGTDPFQTITDAIRTVKLHLNSFRQRHEKKLPGIVDYFGWCTWDAFYQEVTQEGVEAGLKSLAAGGTPPKFVIIDDGWQSVERDATVEAGDEKKESPIFRLTGIKENEKFKKKDDPNVGIKNIVKIAKEKHGLKYVYVWHAITGYWGGVRPGEEYGSVMKYPNMSKGVVENDPTWKTDVMTLQGLGLVSPKKVYKFYNELHSYLADAGVDGVKVDVQCVLETLGGGLGGRVELTRQFHQALDSSVAKNFPDNGCIACMSHNTDALYCSKQAAVIRASDDFYPRDPVSHTIHIASVAYNSVFLGEFMQPDWDMFHSVHPAAEYHASARAISGGPLYVSDSPGKHNFELLRKLVLPDGSILRARLPGRPTRDCLFADPARDGVSLLKIWNMNKYTGVLGVYNCQGAAWSSTERKNIFHQTKTDSLTGSIRGRDVHSISEASTDPTTWNGDCAVYSQSRGELIVMPYNVSLPVSLKIREHEIFTVSPISHLVDGVSFAPIGLVNMYNSGGAIEGLRYEAEKMKVVMEVKGCGKFGSYSSVKPKRCVVESNEIAFEYDSSSGLVTFELDKMPIENKRFHLIQVEL

SEQ ID NO: 72767 - protein, 671 aa, Arabidopsis thaliana
  peptide (1)..(671): Ceres Seq. ID no. 4946070
  misc_feature: Pfam Name: Raffinose_syn Pfam Description: Raffinose synthase or seed imbibition protein Sip1
  misc_feature (1)..(602): Homolog of NCBI NO: 15292677 NR Description: putative imbibition protein homolog [Arabidopsis
  misc_feature (611)..(666): Homolog of NCBI NO: 15292677 NR Description: putative imbibition protein homolog [Arabidopsis
  misc_feature (1)..(602): Homolog of NCBI NO: 15230330 NR Description: glycosyl hydrolase family 36; protein id: supported by cDNA: gi_15292676 [Arabidopsis thaliana]
  misc_feature (611)..(666): Homolog of NCBI NO: 15230330 NR Description: glycosyl hydrolase family 36; protein id: supported by cDNA: gi_15292676 [Arabidopsis thaliana]
  misc_feature (1)..(602): Homolog of NCBI NO: 629602 NR Description: probable imbibition protein - wild cabbage
  misc_feature (611)..(671): Homolog of NCBI NO: 629602 NR Description: probable imbibition protein - wild cabbage
  misc_feature (1)..(671): Homolog of NCBI NO: 282994 NR Description: Sip1 protein - barley >gi|167100|gb|AAA32975.1|
  misc_feature (1)..(600): Homolog of NCBI NO: 7242785 NR Description: putative seed imbibition protein [Persea
  misc_feature (611)..(670): Homolog of NCBI NO: 7242785 NR Description: putative seed imbibition protein [Persea
  misc_feature (1)..(600): Homolog of NCBI NO: 29838631 NR Description: alkaline alpha galactosidase II [Cucumis melo]
MAQRMGEMGRDIPYETQFLLVESNDGSHLESDGANGVECNQKVYTVFLPLIEGSFRSCLQGNVNDEVELCLESGDVDTKRSSFTHSLYIHAGTDPFQTITDAIRTVKLHLNSFRQRHEKKLPGIVDYFGWCTWDAFYQEVTQEGVEAGLKSLAAGGTPPKFVIIDDGWQSVERDATVEAGDEKKESPIFRLTGIKENEKFKKKDDPNVGIKNIVKIAKEKHGLKYVYVWHAITGYWGGVRPGEEYGSVMKYPNMSKGVVENDPTWKTDVMTLQGLGLVSPKKVYKFYNELHSYLADAGVDGVKVDVQCVLETLGGGLGGRVELTRQFHQALDSSVAKNFPDNGCIACMSHNTDALYCSKQAAVIRASDDFYPRDPVSHTIHIASVAYNSVFLGEFMQPDWDMFHSVHPAAEYHASARAISGGPLYVSDSPGKHNFELLRKLVLPDGSILRARLPGRPTRDCLFADPARDGVSLLKIWNMNKYTGVLGVYNCQGAAWSSTERKNIFHQTKTDSLTGSIRGRDVHSISEASTDPTTWNGDCAVYSQSRGELIVMPYNVSLPVSLKIREHEIFTVSPISHLVDGVSFAPIGLVNMYNSGGAIEGLRYEAEKMKVVMEVKGCGKFGSYSSVKPKRCVVESNEIAFEYDSSSGLVTFELDKMPIENKRFHLIQVEL

SEQ ID NO: 72768 - DNA, 660 bp, Arabidopsis thaliana
  misc_feature (1)..(660): Ceres Seq. ID no. 4946463
  misc_feature: MA Experiment ID: 20000306 Result: Down-regulated in Transcription
  misc_feature: MA Experiment 20000306 PARAMETER Experiment Name: At_Germinating_Seeds_Sub_P Parameter: Age (hr) Value: 6 vs. 0
  misc_feature: MA Experiment 20000306 PARAMETER Experiment Name: At_Germinating_Seeds_Sub_P Parameter: Organism Value: A. thaliana
  misc_feature: MA Experiment 20000306 PARAMETER Experiment Name: At_Germinating_Seeds_Sub_P Parameter: Plant Line Value: WS
  misc_feature: MA Experiment 20000306 PARAMETER Experiment Name: At_Germinating_Seeds_Sub_P Parameter: Tissue Value: Germinating Seeds
  misc_feature: MA Experiment ID: 20000307 Result: Down-regulated in Transcription
  misc_feature: MA Experiment 20000307 PARAMETER Experiment Name: At_Germinating_Seeds_Sub_P Parameter: Age (hr) Value: 24 vs. 0
  misc_feature: MA Experiment 20000307 PARAMETER Experiment Name: At_Germinating_Seeds_Sub_P Parameter: Organism Value: A. thaliana
  misc_feature: MA Experiment 20000307 PARAMETER Experiment Name: At_Germinating_Seeds_Sub_P Parameter: Plant Line Value: WS
  misc_feature: MA Experiment 20000307 PARAMETER Experiment Name: At_Germinating_Seeds_Sub_P Parameter: Tissue Value: Germinating Seeds
  misc_feature: MA Experiment ID: 20000352 Result: Up-regulated in Transcription
  misc_feature: MA Experiment 20000352 PARAMETER Experiment Name: At_Drought_Sub_P Parameter: Age (day) Value: 7
  misc_feature: MA Experiment 20000352 PARAMETER Experiment Name: At_Drought_Sub_P Parameter: Organism Value: A. thaliana
  misc_feature: MA Experiment 20000352 PARAMETER Experiment Name: At_Drought_Sub_P Parameter: Plant Line Value: WS
  misc_feature: MA Experiment 20000352 PARAMETER Experiment Name: At_Drought_Sub_P Parameter: Timepoint (hr) Value: 6
  misc_feature: MA Experiment 20000352 PARAMETER Experiment Name: At_Drought_Sub_P Parameter: Tissue Value: Whole Plant
  misc_feature: MA Experiment 20000352 PARAMETER Experiment Name: At_Drought_Sub_P Parameter: Treatment Value: Drought vs. No Drought
atgtcatcccacggccgagaagtagaggtgaccatctcatcggcaaaggatatcaagaacgtgaactggcgcaacggcccaaacaagccatacgccgttgtatggatcgatccgaagttcaaatcctccacaagagttgacgaagacggcaacacttgtacaacgtggaacgagacatttgtcatcgctttacctccggccaacgacgatgacgacaaggtatacatcaacatcgtacacgcaggccgtgaagagaacacaaagcccctcatcggctccgcccatctcagcctccgtgatgtcattgatgacgtcggcttcggcgtccccttcatgaaaaccctcaagctcaaacgcccctctggccgacctcagggcaaactcgacgtcactgtcaccgttcgagagactccaggatcaaattacgcgcttccttatggcgatccatacgcgccggaaaaggggagcaagttcggtgggatggggactggactggcggtcggggcggtggccggagttttgggtggggtggcattagcggagggactggaggctgtggaaggcgatgaggatgatgatgatgacgatgatgctgctgctgctgctgctgctgatgatgatgatgatgatgatgatgatgatgatgatgatgacgagtga

SEQ ID NO: 72769 - protein, 219 aa, Arabidopsis thaliana
  peptide (1)..(219): Ceres Seq. ID no. 4946464
  misc_feature (8)..(95): Pfam Name: C2 domain Pfam Description: C2 domain
  misc_feature (1)..(219): Homolog of NCBI NO: 10176862 NR Description: emb|CAB80929.1~gene_id:MRO11.1~similar to unknown
  misc_feature (1)..(219): Homolog of NCBI NO: 30689212 NR Description: C2 domain-containing protein [Arabidopsis
  misc_feature (7)..(150): Homolog of NCBI NO: 34908388 NR Description: P0529E05.20 [Oryza sativa (japonica
  misc_feature (137)..(207): Homolog of NCBI NO: 34908388 NR Description: P0529E05.20 [Oryza sativa (japonica
  misc_feature (2)..(138): Homolog of NCBI NO: 18390752 NR Description: extensin-related; protein id: At1g07310.1, by cDNA: gi_15451131, supported by cDNA: gi_20148320 [Arabidopsis >gi|8778551|gb|AAF79559.1|AC022464_17 F22G5.35 [Arabidopsis
  misc_feature (8)..(144): Homolog of NCBI NO: 15225023 NR Description: hypothetical protein; protein id: At2g13350.1
  misc_feature (8)..(136): Homolog of NCBI NO: 15234097 NR Description: hypothetical protein; protein id: At4g01200.1, by cDNA: gi_19424080, supported by cDNA: gi_21281234 [Arabidopsis >gi|25407092|pir||G85015 hypothetical protein AT4g01200
  misc_feature (163)..(219): Homolog of NCBI NO: 35210492 NR Description: aspartic acid-rich protein aspolin1 [Theragra
MSSHGREVEVTISSAKDIKNVNWRNGPNKPYAVVWIDPKFKSSTRVDEDGNTCTTWNETFVIALPPANDDDDKVYINIVHAGREENTKPLIGSAHLSLRDVIDDVGFGVPFMKTLKLKRPSGRPQGKLDVTVTVRETPGSNYALPYGDPYAPEKGSKFGGMGTGLAVGAVAGVLGGVALAEGLEAVEGDEDDDDDDDAAAAAAADDDDDDDDDDDDDDE

SEQ ID NO: 72770 - DNA, 312 bp, Arabidopsis thaliana
  misc_feature (1)..(312): Ceres Seq. ID no. 4946465
  misc_feature: MA Experiment ID: 20000184 Result: Up-regulated in Transcription
  misc_feature: MA Experiment 20000184 PARAMETER Experiment Name: At_Shoots__P Parameter: Age (day) Value: 7
  misc_feature: MA Experiment 20000184 PARAMETER Experiment Name: At_Shoots__P Parameter: Tissue Value: Shoots vs. Whole Plant
  misc_feature: MA Experiment ID: 20000185 Result: Up-regulated in Transcription
  misc_feature: MA Experiment 20000185 PARAMETER Experiment Name: At_Roots__P Parameter: Age (day) Value: 7 vs. 21
  misc_feature: MA Experiment 20000185 PARAMETER Experiment Name: At_Roots__P Parameter: Organism Value: A. thaliana
  misc_feature: MA Experiment 20000185 PARAMETER Experiment Name: At_Roots__P Parameter: Tissue Value: Roots vs. Whole Plant
  misc_feature: MA Experiment ID: 20000437 Result: Down-regulated in Transcription
  misc_feature: MA Experiment 20000437 PARAMETER Experiment Name: At_Drought_P Parameter: Age (day) Value: 8
  misc_feature: MA Experiment 20000437 PARAMETER Experiment Name: At_Drought_P Parameter: Organism Value: A. thaliana
  misc_feature: MA Experiment 20000437 PARAMETER Experiment Name: At_Drought_P Parameter: Plant Line Value: WS
  misc_feature: MA Experiment 20000437 PARAMETER Experiment Name: At_Drought_P Parameter: Timepoint (hr) Value: 24
  misc_feature: MA Experiment 20000437 PARAMETER Experiment Name: At_Drought_P Parameter: Tissue Value: Whole Plant
  misc_feature: MA Experiment 20000437 PARAMETER Experiment Name: At_Drought_P Parameter: Treatment Value: Drought vs. No Drought
  misc_feature: MA Experiment ID: 20000438 Result: Up-regulated in Transcription
  misc_feature: MA Experiment 20000438 PARAMETER Experiment Name: At_Shoots__P Parameter: Age (day) Value: 14
  misc_feature: MA Experiment 20000438 PARAMETER Experiment Name: At_Shoots__P Parameter: Tissue Value: Shoots vs. Whole Plant
  misc_feature: MA Experiment ID: 20000495 Result: Down-regulated in Transcription
  misc_feature: MA Experiment 20000495 PARAMETER Experiment Name: At_Guard_Cells_P Parameter: Harvest Date Value: 8/2/2002
  misc_feature: MA Experiment 20000495 PARAMETER Experiment Name: At_Guard_Cells_P Parameter: Organism Value: A. thaliana
  misc_feature: MA Experiment 20000495 PARAMETER Experiment Name: At_Guard_Cells_P Parameter: Tissue Value: Guard Cells vs. Leaves
  misc_feature: MA Experiment ID: 20001247 Result: Down-regulated in Transcription
  misc_feature: MA Experiment 20001247 PARAMETER Experiment Name: At_Far-red-induction_P Parameter: Age (day) Value: 7
  misc_feature: MA Experiment 20001247 PARAMETER Experiment Name: At_Far-red-induction_P Parameter: Light Value: Far-red vs. White
  misc_feature: MA Experiment 20001247 PARAMETER Experiment Name: At_Far-red-induction_P Parameter: Organism Value: A. thaliana
  misc_feature: MA Experiment 20001247 PARAMETER Experiment Name: At_Far-red-induction_P Parameter: Plant Line Value: Columbia
  misc_feature: MA Experiment 20001247 PARAMETER Experiment Name: At_Far-red-induction_P Parameter: Timepoint (hr) Value: 1
  misc_feature: MA Experiment 20001247 PARAMETER Experiment Name: At_Far-red-induction_P Parameter: Tissue Value: Whole Plant
  misc_feature: MA Experiment ID: 20001248 Result: Down-regulated in Transcription
  misc_feature: MA Experiment 20001248 PARAMETER Experiment Name: At_Far-red-induction_P Parameter: Age (day) Value: 7
  misc_feature: MA Experiment 20001248 PARAMETER Experiment Name: At_Far-red-induction_P Parameter: Light Value: Far-red vs. White
  misc_feature: MA Experiment 20001248 PARAMETER Experiment Name: At_Far-red-induction_P Parameter: Organism Value: A. thaliana
  misc_feature: MA Experiment 20001248 PARAMETER Experiment Name: At_Far-red-induction_P Parameter: Plant Line Value: Columbia
  misc_feature: MA Experiment 20001248 PARAMETER Experiment Name: At_Far-red-induction_P Parameter: Timepoint (hr) Value: 4
  misc_feature: MA Experiment 20001248 PARAMETER Experiment Name: At_Far-red-induction_P Parameter: Tissue Value: Whole Plant
  misc_feature: MA Experiment ID: 20001450 Result: Down-regulated in Transcription
  misc_feature: MA Experiment 20001450 PARAMETER Experiment Name: At_Far-red-induction_P Parameter: Age (day) Value: 7
  misc_feature: MA Experiment 20001450 PARAMETER Experiment Name: At_Far-red-induction_P Parameter: Light Value: Far-red vs. White
  misc_feature: MA Experiment 20001450 PARAMETER Experiment Name: At_Far-red-induction_P Parameter: Organism Value: A. thaliana
  misc_feature: MA Experiment 20001450 PARAMETER Experiment Name: At_Far-red-induction_P Parameter: Plant Line Value: Columbia
  misc_feature: MA Experiment 20001450 PARAMETER Experiment Name: At_Far-red-induction_P Parameter: Timepoint (hr) Value: 8
  misc_feature: MA Experiment 20001450 PARAMETER Experiment Name: At_Far-red-induction_P Parameter: Tissue Value: Whole Plant
  misc_feature: MA Experiment ID: 20001451 Result: Down-regulated in Transcription
  misc_feature: MA Experiment 20001451 PARAMETER Experiment Name: At_Far-red-induction_P Parameter: Age (day) Value: 7
  misc_feature: MA Experiment 20001451 PARAMETER Experiment Name: At_Far-red-induction_P Parameter: Light Value: Far-red vs. White
  misc_feature: MA Experiment 20001451 PARAMETER Experiment Name: At_Far-red-induction_P Parameter: Organism Value: A. thaliana
  misc_feature: MA Experiment 20001451 PARAMETER Experiment Name: At_Far-red-induction_P Parameter: Plant Line Value: Columbia
  misc_feature: MA Experiment 20001451 PARAMETER Experiment Name: At_Far-red-induction_P Parameter: Timepoint (hr) Value: 24
  misc_feature: MA Experiment 20001451 PARAMETER Experiment Name: At_Far-red-induction_P Parameter: Tissue Value: Whole Plant
atgtcggaagaaatacgagagaaagatctcaccgactctaaaccatctccaccgcaaccaccaccgaaacgtggtctcatcagccgcaaaagacagcttgtgtttctctctttcatgattttattagccgcaaaaggactcgttgggatcggagaaatagcgtttgtaatcttgtgttatatctacttgtatgagtttctctcaagatttgccttccctcgcaagcaaacagaacagaagaagagactctcaaaccctaaaaacaaactctttcaagcttacttcctcgccactgcaattataggttactaa

SEQ ID NO: 72771 - protein, 103 aa, Arabidopsis thaliana
  peptide (1)..(103): Ceres Seq. ID no. 4946466
  misc_feature (1)..(102): Homolog of NCBI NO: 15237854 NR Description: unknown protein; protein id: At5g23920.1 thaliana] >gi|10176859|dbj|BAB10065.1| gene_id:MRO11.4~unknown [Arabidopsis thaliana] >gi|29028832|gb|AAO64795.1| At5g23920
  misc_feature (1)..(102): Homolog of NCBI NO: 15146256 NR Description: AT5g52420/K24M7_17 [Arabidopsis thaliana]
  misc_feature (1)..(102): Homolog of NCBI NO: 18423389 NR Description: expressed protein; protein id: At5g52420.1, by cDNA: gi_15146255, supported by cDNA: gi_19699159 [Arabidopsis >gi|10177408|dbj|BAB10539.1| gene_id:K24M7.17~unknown protein
MSEEIREKDLTDSKPSPPQPPPKRGLISRKRQLVFLSFMILLAAKGLVGIGEIAFVILCYIYLYEFLSRFAFPRKQTEQKKRLSNPKNKLFQAYFLATAIIGY

SEQ ID NO: 72772 - protein, 65 aa, Arabidopsis thaliana
  peptide (1)..(65): Ceres Seq. ID no. 4946467
  misc_feature (1)..(64): Homolog of NCBI NO: 15237854 NR Description: unknown protein; protein id: At5g23920.1 thaliana] >gi|10176859|dbj|BAB10065.1| gene_id:MRO11.4~unknown [Arabidopsis thaliana] >gi|29028832|gb|AAO64795.1| At5g23920
  misc_feature (1)..(64): Homolog of NCBI NO: 15146256 NR Description: AT5g52420/K24M7_17 [Arabidopsis thaliana]
  misc_feature (1)..(64): Homolog of NCBI NO: 18423389 NR Description: expressed protein; protein id: At5g52420.1, by cDNA: gi_15146255, supported by cDNA: gi_19699159 [Arabidopsis >gi|10177408|dbj|BAB10539.1| gene_id:K24M7.17~unknown protein
MILLAAKGLVGIGEIAFVILCYIYLYEFLSRFAFPRKQTEQKKRLSNPKNKLFQAYFLATAIIGY

SEQ ID NO: 72773 - DNA, 1377 bp, Arabidopsis thaliana
  misc_feature (1)..(1377): Ceres Seq. ID no. 4946526
  misc_feature: MA Experiment ID: 20000234 Result: Up-regulated in Transcription
  misc_feature: MA Experiment 20000234 PARAMETER Experiment Name: At_Siliques_P Parameter: Age (day) Value: 21
  misc_feature: MA Experiment 20000234 PARAMETER Experiment Name: At_Siliques_P Parameter: Organism Value: A. thaliana
  misc_feature: MA Experiment 20000234 PARAMETER Experiment Name: At_Siliques_P Parameter: Plant Line Value: WS
  misc_feature: MA Experiment 20000234 PARAMETER Experiment Name: At_Siliques_P Parameter: Tissue Value: Less Than 5mm Siliques vs. Whole Plant
atgaattatgtgctaccatttttctctctttctatgtttactatagtcggagttctcttaatcctttcaacaggaagtgaagcgagtattggtgtaaactacggcacactagctaacaacctccctccaccgcaacaagtagcggagttcctcctccattccaccgtcattaaccgcatccgcctcttcgacaccgatcctcaaatcctccaagccttcgctaacaccggtatcgccgttaccgtaaccgtccccaacgaccaaatcccacacttaaccaacctctcctccgccaaacaatggatctccgatcacatccaacctcacttcccatccacaaacatcatccgtatcctcgtcggaaacgaagtcatctccaccgccgatcacctcctcatcagaaccttaatcccggctatgcaatctctccacaccgccttagtctccgcctctctccaccgtcgaattcaaatctcaacgccacattctttaggaaccctcactaattcaaccccaccttcttccgctaagttccggcgaggctacgacgcccaagtcctcaagcctctccttagcttcctccgttctacttcttcgccgttcgtcgtgaatccttatcccttcttcggttattcaatcgaaactctcgatttcgctctctttagacctaatccaggcttatttgatcaacacacgaagcttctctacacaaacatgctcgatgctcagcttgattcggtttattccgccatggataaattagggttttcagatgttgagattgtgattggtgaaattggatggccatcggagggagatatagatcagatcggagttgatgttgatacagcggctgagtttaacaagaatctgattgcgcgtgtagattccggtaccggaactccattgatgccaaatcggacttttgaaacttacattttcgcgctcttcaatgaaaatctcaaatcgggaccaacgtcggagcgtaatttcggcatcttccgatcagatctgacaccgatttacgacatcggaatcctccggccaacgtttagatcatcggatccggtttacaatcctcgatcaccggttagaggatcgtcgtcgaagcggtggtgcgtgacaaaggccggtgcagagacggtggctttacaaaggaacattgattacgtatgtgggttgggtttggattgtaggcccattaatgaaggtgggctttgttacttgccgaatacagtgaaagcccattcgaagtacgcaatgaacttgtattaccaaactatggagaaacacgagttcgattgcgatttcgacaacactggagagataactacgattgatcccagttatggaaattgtgaatatcaggctaattag

SEQ ID NO: 72774 - protein, 458 aa, Arabidopsis thaliana
  peptide (1)..(458): Ceres Seq. ID no. 4946527
  misc_feature (30)..(346): Pfam Name: Glycosyl hydrolases family 17 Pfam Description: Glycosyl hydrolases family 17
  misc_feature (18)..(453): Homolog of NCBI NO: 11279328 NR Description: glucan endo-1,3-beta-D-glucosidase (EC 3.2.1.39)
  misc_feature (5)..(455): Homolog of NCBI NO: 1706551 NR Description: GLUCAN ENDO-1,3-BETA-GLUCOSIDASE PRECURSOR
  misc_feature (6)..(455): Homolog of NCBI NO: 21617932 NR Description: beta-1,3-glucanase-like protein [Arabidopsis
  misc_feature (6)..(455): Homolog of NCBI NO: 15028379 NR Description: putative beta-1,3-glucanase [Arabidopsis thaliana]
  misc_feature (6)..(455): Homolog of NCBI NO: 15233271 NR Description: glycosyl hydrolase family 17 protein id: At3g55430.1, supported by cDNA: 8980., supported by
  misc_feature (12)..(449): Homolog of NCBI NO: 15226720 NR Description: glycosyl hydrolase family 17; protein id:
  misc_feature (15)..(383): Homolog of NCBI NO: 34395169 NR Description: putative glucan endo-1,3-beta-glucosidase
  misc_feature (15)..(383): Homolog of NCBI NO: 34900642 NR Description: putative glucan endo-1,3-beta-glucosidase
  misc_feature (11)..(455): Homolog of NCBI NO: 14279169 NR Description: beta-1,3-glucanase-like protein [Olea europaea]
  misc_feature (21)..(455): Homolog of NCBI NO: 31126737 NR Description: putative beta 1,3-glucanase [Oryza sativa
MNYVLPFFSLSMFTIVGVLLILSTGSEASIGVNYGTLANNLPPPQQVAEFLLHSTVINRIRLFDTDPQILQAFANTGIAVTVTVPNDQIPHLTNLSSAKQWISDHIQPHFPSTNIIRILVGNEVISTADHLLIRTLIPAMQSLHTALVSASLHRRIQISTPHSLGTLTNSTPPSSAKFRRGYDAQVLKPLLSFLRSTSSPFVVNPYPFFGYSIETLDFALFRPNPGLFDQHTKLLYTNMLDAQLDSVYSAMDKLGFSDVEIVIGEIGWPSEGDIDQIGVDVDTAAEFNKNLIARVDSGTGTPLMPNRTFETYIFALFNENLKSGPTSERNFGIFRSDLTPIYDIGILRPTFRSSDPVYNPRSPVRGSSSKRWCVTKAGAETVALQRNIDYVCGLGLDCRPINEGGLCYLPNTVKAHSKYAMNLYYQTMEKHEFDCDFDNTGEITTIDPSYGNCEYQAN

SEQ ID NO: 72775 - protein, 447 aa, Arabidopsis thaliana
  peptide (1)..(447): Ceres Seq. ID no. 4946528
  misc_feature (19)..(335): Pfam Name: Glycosyl hydrolases family 17 Pfam Description: Glycosyl hydrolases family 17
  misc_feature (7)..(442): Homolog of NCBI NO: 11279328 NR Description: glucan endo-1,3-beta-D-glucosidase (EC 3.2.1.39)
  misc_feature (1)..(444): Homolog of NCBI NO: 1706551 NR Description: GLUCAN ENDO-1,3-BETA-GLUCOSIDASE PRECURSOR
  misc_feature (1)..(444): Homolog of NCBI NO: 21617932 NR Description: beta-1,3-glucanase-like protein [Arabidopsis
  misc_feature (1)..(444): Homolog of NCBI NO: 15028379 NR Description: putative beta-1,3-glucanase [Arabidopsis thaliana]
  misc_feature (1)..(444): Homolog of NCBI NO: 15233271 NR Description: glycosyl hydrolase family 17 protein id: At3g55430.1, supported by cDNA: 8980., supported by
  misc_feature (1)..(438): Homolog of NCBI NO: 15226720 NR Description: glycosyl hydrolase family 17; protein id:
  misc_feature (4)..(372): Homolog of NCBI NO: 34395169 NR Description: putative glucan endo-1,3-beta-glucosidase
  misc_feature (4)..(372): Homolog of NCBI NO: 34900642 NR Description: putative glucan endo-1,3-beta-glucosidase
  misc_feature (1)..(444): Homolog of NCBI NO: 14279169 NR Description: beta-1,3-glucanase-like protein [Olea europaea]
  misc_feature (10)..(444): Homolog of NCBI NO: 31126737 NR Description: putative beta 1,3-glucanase [Oryza sativa
MFTIVGVLLILSTGSEASIGVNYGTLANNLPPPQQVAEFLLHSTVINRIRLFDTDPQILQAFANTGIAVTVTVPNDQIPHLTNLSSAKQWISDHIQPHFPSTNIIRILVGNEVISTADHLLIRTLIPAMQSLHTALVSASLHRRIQISTPHSLGTLTNSTPPSSAKFRRGYDAQVLKPLLSFLRSTSSPFVVNPYPFFGYSIETLDFALFRPNPGLFDQHTKLLYTNMLDAQLDSVYSAMDKLGFSDVEIVIGEIGWPSEGDIDQIGVDVDTAAEFNKNLIARVDSGTGTPLMPNRTFETYIFALFNENLKSGPTSERNFGIFRSDLTPIYDIGILRPTFRSSDPVYNPRSPVRGSSSKRWCVTKAGAETVALQRNIDYVCGLGLDCRPINEGGLCYLPNTVKAHSKYAMNLYYQTMEKHEFDCDFDNTGEITTIDPSYGNCEYQAN

SEQ ID NO: 72776 - protein, 319 aa, Arabidopsis thaliana
  peptide (1)..(319): Ceres Seq. ID no. 4946529
  misc_feature (1)..(207): Pfam Name: Glycosyl hydrolases family 17 Pfam Description: Glycosyl hydrolases family 17
  misc_feature (1)..(314): Homolog of NCBI NO: 11279328 NR Description: glucan endo-1,3-beta-D-glucosidase (EC 3.2.1.39)
  misc_feature (1)..(316): Homolog of NCBI NO: 1706551 NR Description: GLUCAN ENDO-1,3-BETA-GLUCOSIDASE PRECURSOR
  misc_feature (1)..(316): Homolog of NCBI NO: 21617932 NR Description: beta-1,3-glucanase-like protein [Arabidopsis
  misc_feature (1)..(316): Homolog of NCBI NO: 15028379 NR Description: putative beta-1,3-glucanase [Arabidopsis thaliana]
  misc_feature (1)..(316): Homolog of NCBI NO: 15233271 NR Description: glycosyl hydrolase family 17 protein id: At3g55430.1, supported by cDNA: 8980., supported by
  misc_feature (1)..(310): Homolog of NCBI NO: 15226720 NR Description: glycosyl hydrolase family 17; protein id:
  misc_feature (1)..(244): Homolog of NCBI NO: 34395169 NR Description: putative glucan endo-1,3-beta-glucosidase
  misc_feature (1)..(244): Homolog of NCBI NO: 34900642 NR Description: putative glucan endo-1,3-beta-glucosidase
  misc_feature (1)..(316): Homolog of NCBI NO: 14279169 NR Description: beta-1,3-glucanase-like protein [Olea europaea]
  misc_feature (1)..(316): Homolog of NCBI NO: 31126737 NR Description: putative beta 1,3-glucanase [Oryza sativa
MQSLHTALVSASLHRRIQISTPHSLGTLTNSTPPSSAKFRRGYDAQVLKPLLSFLRSTSSPFVVNPYPFFGYSIETLDFALFRPNPGLFDQHTKLLYTNMLDAQLDSVYSAMDKLGFSDVEIVIGEIGWPSEGDIDQIGVDVDTAAEFNKNLIARVDSGTGTPLMPNRTFETYIFALFNENLKSGPTSERNFGIFRSDLTPIYDIGILRPTFRSSDPVYNPRSPVRGSSSKRWCVTKAGAETVALQRNIDYVCGLGLDCRPINEGGLCYLPNTVKAHSKYAMNLYYQTMEKHEFDCDFDNTGEITTIDPSYGNCEYQAN

SEQ ID NO: 72777 - DNA, 1388 bp, Arabidopsis thaliana
  misc_feature (1)..(1388): Ceres Seq. ID no. 4946563
  misc_feature: MA Experiment ID: 108464 Result: Up-regulated in Transcription
  misc_feature: MA Experiment 108464 PARAMETER Experiment Name: At_Germinating_Seeds_cDNA_P Parameter: Age (day) Value: 4 vs. 0
  misc_feature: MA Experiment 108464 PARAMETER Experiment Name: At_Germinating_Seeds_cDNA_P Parameter: Tissue Value: Germinating Seeds
  misc_feature: MA Experiment ID: 108469 Result: Up-regulated in Transcription
  misc_feature: MA Experiment ID: 108668 Result: Up-regulated in Transcription
  misc_feature: MA Experiment 108668 PARAMETER Experiment Name: At_2mM_SA_cDNA_P Parameter: Plant Line Value: WS
  misc_feature: MA Experiment 108668 PARAMETER Experiment Name: At_2mM_SA_cDNA_P Parameter: Timepoint (hr) Value: 6
  misc_feature: MA Experiment 108668 PARAMETER Experiment Name: At_2mM_SA_cDNA_P Parameter: Treatment Value: 2mM SA vs. No Treatment
  misc_feature: MA Experiment ID: 20000068 Result: Down-regulated in Transcription
  misc_feature: MA Experiment ID: 20000087 Result: Down-regulated in Transcription
  misc_feature: MA Experiment 20000087 PARAMETER Experiment Name: At_100uM_ABA_Mutants_cDNA_P Parameter: Plant Line Value: WS
  misc_feature: MA Experiment 20000087 PARAMETER Experiment Name: At_100uM_ABA_Mutants_cDNA_P Parameter: Timepoint (hr) Value: 6
  misc_feature: MA Experiment 20000087 PARAMETER Experiment Name: At_100uM_ABA_Mutants_cDNA_P Parameter: Tissue Value: Aerial
  misc_feature: MA Experiment 20000087 PARAMETER Experiment Name: At_100uM_ABA_Mutants_cDNA_P Parameter: Treatment Value: 100uM ABA vs. No Treatment
  misc_feature: MA Experiment ID: 20000111 Result: Down-regulated in Transcription
  misc_feature: MA Experiment 20000111 PARAMETER Experiment Name: At_42deg_Heat_cDNA_P Parameter: Temperature (deg C) Value: 42 vs. 22
  misc_feature: MA Experiment 20000111 PARAMETER Experiment Name: At_42deg_Heat_cDNA_P Parameter: Timepoint (hr) Value: 6
  misc_feature: MA Experiment 20000111 PARAMETER Experiment Name: At_42deg_Heat_cDNA_P Parameter: Tissue Value: Aerial
  misc_feature: MA Experiment ID: 20000113 Result: Down-regulated in Transcription
  misc_feature: MA Experiment 20000113 PARAMETER Experiment Name: At_42deg_Heat_cDNA_P Parameter: Temperature (deg C) Value: 42 vs. 22
  misc_feature: MA Experiment 20000113 PARAMETER Experiment Name: At_42deg_Heat_cDNA_P Parameter: Timepoint (hr) Value: 8
  misc_feature: MA Experiment 20000113 PARAMETER Experiment Name: At_42deg_Heat_cDNA_P Parameter: Tissue Value: Aerial
  misc_feature: MA Experiment ID: 20000144 Result: Down-regulated in Transcription
  misc_feature: MA Experiment 20000144 PARAMETER Experiment Name: At_42deg_Heat_cDNA_P Parameter: Temperature (deg C) Value: 42 vs. 22
  misc_feature: MA Experiment 20000144 PARAMETER Experiment Name: At_42deg_Heat_cDNA_P Parameter: Timepoint (hr) Value: 1
  misc_feature: MA Experiment 20000144 PARAMETER Experiment Name: At_42deg_Heat_cDNA_P Parameter: Tissue Value: Aerial
  misc_feature: MA Experiment ID: 20000171 Result: Down-regulated in Transcription
  misc_feature: MA Experiment 20000171 PARAMETER Experiment Name: At_42deg_Heat_P Parameter: Age (day) Value: 14
  misc_feature: MA Experiment 20000171 PARAMETER Experiment Name: At_42deg_Heat_P Parameter: Organism Value: A. thaliana
  misc_feature: MA Experiment 20000171 PARAMETER Experiment Name: At_42deg_Heat_P Parameter: Plant Line Value: WS
  misc_feature: MA Experiment 20000171 PARAMETER Experiment Name: At_42deg_Heat_P Parameter: Temperature (deg C) Value: 42 vs. 22
  misc_feature: MA Experiment 20000171 PARAMETER Experiment Name: At_42deg_Heat_P Parameter: Timepoint (hr) Value: 1
  misc_feature: MA Experiment 20000171 PARAMETER Experiment Name: At_42deg_Heat_P Parameter: Tissue Value: Aerial
  misc_feature: MA Experiment ID: 20000173 Result: Down-regulated in Transcription
  misc_feature: MA Experiment 20000173 PARAMETER Experiment Name: At_42deg_Heat_P Parameter: Age (day) Value: 14
  misc_feature: MA Experiment 20000173 PARAMETER Experiment Name: At_42deg_Heat_P Parameter: Organism Value: A. thaliana
  misc_feature: MA Experiment 20000173 PARAMETER Experiment Name: At_42deg_Heat_P Parameter: Plant Line Value: WS
  misc_feature: MA Experiment 20000173 PARAMETER Experiment Name: At_42deg_Heat_P Parameter: Temperature (deg C) Value: 42 vs. 22
  misc_feature: MA Experiment 20000173 PARAMETER Experiment Name: At_42deg_Heat_P Parameter: Timepoint (hr) Value: 6
  misc_feature: MA Experiment 20000173 PARAMETER Experiment Name: At_42deg_Heat_P Parameter: Tissue Value: Aerial
  misc_feature: MA Experiment ID: 20000182 Result: Up-regulated in Transcription
  misc_feature: MA Experiment 20000182 PARAMETER Experiment Name: At_2mM_SA_P Parameter: Age (day) Value: 14
  misc_feature: MA Experiment 20000182 PARAMETER Experiment Name: At_2mM_SA_P Parameter: Organism Value: A. thaliana
  misc_feature: MA Experiment 20000182 PARAMETER Experiment Name: At_2mM_SA_P Parameter: Plant Line Value: WS
  misc_feature: MA Experiment 20000182 PARAMETER Experiment Name: At_2mM_SA_P Parameter: Timepoint (hr) Value: 6
  misc_feature: MA Experiment 20000182 PARAMETER Experiment Name: At_2mM_SA_P Parameter: Tissue Value: Aerial
  misc_feature: MA Experiment 20000182 PARAMETER Experiment Name: At_2mM_SA_P Parameter: Treatment Value: 2mM SA vs. No Treatment
  misc_feature: MA Experiment ID: 20000184 Result: Down-regulated in Transcription
  misc_feature: MA Experiment 20000184 PARAMETER Experiment Name: At_Shoots__P Parameter: Age (day) Value: 7
  misc_feature: MA Experiment 20000184 PARAMETER Experiment Name: At_Shoots__P Parameter: Tissue Value: Shoots vs. Whole Plant
  misc_feature: MA Experiment ID: 20000234 Result: Down-regulated in Transcription
  misc_feature: MA Experiment 20000234 PARAMETER Experiment Name: At_Siliques_P Parameter: Age (day) Value: 21
  misc_feature: MA Experiment 20000234 PARAMETER Experiment Name: At_Siliques_P Parameter: Organism Value: A. thaliana
  misc_feature: MA Experiment 20000234 PARAMETER Experiment Name: At_Siliques_P Parameter: Plant Line Value: WS
  misc_feature: MA Experiment 20000234 PARAMETER Experiment Name: At_Siliques_P Parameter: Tissue Value: Less Than 5mm Siliques vs. Whole Plant
  misc_feature: MA Experiment ID: 20000235 Result: Down-regulated in Transcription
  misc_feature: MA Experiment 20000235 PARAMETER Experiment Name: At_Siliques_P Parameter: Age (day) Value: 21
  misc_feature: MA Experiment 20000235 PARAMETER Experiment Name: At_Siliques_P Parameter: Organism Value: A. thaliana
  misc_feature: MA Experiment 20000235 PARAMETER Experiment Name: At_Siliques_P Parameter: Plant Line Value: WS
  misc_feature: MA Experiment 20000235 PARAMETER Experiment Name: At_Siliques_P Parameter: Tissue Value: 5-10mm Siliques vs. Whole Plant
  misc_feature: MA Experiment ID: 20000264 Result: Down-regulated in Transcription
  misc_feature: MA Experiment 20000264 PARAMETER Experiment Name: At_Open_Flower_P Parameter: Age (day) Value: 21
  misc_feature: MA Experiment 20000264 PARAMETER Experiment Name: At_Open_Flower_P Parameter: Plant Line Value: WS
  misc_feature: MA Experiment 20000264 PARAMETER Experiment Name: At_Open_Flower_P Parameter: Tissue Value: Open Flower vs. Whole Plant
  misc_feature: MA Experiment ID: 20000286 Result: Down-regulated in Transcription
  misc_feature: MA Experiment 20000286 PARAMETER Experiment Name: At_Open_Flower_P Parameter: Age (day) Value: 21
  misc_feature: MA Experiment 20000286 PARAMETER Experiment Name: At_Open_Flower_P Parameter: Plant Line Value: WS
  misc_feature: MA Experiment 20000286 PARAMETER Experiment Name: At_Open_Flower_P Parameter: Tissue Value: Half Open vs. Whole Plant
  misc_feature: MA Experiment ID: 20000438 Result: Down-regulated in Transcription
  misc_feature: MA Experiment 20000438 PARAMETER Experiment Name: At_Shoots__P Parameter: Age (day) Value: 14
  misc_feature: MA Experiment 20000438 PARAMETER Experiment Name: At_Shoots__P Parameter: Tissue Value: Shoots vs. Whole Plant
  misc_feature: MA Experiment ID: 20000439 Result: Down-regulated in Transcription
  misc_feature: MA Experiment 20000439 PARAMETER Experiment Name: At_Roots__P Parameter: Age (day) Value: 14 vs. 21
  misc_feature: MA Experiment 20000439 PARAMETER Experiment Name: At_Roots__P Parameter: Organism Value: A. thaliana
  misc_feature: MA Experiment 20000439 PARAMETER Experiment Name: At_Roots__P Parameter: Tissue Value: Roots vs. Whole Plant
  misc_feature: MA Experiment ID: 20000506 Result: Up-regulated in Transcription
  misc_feature: MA Experiment 20000506 PARAMETER Experiment Name: At_Wounding_P Parameter: Organism Value: A. thaliana
  misc_feature: MA Experiment 20000506 PARAMETER Experiment Name: At_Wounding_P Parameter: Plant Line Value: WS
  misc_feature: MA Experiment 20000506 PARAMETER Experiment Name: At_Wounding_P Parameter: Timepoint (hr) Value: 6
  misc_feature: MA Experiment 20000506 PARAMETER Experiment Name: At_Wounding_P Parameter: Tissue Value: Aerial
  misc_feature: MA Experiment 20000506 PARAMETER Experiment Name: At_Wounding_P Parameter: Treatment Value: Wounding vs. No Wounding
  misc_feature: MA Experiment ID: 20000573 Result: Up-regulated in Transcription
  misc_feature: MA Experiment 20000573 PARAMETER Experiment Name: At_100uM_ABA_Mutants__P Parameter: Organism Value: A. thaliana
  misc_feature: MA Experiment 20000573 PARAMETER Experiment Name: At_100uM_ABA_Mutants__P Parameter: Plant Line Value: CS22 vs. Ler wt
  misc_feature: MA Experiment 20000573 PARAMETER Experiment Name: At_100uM_ABA_Mutants__P Parameter: Timepoint (hr) Value: N/A
  misc_feature: MA Experiment 20000573 PARAMETER Experiment Name: At_100uM_ABA_Mutants__P Parameter: Tissue Value: Whole Plant
  misc_feature: MA Experiment 20000573 PARAMETER Experiment Name: At_100uM_ABA_Mutants__P Parameter: Treatment Value: None
  misc_feature: MA Experiment ID: 20000574 Result: Up-regulated in Transcription
  misc_feature: MA Experiment 20000574 PARAMETER Experiment Name: At_100uM_ABA_Mutants__P Parameter: Organism Value: A. thaliana
  misc_feature: MA Experiment 20000574 PARAMETER Experiment Name: At_100uM_ABA_Mutants__P Parameter: Plant Line Value: CS23 vs. Ler wt
  misc_feature: MA Experiment 20000574 PARAMETER Experiment Name: At_100uM_ABA_Mutants__P Parameter: Timepoint (hr) Value: N/A
  misc_feature: MA Experiment 20000574 PARAMETER Experiment Name: At_100uM_ABA_Mutants__P Parameter: Tissue Value: Whole Plant
  misc_feature: MA Experiment 20000574 PARAMETER Experiment Name: At_100uM_ABA_Mutants__P Parameter: Treatment Value: None
  misc_feature: MA Experiment ID: 20000794 Result: Down-regulated in Transcription
  misc_feature: MA Experiment 20000794 PARAMETER Experiment Name: At_Petals_P Parameter: Age (day) Value: 23-25 days
  misc_feature: MA Experiment 20000794 PARAMETER Experiment Name: At_Petals_P Parameter: Plant Line Value: WS
  misc_feature: MA Experiment 20000794 PARAMETER Experiment Name: At_Petals_P Parameter: Tissue Value: Petals vs. Whole plant
  misc_feature: MA Experiment ID: 20001554 Result: Down-regulated in Transcription
  misc_feature: MA Experiment 20001554 PARAMETER Experiment Name: At_Drought_Soil_Dry_P Parameter: Age (day) Value: 21
  misc_feature: MA Experiment 20001554 PARAMETER Experiment Name: At_Drought_Soil_Dry_P Parameter: Organism Value: A. thaliana
  misc_feature: MA Experiment 20001554 PARAMETER Experiment Name: At_Drought_Soil_Dry_P Parameter: Plant Line Value: WS
  misc_feature: MA Experiment 20001554 PARAMETER Experiment Name: At_Drought_Soil_Dry_P Parameter: Post Timepoint (hr) Value: None
  misc_feature: MA Experiment 20001554 PARAMETER Experiment Name: At_Drought_Soil_Dry_P Parameter: Post-Treatment Value: None
  misc_feature: MA Experiment 20001554 PARAMETER Experiment Name: At_Drought_Soil_Dry_P Parameter: Timepoint (day) Value: 7
  misc_feature: MA Experiment 20001554 PARAMETER Experiment Name: At_Drought_Soil_Dry_P Parameter: Treatment Value: Drought vs. No Drought
  misc_feature: MA Experiment ID: 20001555 Result: Down-regulated in Transcription
  misc_feature: MA Experiment 20001555 PARAMETER Experiment Name: At_Drought_Soil_Dry_P Parameter: Age (day) Value: 24
  misc_feature: MA Experiment 20001555 PARAMETER Experiment Name: At_Drought_Soil_Dry_P Parameter: Organism Value: A. thaliana
  misc_feature: MA Experiment 20001555 PARAMETER Experiment Name: At_Drought_Soil_Dry_P Parameter: Plant Line Value: WS
  misc_feature: MA Experiment 20001555 PARAMETER Experiment Name: At_Drought_Soil_Dry_P Parameter: Post Timepoint (hr) Value: None
  misc_feature: MA Experiment 20001555 PARAMETER Experiment Name: At_Drought_Soil_Dry_P Parameter: Post-Treatment Value: None
  misc_feature: MA Experiment 20001555 PARAMETER Experiment Name: At_Drought_Soil_Dry_P Parameter: Timepoint (day) Value: 10
  misc_feature: MA Experiment 20001555 PARAMETER Experiment Name: At_Drought_Soil_Dry_P Parameter: Treatment Value: Drought vs. No Drought
  misc_feature: MA Experiment ID: 20001556 Result: Down-regulated in Transcription
  misc_feature: MA Experiment 20001556 PARAMETER Experiment Name: At_Drought_Soil_Dry_P Parameter: Age (day) Value: 26
  misc_feature: MA Experiment 20001556 PARAMETER Experiment Name: At_Drought_Soil_Dry_P Parameter: Organism Value: A. thaliana
  misc_feature: MA Experiment 20001556 PARAMETER Experiment Name: At_Drought_Soil_Dry_P Parameter: Plant Line Value: WS
  misc_feature: MA Experiment 20001556 PARAMETER Experiment Name: At_Drought_Soil_Dry_P Parameter: Post Timepoint (hr) Value: None
  misc_feature: MA Experiment 20001556 PARAMETER Experiment Name: At_Drought_Soil_Dry_P Parameter: Post-Treatment Value: None
  misc_feature: MA Experiment 20001556 PARAMETER Experiment Name: At_Drought_Soil_Dry_P Parameter: Timepoint (day) Value: 12
  misc_feature: MA Experiment 20001556 PARAMETER Experiment Name: At_Drought_Soil_Dry_P Parameter: Treatment Value: Drought vs. No Drought
  misc_feature: MA Experiment ID: 20001557 Result: Down-regulated in Transcription
  misc_feature: MA Experiment 20001557 PARAMETER Experiment Name: At_Drought_Soil_Dry_P Parameter: Age (day) Value: 27
  misc_feature: MA Experiment 20001557 PARAMETER Experiment Name: At_Drought_Soil_Dry_P Parameter: Organism Value: A. thaliana
  misc_feature: MA Experiment 20001557 PARAMETER Experiment Name: At_Drought_Soil_Dry_P Parameter: Plant Line Value: WS
  misc_feature: MA Experiment 20001557 PARAMETER Experiment Name: At_Drought_Soil_Dry_P Parameter: Post Timepoint (hr) Value: 3
  misc_feature: MA Experiment 20001557 PARAMETER Experiment Name: At_Drought_Soil_Dry_P Parameter: Post-Treatment Value: Re-Water vs. No Drought
  misc_feature: MA Experiment 20001557 PARAMETER Experiment Name: At_Drought_Soil_Dry_P Parameter: Timepoint (day) Value: 13
  misc_feature: MA Experiment 20001557 PARAMETER Experiment Name: At_Drought_Soil_Dry_P Parameter: Treatment Value: Drought vs. No Drought
  misc_feature: MA Experiment ID: 20001558 Result: Down-regulated in Transcription
  misc_feature: MA Experiment 20001558 PARAMETER Experiment Name: At_Drought_Soil_Dry_P Parameter: Age (day) Value: 27
  misc_feature: MA Experiment 20001558 PARAMETER Experiment Name: At_Drought_Soil_Dry_P Parameter: Organism Value: A. thaliana
  misc_feature: MA Experiment 20001558 PARAMETER Experiment Name: At_Drought_Soil_Dry_P Parameter: Plant Line Value: WS
  misc_feature: MA Experiment 20001558 PARAMETER Experiment Name: At_Drought_Soil_Dry_P Parameter: Post Timepoint (hr) Value: 6
  misc_feature: MA Experiment 20001558 PARAMETER Experiment Name: At_Drought_Soil_Dry_P Parameter: Post-Treatment Value: Re-Water vs. No Drought
  misc_feature: MA Experiment 20001558 PARAMETER Experiment Name: At_Drought_Soil_Dry_P Parameter: Timepoint (day) Value: 13
  misc_feature: MA Experiment 20001558 PARAMETER Experiment Name: At_Drought_Soil_Dry_P Parameter: Treatment Value: Drought vs. No Drought
  misc_feature: MA Experiment ID: 20001559 Result: Down-regulated in Transcription
  misc_feature: MA Experiment 20001559 PARAMETER Experiment Name: At_Drought_Soil_Dry_P Parameter: Age (day) Value: 28
  misc_feature: MA Experiment 20001559 PARAMETER Experiment Name: At_Drought_Soil_Dry_P Parameter: Organism Value: A. thaliana
  misc_feature: MA Experiment 20001559 PARAMETER Experiment Name: At_Drought_Soil_Dry_P Parameter: Plant Line Value: WS
  misc_feature: MA Experiment 20001559 PARAMETER Experiment Name: At_Drought_Soil_Dry_P Parameter: Post Timepoint (hr) Value: 29
  misc_feature: MA Experiment 20001559 PARAMETER Experiment Name: At_Drought_Soil_Dry_P Parameter: Post-Treatment Value: Re-Water vs. No Drought
  misc_feature: MA Experiment 20001559 PARAMETER Experiment Name: At_Drought_Soil_Dry_P Parameter: Timepoint (day) Value: 14
  misc_feature: MA Experiment 20001559 PARAMETER Experiment Name: At_Drought_Soil_Dry_P Parameter: Treatment Value: Drought vs. No Drought
  misc_feature: MA Experiment ID: 20001560 Result: Down-regulated in Transcription
  misc_feature: MA Experiment 20001560 PARAMETER Experiment Name: At_Drought_Soil_Dry_P Parameter: Age (day) Value: 28
  misc_feature: MA Experiment 20001560 PARAMETER Experiment Name: At_Drought_Soil_Dry_P Parameter: Organism Value: A. thaliana
  misc_feature: MA Experiment 20001560 PARAMETER Experiment Name: At_Drought_Soil_Dry_P Parameter: Plant Line Value: WS
  misc_feature: MA Experiment 20001560 PARAMETER Experiment Name: At_Drought_Soil_Dry_P Parameter: Post Timepoint (hr) Value: None
  misc_feature: MA Experiment 20001560 PARAMETER Experiment Name: At_Drought_Soil_Dry_P Parameter: Post-Treatment Value: None
  misc_feature: MA Experiment 20001560 PARAMETER Experiment Name: At_Drought_Soil_Dry_P Parameter: Timepoint (day) Value: 14
  misc_feature: MA Experiment 20001560 PARAMETER Experiment Name: At_Drought_Soil_Dry_P Parameter: Treatment Value: Drought vs. No Drought
  misc_feature: MA Experiment ID: 20001757 Result: Up-regulated in Transcription
  misc_feature: MA Experiment 20001757 PARAMETER Experiment Name: At_50mM_NH4NO3_L-to-H_P Parameter: Timepoint (hr) Value: 6
  misc_feature: MA Experiment 20001757 PARAMETER Experiment Name: At_50mM_NH4NO3_L-to-H_P Parameter: Tissue Value: Leaf
  misc_feature: MA Experiment 20001757 PARAMETER Experiment Name: At_50mM_NH4NO3_L-to-H_P Parameter: Treatment Value: 50mM NH4NO3 vs 100mM Mannitol
  misc_feature: MA Experiment ID: 20001768 Result: Up-regulated in Transcription
  misc_feature: MA Experiment 20001768 PARAMETER Experiment Name: At_Far-red-enriched-adult_P Parameter: Age (day) Value: 28
  misc_feature: MA Experiment 20001768 PARAMETER Experiment Name: At_Far-red-enriched-adult_P Parameter: Light Value: Far-red enriched vs. White
  misc_feature: MA Experiment 20001768 PARAMETER Experiment Name: At_Far-red-enriched-adult_P Parameter: Organism Value: A. thaliana
  misc_feature: MA Experiment 20001768 PARAMETER Experiment Name: At_Far-red-enriched-adult_P Parameter: Plant Line Value: Columbia
  misc_feature: MA Experiment 20001768 PARAMETER Experiment Name: At_Far-red-enriched-adult_P Parameter: Timepoint (hr) Value: 1
  misc_feature: MA Experiment 20001768 PARAMETER Experiment Name: At_Far-red-enriched-adult_P Parameter: Tissue Value: Aerial
  misc_feature: MA Experiment ID: 20001773 Result: Down-regulated in Transcription
  misc_feature: MA Experiment 20001773 PARAMETER Experiment Name: At_Far-red-enriched-adult_P Parameter: Age (day) Value: 30
  misc_feature: MA Experiment 20001773 PARAMETER Experiment Name: At_Far-red-enriched-adult_P Parameter: Light Value: Far-red enriched vs. White
  misc_feature: MA Experiment 20001773 PARAMETER Experiment Name: At_Far-red-enriched-adult_P Parameter: Organism Value: A. thaliana
  misc_feature: MA Experiment 20001773 PARAMETER Experiment Name: At_Far-red-enriched-adult_P Parameter: Plant Line Value: Columbia
  misc_feature: MA Experiment 20001773 PARAMETER Experiment Name: At_Far-red-enriched-adult_P Parameter: Timepoint (hr) Value: 48
  misc_feature: MA Experiment 20001773 PARAMETER Experiment Name: At_Far-red-enriched-adult_P Parameter: Tissue Value: Aerial
  misc_feature: MA Experiment ID: 20001904 Result: Down-regulated in Transcription
  misc_feature: MA Experiment 20001904 PARAMETER Experiment Name: At_Drought_Reproduction_P Parameter: Age (day) Value: 37
  misc_feature: MA Experiment 20001904 PARAMETER Experiment Name: At_Drought_Reproduction_P Parameter: Organism Value: A. thaliana
  misc_feature: MA Experiment 20001904 PARAMETER Experiment Name: At_Drought_Reproduction_P Parameter: Plant Line Value: WS
  misc_feature: MA Experiment 20001904 PARAMETER Experiment Name: At_Drought_Reproduction_P Parameter: Timepoint (day) Value: 7
  misc_feature: MA Experiment 20001904 PARAMETER Experiment Name: At_Drought_Reproduction_P Parameter: Tissue Value: Rosettes
  misc_feature: MA Experiment 20001904 PARAMETER Experiment Name: At_Drought_Reproduction_P Parameter: Treatment Value: Drought vs. No Drought
  misc_feature: MA Experiment ID: 20001905 Result: Down-regulated in Transcription
  misc_feature: MA Experiment 20001905 PARAMETER Experiment Name: At_Drought_Reproduction_P Parameter: Age (day) Value: 40
  misc_feature: MA Experiment 20001905 PARAMETER Experiment Name: At_Drought_Reproduction_P Parameter: Organism Value: A. thaliana
  misc_feature: MA Experiment 20001905 PARAMETER Experiment Name: At_Drought_Reproduction_P Parameter: Plant Line Value: WS
  misc_feature: MA Experiment 20001905 PARAMETER Experiment Name: At_Drought_Reproduction_P Parameter: Timepoint (day) Value: 10
  misc_feature: MA Experiment 20001905 PARAMETER Experiment Name: At_Drought_Reproduction_P Parameter: Tissue Value: Rosettes
  misc_feature: MA Experiment 20001905 PARAMETER Experiment Name: At_Drought_Reproduction_P Parameter: Treatment Value: Drought vs. No Drought
  misc_feature: MA Experiment ID: 20001910 Result: Down-regulated in Transcription
  misc_feature: MA Experiment 20001910 PARAMETER Experiment Name: At_Drought_Reproduction_P Parameter: Age (day) Value: 37
  misc_feature: MA Experiment 20001910 PARAMETER Experiment Name: At_Drought_Reproduction_P Parameter: Organism Value: A. thaliana
  misc_feature: MA Experiment 20001910 PARAMETER Experiment Name: At_Drought_Reproduction_P Parameter: Plant Line Value: WS
  misc_feature: MA Experiment 20001910 PARAMETER Experiment Name: At_Drought_Reproduction_P Parameter: Timepoint (day) Value: 7
  misc_feature: MA Experiment 20001910 PARAMETER Experiment Name: At_Drought_Reproduction_P Parameter: Tissue Value: Flowers
  misc_feature: MA Experiment 20001910 PARAMETER Experiment Name: At_Drought_Reproduction_P Parameter: Treatment Value: Drought vs. No Drought
  misc_feature: Pfam Name: Lipase_3 Pfam Description: Lipase (class 3)
acaatgaatttttaaaactagctcaaatgtctttctcttcaggttgatcatcaacctgtgtttgtttttggttggtttcgtcagtagctctctcacttcactcacaaagtgaaaccagttacaaaaccagggtgataaaaagaagaagaagagaagacggtgaaagtgtgaattaggaggagctgctgatggcctcacgcagagagatttttagcttttctggtccccctccaattccctcttttgactggaacaatttgtaccaccgagcgtcattggtatcatgtttagtgcaaggagtgtacacaatggaacgagataggcaacaaaaccggtgtggttctgactcaaaagctagaccttggtgggcgttttacaggttcactttataccaacaacttagggacgcattagatggctccatatacggggccgttttccagaacgacatcaattaccagaatactcccaactcgatagtacctccacgttacattattgcgttacgtggaacgatcttaagcccacaaactatggcttgtgatgttcagcttaacattcgtatcgccttcgagaacctctaccgcgggggtagatttgtgcaggccattcaagcaatgcaatattttgtggccacatatggaaacacagctatctggatcgctggacactctctaggagctggccttgcactactcgcggggaagatcatggccatgtatggatgccctgtcgaggcttacatcttcaatccacctatctccttgattcctctagagcagctagtggagagtgaggatcttaaatgtgcggtccgactcgctagggatatcctcaaagccggcatagcaagagtcctagaccttaatgagggtcacgaaagccatctatttatgaatctagcttcctggagacctcatttgtttgtgaaccaatcagatccaatctgctcagaatatattggctatttcaatcatagaggcgatatgaatgagctgcaactgggtaggatcgagaggttggctagatactcaattaggagaatattgttcggaggaggagaaagttcgtcgtcgtattcttcagaagaacatcttcattttcttccgtcggccatcgtgatggtgaacacaatcatatcaccggattttcagacagatcatgggattcatcaatggtggaatcctatgcttggacagttttcataccaaattatagcatgacttgcgcttaatttcatcgcttcagttattttcttttcagttgaatcttctatacaaatattgtaaggtttttttgcttcatgtcacatcaaactttttttcagcattttattttcaattggattacttcccgaatatactttatttgattaacattattcttct

SEQ ID NO: 72778 - protein, 229 aa, Arabidopsis thaliana
  peptide (1)..(229): Ceres Seq. ID no. 4946564
  misc_feature: Pfam Name: Lipase_3 Pfam Description: Lipase (class 3)
  misc_feature (1)..(229): Homolog of NCBI NO: 15237913 NR Description: putative protein; protein id: At5g24200.1 thaliana] >gi|9757929|dbj|BAB08411.1|
  misc_feature (1)..(222): Homolog of NCBI NO: 15237916 NR Description: putative protein; protein id: At5g24210.1, by cDNA: gi_17529271, supported by cDNA: gi_20465808 [Arabidopsis >gi|10177080|dbj|BAB10386.1| gb|AAD29063.1~gene_id:MOP9.2~similar
  misc_feature (1)..(223): Homolog of NCBI NO: 30689345 NR Description: expressed protein [Arabidopsis thaliana] unknown protein [Arabidopsis thaliana]
  misc_feature (1)..(216): Homolog of NCBI NO: 15237918 NR Description: putative protein; protein id: At5g24220.1 thaliana] >gi|10177081|dbj|BAB10387.1|
  misc_feature (1)..(216): Homolog of NCBI NO: 15237909 NR Description: putative protein; protein id: At5g24180.1 thaliana] >gi|9757927|dbj|BAB08409.1|
  misc_feature (1)..(106): Homolog of NCBI NO: 10177082 NR Description: gene_id:MOP9.4~pir||T04290~similar to unknown
  misc_feature (1)..(216): Homolog of NCBI NO: 18396010 NR Description: expressed protein; protein id: At2g05260.1, by cDNA: 33377. [Arabidopsis thaliana] >gi|25411153|pir||E84466
  misc_feature (1)..(216): Homolog of NCBI NO: 18413406 NR Description: unknown protein; protein id: At4g10955.1
  misc_feature (1)..(220): Homolog of NCBI NO: 34910674 NR Description: P0690B02.1 [Oryza sativa (japonica
  misc_feature (1)..(180): Homolog of NCBI NO: 7486138 NR Description: hypothetical protein F25I24.160 - Arabidopsis >gi|4539369|emb|CAB40063.1| putative protein [Arabidopsis >gi|7267793|emb|CAB81196.1| putative protein [Arabidopsis
MACDVQLNIRIAFENLYRGGRFVQAIQAMQYFVATYGNTAIWIAGHSLGAGLALLAGKIMAMYGCPVEAYIFNPPISLIPLEQLVESEDLKCAVRLARDILKAGIARVLDLNEGHESHLFMNLASWRPHLFVNQSDPICSEYIGYFNHRGDMNELQLGRIERLARYSIRRILFGGGESSSSYSSEEHLHFLPSAIVMVNTIISPDFQTDHGIHQWWNPMLGQFSYQIIA

SEQ ID NO: 72779 - protein, 344 aa, Arabidopsis thaliana
  peptide (1)..(344): Ceres Seq. ID no. 4946565
  misc_feature: Pfam Name: Lipase_3 Pfam Description: Lipase (class 3)
  misc_feature (1)..(344): Homolog of NCBI NO: 15237913 NR Description: putative protein; protein id: At5g24200.1 thaliana] >gi|9757929|dbj|BAB08411.1|
  misc_feature (1)..(337): Homolog of NCBI NO: 15237916 NR Description: putative protein; protein id: At5g24210.1, by cDNA: gi_17529271, supported by cDNA: gi_20465808 [Arabidopsis >gi|10177080|dbj|BAB10386.1| gb|AAD29063.1~gene_id:MOP9.2~similar
  misc_feature (1)..(338): Homolog of NCBI NO: 30689345 NR Description: expressed protein [Arabidopsis thaliana] unknown protein [Arabidopsis thaliana]
  misc_feature (1)..(331): Homolog of NCBI NO: 15237918 NR Description: putative protein; protein id: At5g24220.1 thaliana] >gi|10177081|dbj|BAB10387.1|
  misc_feature (6)..(331): Homolog of NCBI NO: 15237909 NR Description: putative protein; protein id: At5g24180.1 thaliana] >gi|9757927|dbj|BAB08409.1|
  misc_feature (1)..(221): Homolog of NCBI NO: 10177082 NR Description: gene_id:MOP9.4~pir||T04290~similar to unknown
  misc_feature (1)..(331): Homolog of NCBI NO: 18396010 NR Description: expressed protein; protein id: At2g05260.1, by cDNA: 33377. [Arabidopsis thaliana] >gi|25411153|pir||E84466
  misc_feature (1)..(331): Homolog of NCBI NO: 18413406 NR Description: unknown protein; protein id: At4g10955.1
  misc_feature (31)..(335): Homolog of NCBI NO: 34910674 NR Description: P0690B02.1 [Oryza sativa (japonica
  misc_feature (1)..(295): Homolog of NCBI NO: 7486138 NR Description: hypothetical protein F25I24.160 - Arabidopsis >gi|4539369|emb|CAB40063.1| putative protein [Arabidopsis >gi|7267793|emb|CAB81196.1| putative protein [Arabidopsis
MASRREIFSFSGPPPIPSFDWNNLYHRASLVSCLVQGVYTMERDRQQNRCGSDSKARPWWAFYRFTLYQQLRDALDGSIYGAVFQNDINYQNTPNSIVPPRYIIALRGTILSPQTMACDVQLNIRIAFENLYRGGRFVQAIQAMQYFVATYGNTAIWIAGHSLGAGLALLAGKIMAMYGCPVEAYIFNPPISLIPLEQLVESEDLKCAVRLARDILKAGIARVLDLNEGHESHLFMNLASWRPHLFVNQSDPICSEYIGYFNHRGDMNELQLGRIERLARYSIRRILFGGGESSSSYSSEEHLHFLPSAIVMVNTIISPDFQTDHGIHQWWNPMLGQFSYQIIA

SEQ ID NO: 72780 - protein, 304 aa, Arabidopsis thaliana
  peptide (1)..(304): Ceres Seq. ID no. 4946566
  misc_feature: Pfam Name: Lipase_3 Pfam Description: Lipase (class 3)
  misc_feature (1)..(304): Homolog of NCBI NO: 15237913 NR Description: putative protein; protein id: At5g24200.1 thaliana] >gi|9757929|dbj|BAB08411.1|
  misc_feature (1)..(297): Homolog of NCBI NO: 15237916 NR Description: putative protein; protein id: At5g24210.1, by cDNA: gi_17529271, supported by cDNA: gi_20465808 [Arabidopsis >gi|10177080|dbj|BAB10386.1| gb|AAD29063.1~gene_id:MOP9.2~similar
  misc_feature (1)..(298): Homolog of NCBI NO: 30689345 NR Description: expressed protein [Arabidopsis thaliana] unknown protein [Arabidopsis thaliana]
  misc_feature (1)..(291): Homolog of NCBI NO: 15237918 NR Description: putative protein; protein id: At5g24220.1 thaliana] >gi|10177081|dbj|BAB10387.1|
  misc_feature (1)..(291): Homolog of NCBI NO: 15237909 NR Description: putative protein; protein id: At5g24180.1 thaliana] >gi|9757927|dbj|BAB08409.1|
  misc_feature (1)..(181): Homolog of NCBI NO: 10177082 NR Description: gene_id:MOP9.4~pir||T04290~similar to unknown
  misc_feature (1)..(291): Homolog of NCBI NO: 18396010 NR Description: expressed protein; protein id: At2g05260.1, by cDNA: 33377. [Arabidopsis thaliana] >gi|25411153|pir||E84466
  misc_feature (1)..(291): Homolog of NCBI NO: 18413406 NR Description: unknown protein; protein id: At4g10955.1
  misc_feature (1)..(295): Homolog of NCBI NO: 34910674 NR Description: P0690B02.1 [Oryza sativa (japonica
  misc_feature (1)..(255): Homolog of NCBI NO: 7486138 NR Description: hypothetical protein F25I24.160 - Arabidopsis >gi|4539369|emb|CAB40063.1| putative protein [Arabidopsis >gi|7267793|emb|CAB81196.1| putative protein [Arabidopsis
MERDRQQNRCGSDSKARPWWAFYRFTLYQQLRDALDGSIYGAVFQNDINYQNTPNSIVPPRYIIALRGTILSPQTMACDVQLNIRIAFENLYRGGRFVQAIQAMQYFVATYGNTAIWIAGHSLGAGLALLAGKIMAMYGCPVEAYIFNPPISLIPLEQLVESEDLKCAVRLARDILKAGIARVLDLNEGHESHLFMNLASWRPHLFVNQSDPICSEYIGYFNHRGDMNELQLGRIERLARYSIRRILFGGGESSSSYSSEEHLHFLPSAIVMVNTIISPDFQTDHGIHQWWNPMLGQFSYQIIA

SEQ ID NO: 72781 - DNA, 1250 bp, Arabidopsis thaliana
  misc_feature (1)..(1250): Ceres Seq. ID no. 4946681
  misc_feature: MA Experiment ID: 108434 Result: Up-regulated in Transcription
  misc_feature: MA Experiment 108434 PARAMETER Experiment Name: At_Root_Tips_cDNA_P Parameter: Tissue Value: Root Tips
  misc_feature: MA Experiment ID: 108462 Result: Down-regulated in Transcription
  misc_feature: MA Experiment 108462 PARAMETER Experiment Name: At_Germinating_Seeds_cDNA_P Parameter: Age (day) Value: 2 vs. 0
  misc_feature: MA Experiment 108462 PARAMETER Experiment Name: At_Germinating_Seeds_cDNA_P Parameter: Tissue Value: Germinating Seeds
  misc_feature: MA Experiment ID: 108463 Result: Down-regulated in Transcription
  misc_feature: MA Experiment 108463 PARAMETER Experiment Name: At_Germinating_Seeds_cDNA_P Parameter: Age (day) Value: 3 vs. 0
  misc_feature: MA Experiment 108463 PARAMETER Experiment Name: At_Germinating_Seeds_cDNA_P Parameter: Tissue Value: Germinating Seeds
  misc_feature: MA Experiment ID: 108464 Result: Down-regulated in Transcription
  misc_feature: MA Experiment 108464 PARAMETER Experiment Name: At_Germinating_Seeds_cDNA_P Parameter: Age (day) Value: 4 vs. 0
  misc_feature: MA Experiment 108464 PARAMETER Experiment Name: At_Germinating_Seeds_cDNA_P Parameter: Tissue Value: Germinating Seeds
  misc_feature: MA Experiment ID: 108561 Result: Down-regulated in Transcription
  misc_feature: MA Experiment 108561 PARAMETER Experiment Name: At_100uM_ABA_cDNA_P Parameter: Timepoint (hr) Value: 6
  misc_feature: MA Experiment 108561 PARAMETER Experiment Name: At_100uM_ABA_cDNA_P Parameter: Tissue Value: Aerial
  misc_feature: MA Experiment 108561 PARAMETER Experiment Name: At_100uM_ABA_cDNA_P Parameter: Treatment Value: 100uM ABA vs. No Treatment
  misc_feature: MA Experiment ID: 108572 Result: Down-regulated in Transcription
  misc_feature: MA Experiment 108572 PARAMETER Experiment Name: At_Drought_cDNA_P Parameter: Timepoint (hr) Value: 1
  misc_feature: MA Experiment 108572 PARAMETER Experiment Name: At_Drought_cDNA_P Parameter: Tissue Value: Aerial
  misc_feature: MA Experiment 108572 PARAMETER Experiment Name: At_Drought_cDNA_P Parameter: Treatment Value: Drought vs. No Drought
  misc_feature: MA Experiment ID: 108573 Result: Down-regulated in Transcription
  misc_feature: MA Experiment 108573 PARAMETER Experiment Name: At_Drought_cDNA_P Parameter: Timepoint (hr) Value: 6
  misc_feature: MA Experiment 108573 PARAMETER Experiment Name: At_Drought_cDNA_P Parameter: Tissue Value: Aerial
  misc_feature: MA Experiment 108573 PARAMETER Experiment Name: At_Drought_cDNA_P Parameter: Treatment Value: Drought vs. No Drought
  misc_feature: MA Experiment ID: 108576 Result: Down-regulated in Transcription
  misc_feature: MA Experiment 108576 PARAMETER Experiment Name: At_42deg_Heat_cDNA_P Parameter: Temperature (deg C) Value: 42 vs. 22
  misc_feature: MA Experiment 108576 PARAMETER Experiment Name: At_42deg_Heat_cDNA_P Parameter: Timepoint (hr) Value: 1
  misc_feature: MA Experiment 108576 PARAMETER Experiment Name: At_42deg_Heat_cDNA_P Parameter: Tissue Value: Aerial
  misc_feature: MA Experiment ID: 108577 Result: Down-regulated in Transcription
  misc_feature: MA Experiment 108577 PARAMETER Experiment Name: At_42deg_Heat_cDNA_P Parameter: Temperature (deg C) Value: 42 vs. 22
  misc_feature: MA Experiment 108577 PARAMETER Experiment Name: At_42deg_Heat_cDNA_P Parameter: Timepoint (hr) Value: 6
  misc_feature: MA Experiment 108577 PARAMETER Experiment Name: At_42deg_Heat_cDNA_P Parameter: Tissue Value: Aerial
  misc_feature: MA Experiment ID: 108579 Result: Down-regulated in Transcription
  misc_feature: MA Experiment 108579 PARAMETER Experiment Name: At_4deg_Cold_cDNA_P Parameter: Temperature (deg C) Value: 4 vs. 22
  misc_feature: MA Experiment 108579 PARAMETER Experiment Name: At_4deg_Cold_cDNA_P Parameter: Timepoint (hr) Value: 6
  misc_feature: MA Experiment 108579 PARAMETER Experiment Name: At_4deg_Cold_cDNA_P Parameter: Tissue Value: Aerial
  misc_feature: MA Experiment ID: 108585 Result: Down-regulated in Transcription
  misc_feature: MA Experiment 108585 PARAMETER Experiment Name: At_5mM_NaNP_cDNA_P Parameter: Timepoint (hr) Value: 6
  misc_feature: MA Experiment 108585 PARAMETER Experiment Name: At_5mM_NaNP_cDNA_P Parameter: Tissue Value: Aerial
  misc_feature: MA Experiment 108585 PARAMETER Experiment Name: At_5mM_NaNP_cDNA_P Parameter: Treatment Value: null
  misc_feature: MA Experiment ID: 108595 Result: Down-regulated in Transcription
  misc_feature: MA Experiment 108595 PARAMETER Experiment Name: At_Ler-pi_Ovule_cDNA_P Parameter: Plant Line Value: null
  misc_feature: MA Experiment ID: 108605 Result: Down-regulated in Transcription
  misc_feature: MA Experiment 108605 PARAMETER Experiment Name: At_100uM_ABA_cDNA_P Parameter: Timepoint (hr) Value: 6
  misc_feature: MA Experiment 108605 PARAMETER Experiment Name: At_100uM_ABA_cDNA_P Parameter: Tissue Value: Aerial
  misc_feature: MA Experiment 108605 PARAMETER Experiment Name: At_100uM_ABA_cDNA_P Parameter: Treatment Value: 100uM ABA vs. No Treatment
  misc_feature: MA Experiment ID: 108607 Result: Down-regulated in Transcription
  misc_feature: MA Experiment 108607 PARAMETER Experiment Name: At_100uM_ABA_cDNA_P Parameter: Timepoint (hr) Value: 4
  misc_feature: MA Experiment 108607 PARAMETER Experiment Name: At_100uM_ABA_cDNA_P Parameter: Tissue Value: Aerial
  misc_feature: MA Experiment 108607 PARAMETER Experiment Name: At_100uM_ABA_cDNA_P Parameter: Treatment Value: 100uM ABA vs. No Treatment
  misc_feature: MA Experiment ID: 108609 Result: Down-regulated in Transcription
  misc_feature: MA Experiment 108609 PARAMETER Experiment Name: At_100uM_ABA_cDNA_P Parameter: Timepoint (hr) Value: 24
  misc_feature: MA Experiment 108609 PARAMETER Experiment Name: At_100uM_ABA_cDNA_P Parameter: Tissue Value: Aerial
  misc_feature: MA Experiment 108609 PARAMETER Experiment Name: At_100uM_ABA_cDNA_P Parameter: Treatment Value: 100uM ABA vs. No Treatment
  misc_feature: MA Experiment ID: 20000069 Result: Down-regulated in Transcription
  misc_feature: MA Experiment 20000069 PARAMETER Experiment Name: At_100uM_ABA_Mutants_cDNA_P Parameter: Plant Line Value: CS23
  misc_feature: MA Experiment 20000069 PARAMETER Experiment Name: At_100uM_ABA_Mutants_cDNA_P Parameter: Timepoint (hr) Value: 6
  misc_feature: MA Experiment 20000069 PARAMETER Experiment Name: At_100uM_ABA_Mutants_cDNA_P Parameter: Tissue Value: Aerial
  misc_feature: MA Experiment 20000069 PARAMETER Experiment Name: At_100uM_ABA_Mutants_cDNA_P Parameter: Treatment Value: 100uM ABA vs. No Treatment
  misc_feature: MA Experiment ID: 20000070 Result: Down-regulated in Transcription
  misc_feature: MA Experiment 20000070 PARAMETER Experiment Name: At_100uM_ABA_Mutants_cDNA_P Parameter: Plant Line Value: CS24
  misc_feature: MA Experiment 20000070 PARAMETER Experiment Name: At_100uM_ABA_Mutants_cDNA_P Parameter: Timepoint (hr) Value: 6
  misc_feature: MA Experiment 20000070 PARAMETER Experiment Name: At_100uM_ABA_Mutants_cDNA_P Parameter: Tissue Value: Aerial
  misc_feature: MA Experiment 20000070 PARAMETER Experiment Name: At_100uM_ABA_Mutants_cDNA_P Parameter: Treatment Value: 100uM ABA vs. No Treatment
  misc_feature: MA Experiment ID: 20000072 Result: Down-regulated in Transcription
  misc_feature: MA Experiment 20000072 PARAMETER Experiment Name: At_100uM_ABA_Mutants_cDNA_P Parameter: Plant Line Value: CS8105
  misc_feature: MA Experiment 20000072 PARAMETER Experiment Name: At_100uM_ABA_Mutants_cDNA_P Parameter: Timepoint (hr) Value: 6
  misc_feature: MA Experiment 20000072 PARAMETER Experiment Name: At_100uM_ABA_Mutants_cDNA_P Parameter: Tissue Value: Aerial
  misc_feature: MA Experiment 20000072 PARAMETER Experiment Name: At_100uM_ABA_Mutants_cDNA_P Parameter: Treatment Value: 100uM ABA vs. No Treatment
  misc_feature: MA Experiment ID: 20000086 Result: Down-regulated in Transcription
  misc_feature: MA Experiment 20000086 PARAMETER Experiment Name: At_100uM_ABA_Mutants_cDNA_P Parameter: Plant Line Value: CS22
  misc_feature: MA Experiment 20000086 PARAMETER Experiment Name: At_100uM_ABA_Mutants_cDNA_P Parameter: Timepoint (hr) Value: 6
  misc_feature: MA Experiment 20000086 PARAMETER Experiment Name: At_100uM_ABA_Mutants_cDNA_P Parameter: Tissue Value: Aerial
  misc_feature: MA Experiment 20000086 PARAMETER Experiment Name: At_100uM_ABA_Mutants_cDNA_P Parameter: Treatment Value: 100uM ABA vs. No Treatment
  misc_feature: MA Experiment ID: 20000087 Result: Down-regulated in Transcription
  misc_feature: MA Experiment 20000087 PARAMETER Experiment Name: At_100uM_ABA_Mutants_cDNA_P Parameter: Plant Line Value: WS
  misc_feature: MA Experiment 20000087 PARAMETER Experiment Name: At_100uM_ABA_Mutants_cDNA_P Parameter: Timepoint (hr) Value: 6
  misc_feature: MA Experiment 20000087 PARAMETER Experiment Name: At_100uM_ABA_Mutants_cDNA_P Parameter: Tissue Value: Aerial
  misc_feature: MA Experiment 20000087 PARAMETER Experiment Name: At_100uM_ABA_Mutants_cDNA_P Parameter: Treatment Value: 100uM ABA vs. No Treatment
  misc_feature: MA Experiment ID: 20000088 Result: Down-regulated in Transcription
  misc_feature: MA Experiment 20000088 PARAMETER Experiment Name: At_100uM_ABA_Mutants_cDNA_P Parameter: Plant Line Value: Landsberg
  misc_feature: MA Experiment 20000088 PARAMETER Experiment Name: At_100uM_ABA_Mutants_cDNA_P Parameter: Timepoint (hr) Value: 6
  misc_feature: MA Experiment 20000088 PARAMETER Experiment Name: At_100uM_ABA_Mutants_cDNA_P Parameter: Tissue Value: Aerial
  misc_feature: MA Experiment 20000088 PARAMETER Experiment Name: At_100uM_ABA_Mutants_cDNA_P Parameter: Treatment Value: 100uM ABA vs. No Treatment
  misc_feature: MA Experiment ID: 20000111 Result: Down-regulated in Transcription
  misc_feature: MA Experiment 20000111 PARAMETER Experiment Name: At_42deg_Heat_cDNA_P Parameter: Temperature (deg C) Value: 42 vs. 22
  misc_feature: MA Experiment 20000111 PARAMETER Experiment Name: At_42deg_Heat_cDNA_P Parameter: Timepoint (hr) Value: 6
  misc_feature: MA Experiment 20000111 PARAMETER Experiment Name: At_42deg_Heat_cDNA_P Parameter: Tissue Value: Aerial
  misc_feature: MA Experiment ID: 20000112 Result: Down-regulated in Transcription
  misc_feature: MA Experiment 20000112 PARAMETER Experiment Name: At_42deg_Heat_cDNA_P Parameter: Temperature (deg C) Value: 42 vs. 22
  misc_feature: MA Experiment 20000112 PARAMETER Experiment Name: At_42deg_Heat_cDNA_P Parameter: Timepoint (hr) Value: 2
  misc_feature: MA Experiment 20000112 PARAMETER Experiment Name: At_42deg_Heat_cDNA_P Parameter: Tissue Value: Aerial
  misc_feature: MA Experiment ID: 20000117 Result: Down-regulated in Transcription
  misc_feature: MA Experiment 20000117 PARAMETER Experiment Name: At_100uM_ABA_Mutants_cDNA_P Parameter: Plant Line Value: Columbia
  misc_feature: MA Experiment 20000117 PARAMETER Experiment Name: At_100uM_ABA_Mutants_cDNA_P Parameter: Timepoint (hr) Value: 6
  misc_feature: MA Experiment 20000117 PARAMETER Experiment Name: At_100uM_ABA_Mutants_cDNA_P Parameter: Tissue Value: Aerial
  misc_feature: MA Experiment 20000117 PARAMETER Experiment Name: At_100uM_ABA_Mutants_cDNA_P Parameter: Treatment Value: 100uM ABA vs. No Treatment
  misc_feature: MA Experiment ID: 20000169 Result: Down-regulated in Transcription
  misc_feature: MA Experiment 20000169 PARAMETER Experiment Name: At_100uM_ABA_P Parameter: Age (day) Value: 14
  misc_feature: MA Experiment 20000169 PARAMETER Experiment Name: At_100uM_ABA_P Parameter: Organism Value: A. thaliana
  misc_feature: MA Experiment 20000169 PARAMETER Experiment Name: At_100uM_ABA_P Parameter: Plant Line Value: WS
  misc_feature: MA Experiment 20000169 PARAMETER Experiment Name: At_100uM_ABA_P Parameter: Timepoint (hr) Value: 6
  misc_feature: MA Experiment 20000169 PARAMETER Experiment Name: At_100uM_ABA_P Parameter: Tissue Value: Aerial
  misc_feature: MA Experiment 20000169 PARAMETER Experiment Name: At_100uM_ABA_P Parameter: Treatment Value: 100uM ABA vs. No Treatment
  misc_feature: MA Experiment ID: 20000180 Result: Down-regulated in Transcription
  misc_feature: MA Experiment 20000180 PARAMETER Experiment Name: At_Germinating_Seeds_P Parameter: Age (hr) Value: 24 vs. 0
  misc_feature: MA Experiment 20000180 PARAMETER Experiment Name: At_Germinating_Seeds_P Parameter: Tissue Value: Germinating Seeds
  misc_feature: MA Experiment ID: 20000184 Result: Up-regulated in Transcription
  misc_feature: MA Experiment 20000184 PARAMETER Experiment Name: At_Shoots__P Parameter: Age (day) Value: 7
  misc_feature: MA Experiment 20000184 PARAMETER Experiment Name: At_Shoots__P Parameter: Tissue Value: Shoots vs. Whole Plant
  misc_feature: MA Experiment ID: 20000267 Result: Down-regulated in Transcription
  misc_feature: MA Experiment 20000267 PARAMETER Experiment Name: At_Drought_P Parameter: Age (day) Value: 7
  misc_feature: MA Experiment 20000267 PARAMETER Experiment Name: At_Drought_P Parameter: Organism Value: A. thaliana
  misc_feature: MA Experiment 20000267 PARAMETER Experiment Name: At_Drought_P Parameter: Plant Line Value: WS
  misc_feature: MA Experiment 20000267 PARAMETER Experiment Name: At_Drought_P Parameter: Timepoint (hr) Value: 6
  misc_feature: MA Experiment 20000267 PARAMETER Experiment Name: At_Drought_P Parameter: Tissue Value: Whole Plant
  misc_feature: MA Experiment 20000267 PARAMETER Experiment Name: At_Drought_P Parameter: Treatment Value: Drought vs. No Drought
  misc_feature: MA Experiment ID: 20000286 Result: Up-regulated in Transcription
  misc_feature: MA Experiment 20000286 PARAMETER Experiment Name: At_Open_Flower_P Parameter: Age (day) Value: 21
  misc_feature: MA Experiment 20000286 PARAMETER Experiment Name: At_Open_Flower_P Parameter: Plant Line Value: WS
  misc_feature: MA Experiment 20000286 PARAMETER Experiment Name: At_Open_Flower_P Parameter: Tissue Value: Half Open vs. Whole Plant
  misc_feature: MA Experiment ID: 20000436 Result: Down-regulated in Transcription
  misc_feature: MA Experiment 20000436 PARAMETER Experiment Name: At_Drought_P Parameter: Age (day) Value: 7
  misc_feature: MA Experiment 20000436 PARAMETER Experiment Name: At_Drought_P Parameter: Organism Value: A. thaliana
  misc_feature: MA Experiment 20000436 PARAMETER Experiment Name: At_Drought_P Parameter: Plant Line Value: WS
  misc_feature: MA Experiment 20000436 PARAMETER Experiment Name: At_Drought_P Parameter: Timepoint (hr) Value: 12
  misc_feature: MA Experiment 20000436 PARAMETER Experiment Name: At_Drought_P Parameter: Tissue Value: Whole Plant
  misc_feature: MA Experiment 20000436 PARAMETER Experiment Name: At_Drought_P Parameter: Treatment Value: Drought vs. No Drought
  misc_feature: MA Experiment ID: 20000437 Result: Down-regulated in Transcription
  misc_feature: MA Experiment 20000437 PARAMETER Experiment Name: At_Drought_P Parameter: Age (day) Value: 8
  misc_feature: MA Experiment 20000437 PARAMETER Experiment Name: At_Drought_P Parameter: Organism Value: A. thaliana
  misc_feature: MA Experiment 20000437 PARAMETER Experiment Name: At_Drought_P Parameter: Plant Line Value: WS
  misc_feature: MA Experiment 20000437 PARAMETER Experiment Name: At_Drought_P Parameter: Timepoint (hr) Value: 24
  misc_feature: MA Experiment 20000437 PARAMETER Experiment Name: At_Drought_P Parameter: Tissue Value: Whole Plant
  misc_feature: MA Experiment 20000437 PARAMETER Experiment Name: At_Drought_P Parameter: Treatment Value: Drought vs. No Drought
  misc_feature: MA Experiment ID: 20000438 Result: Up-regulated in Transcription
  misc_feature: MA Experiment 20000438 PARAMETER Experiment Name: At_Shoots__P Parameter: Age (day) Value: 14
  misc_feature: MA Experiment 20000438 PARAMETER Experiment Name: At_Shoots__P Parameter: Tissue Value: Shoots vs. Whole Plant
  misc_feature: MA Experiment ID: 20000451 Result: Up-regulated in Transcription
  misc_feature: MA Experiment 20000451 PARAMETER Experiment Name: At_CS6879_Shoots-Roots_P Parameter: Age (day) Value: 14
  misc_feature: MA Experiment 20000451 PARAMETER Experiment Name: At_CS6879_Shoots-Roots_P Parameter: Organism Value: A. thaliana
  misc_feature: MA Experiment 20000451 PARAMETER Experiment Name: At_CS6879_Shoots-Roots_P Parameter: Plant Line Value: CS6879 vs. WS
  misc_feature: MA Experiment 20000451 PARAMETER Experiment Name: At_CS6879_Shoots-Roots_P Parameter: Tissue Value: Roots
  misc_feature: MA Experiment ID: 20000453 Result: Down-regulated in Transcription
  misc_feature: MA Experiment 20000453 PARAMETER Experiment Name: At_100uM_ABA_P Parameter: Age (day) Value: 15
  misc_feature: MA Experiment 20000453 PARAMETER Experiment Name: At_100uM_ABA_P Parameter: Organism Value: A. thaliana
  misc_feature: MA Experiment 20000453 PARAMETER Experiment Name: At_100uM_ABA_P Parameter: Plant Line Value: WS
  misc_feature: MA Experiment 20000453 PARAMETER Experiment Name: At_100uM_ABA_P Parameter: Timepoint (hr) Value: 24
  misc_feature: MA Experiment 20000453 PARAMETER Experiment Name: At_100uM_ABA_P Parameter: Tissue Value: Aerial
  misc_feature: MA Experiment 20000453 PARAMETER Experiment Name: At_100uM_ABA_P Parameter: Treatment Value: 100uM ABA vs. No Treatment
  misc_feature: MA Experiment ID: 20000573 Result: Down-regulated in Transcription
  misc_feature: MA Experiment 20000573 PARAMETER Experiment Name: At_100uM_ABA_Mutants__P Parameter: Organism Value: A. thaliana
  misc_feature: MA Experiment 20000573 PARAMETER Experiment Name: At_100uM_ABA_Mutants__P Parameter: Plant Line Value: CS22 vs. Ler wt
  misc_feature: MA Experiment 20000573 PARAMETER Experiment Name: At_100uM_ABA_Mutants__P Parameter: Timepoint (hr) Value: N/A
  misc_feature: MA Experiment 20000573 PARAMETER Experiment Name: At_100uM_ABA_Mutants__P Parameter: Tissue Value: Whole Plant
  misc_feature: MA Experiment 20000573 PARAMETER Experiment Name: At_100uM_ABA_Mutants__P Parameter: Treatment Value: None
  misc_feature: MA Experiment ID: 20001248 Result: Up-regulated in Transcription
  misc_feature: MA Experiment 20001248 PARAMETER Experiment Name: At_Far-red-induction_P Parameter: Age (day) Value: 7
  misc_feature: MA Experiment 20001248 PARAMETER Experiment Name: At_Far-red-induction_P Parameter: Light Value: Far-red vs. White
  misc_feature: MA Experiment 20001248 PARAMETER Experiment Name: At_Far-red-induction_P Parameter: Organism Value: A. thaliana
  misc_feature: MA Experiment 20001248 PARAMETER Experiment Name: At_Far-red-induction_P Parameter: Plant Line Value: Columbia
  misc_feature: MA Experiment 20001248 PARAMETER Experiment Name: At_Far-red-induction_P Parameter: Timepoint (hr) Value: 4
  misc_feature: MA Experiment 20001248 PARAMETER Experiment Name: At_Far-red-induction_P Parameter: Tissue Value: Whole Plant
  misc_feature: MA Experiment ID: 20001450 Result: Up-regulated in Transcription
  misc_feature: MA Experiment 20001450 PARAMETER Experiment Name: At_Far-red-induction_P Parameter: Age (day) Value: 7
  misc_feature: MA Experiment 20001450 PARAMETER Experiment Name: At_Far-red-induction_P Parameter: Light Value: Far-red vs. White
  misc_feature: MA Experiment 20001450 PARAMETER Experiment Name: At_Far-red-induction_P Parameter: Organism Value: A. thaliana
  misc_feature: MA Experiment 20001450 PARAMETER Experiment Name: At_Far-red-induction_P Parameter: Plant Line Value: Columbia
  misc_feature: MA Experiment 20001450 PARAMETER Experiment Name: At_Far-red-induction_P Parameter: Timepoint (hr) Value: 8
  misc_feature: MA Experiment 20001450 PARAMETER Experiment Name: At_Far-red-induction_P Parameter: Tissue Value: Whole Plant
  misc_feature: MA Experiment ID: 20001554 Result: Down-regulated in Transcription
  misc_feature: MA Experiment 20001554 PARAMETER Experiment Name: At_Drought_Soil_Dry_P Parameter: Age (day) Value: 21
  misc_feature: MA Experiment 20001554 PARAMETER Experiment Name: At_Drought_Soil_Dry_P Parameter: Organism Value: A. thaliana
  misc_feature: MA Experiment 20001554 PARAMETER Experiment Name: At_Drought_Soil_Dry_P Parameter: Plant Line Value: WS
  misc_feature: MA Experiment 20001554 PARAMETER Experiment Name: At_Drought_Soil_Dry_P Parameter: Post Timepoint (hr) Value: None
  misc_feature: MA Experiment 20001554 PARAMETER Experiment Name: At_Drought_Soil_Dry_P Parameter: Post-Treatment Value: None
  misc_feature: MA Experiment 20001554 PARAMETER Experiment Name: At_Drought_Soil_Dry_P Parameter: Timepoint (day) Value: 7
  misc_feature: MA Experiment 20001554 PARAMETER Experiment Name: At_Drought_Soil_Dry_P Parameter: Treatment Value: Drought vs. No Drought
  misc_feature: MA Experiment ID: 20001555 Result: Down-regulated in Transcription
  misc_feature: MA Experiment 20001555 PARAMETER Experiment Name: At_Drought_Soil_Dry_P Parameter: Age (day) Value: 24
  misc_feature: MA Experiment 20001555 PARAMETER Experiment Name: At_Drought_Soil_Dry_P Parameter: Organism Value: A. thaliana
  misc_feature: MA Experiment 20001555 PARAMETER Experiment Name: At_Drought_Soil_Dry_P Parameter: Plant Line Value: WS
  misc_feature: MA Experiment 20001555 PARAMETER Experiment Name: At_Drought_Soil_Dry_P Parameter: Post Timepoint (hr) Value: None
  misc_feature: MA Experiment 20001555 PARAMETER Experiment Name: At_Drought_Soil_Dry_P Parameter: Post-Treatment Value: None
  misc_feature: MA Experiment 20001555 PARAMETER Experiment Name: At_Drought_Soil_Dry_P Parameter: Timepoint (day) Value: 10
  misc_feature: MA Experiment 20001555 PARAMETER Experiment Name: At_Drought_Soil_Dry_P Parameter: Treatment Value: Drought vs. No Drought
  misc_feature: MA Experiment ID: 20001556 Result: Down-regulated in Transcription
  misc_feature: MA Experiment 20001556 PARAMETER Experiment Name: At_Drought_Soil_Dry_P Parameter: Age (day) Value: 26
  misc_feature: MA Experiment 20001556 PARAMETER Experiment Name: At_Drought_Soil_Dry_P Parameter: Organism Value: A. thaliana
  misc_feature: MA Experiment 20001556 PARAMETER Experiment Name: At_Drought_Soil_Dry_P Parameter: Plant Line Value: WS
  misc_feature: MA Experiment 20001556 PARAMETER Experiment Name: At_Drought_Soil_Dry_P Parameter: Post Timepoint (hr) Value: None
  misc_feature: MA Experiment 20001556 PARAMETER Experiment Name: At_Drought_Soil_Dry_P Parameter: Post-Treatment Value: None
  misc_feature: MA Experiment 20001556 PARAMETER Experiment Name: At_Drought_Soil_Dry_P Parameter: Timepoint (day) Value: 12
  misc_feature: MA Experiment 20001556 PARAMETER Experiment Name: At_Drought_Soil_Dry_P Parameter: Treatment Value: Drought vs. No Drought
  misc_feature: MA Experiment ID: 20001557 Result: Up-regulated in Transcription
  misc_feature: MA Experiment 20001557 PARAMETER Experiment Name: At_Drought_Soil_Dry_P Parameter: Age (day) Value: 27
  misc_feature: MA Experiment 20001557 PARAMETER Experiment Name: At_Drought_Soil_Dry_P Parameter: Organism Value: A. thaliana
  misc_feature: MA Experiment 20001557 PARAMETER Experiment Name: At_Drought_Soil_Dry_P Parameter: Plant Line Value: WS
  misc_feature: MA Experiment 20001557 PARAMETER Experiment Name: At_Drought_Soil_Dry_P Parameter: Post Timepoint (hr) Value: 3
  misc_feature: MA Experiment 20001557 PARAMETER Experiment Name: At_Drought_Soil_Dry_P Parameter: Post-Treatment Value: Re-Water vs. No Drought
  misc_feature: MA Experiment 20001557 PARAMETER Experiment Name: At_Drought_Soil_Dry_P Parameter: Timepoint (day) Value: 13
  misc_feature: MA Experiment 20001557 PARAMETER Experiment Name: At_Drought_Soil_Dry_P Parameter: Treatment Value: Drought vs. No Drought
  misc_feature: MA Experiment ID: 20001558 Result: Up-regulated in Transcription
  misc_feature: MA Experiment 20001558 PARAMETER Experiment Name: At_Drought_Soil_Dry_P Parameter: Age (day) Value: 27
  misc_feature: MA Experiment 20001558 PARAMETER Experiment Name: At_Drought_Soil_Dry_P Parameter: Organism Value: A. thaliana
  misc_feature: MA Experiment 20001558 PARAMETER Experiment Name: At_Drought_Soil_Dry_P Parameter: Plant Line Value: WS
  misc_feature: MA Experiment 20001558 PARAMETER Experiment Name: At_Drought_Soil_Dry_P Parameter: Post Timepoint (hr) Value: 6
  misc_feature: MA Experiment 20001558 PARAMETER Experiment Name: At_Drought_Soil_Dry_P Parameter: Post-Treatment Value: Re-Water vs. No Drought
  misc_feature: MA Experiment 20001558 PARAMETER Experiment Name: At_Drought_Soil_Dry_P Parameter: Timepoint (day) Value: 13
  misc_feature: MA Experiment 20001558 PARAMETER Experiment Name: At_Drought_Soil_Dry_P Parameter: Treatment Value: Drought vs. No Drought
  misc_feature: MA Experiment ID: 20001559 Result: Down-regulated in Transcription
  misc_feature: MA Experiment 20001559 PARAMETER Experiment Name: At_Drought_Soil_Dry_P Parameter: Age (day) Value: 28
  misc_feature: MA Experiment 20001559 PARAMETER Experiment Name: At_Drought_Soil_Dry_P Parameter: Organism Value: A. thaliana
  misc_feature: MA Experiment 20001559 PARAMETER Experiment Name: At_Drought_Soil_Dry_P Parameter: Plant Line Value: WS
  misc_feature: MA Experiment 20001559 PARAMETER Experiment Name: At_Drought_Soil_Dry_P Parameter: Post Timepoint (hr) Value: 29
  misc_feature: MA Experiment 20001559 PARAMETER Experiment Name: At_Drought_Soil_Dry_P Parameter: Post-Treatment Value: Re-Water vs. No Drought
  misc_feature: MA Experiment 20001559 PARAMETER Experiment Name: At_Drought_Soil_Dry_P Parameter: Timepoint (day) Value: 14
  misc_feature: MA Experiment 20001559 PARAMETER Experiment Name: At_Drought_Soil_Dry_P Parameter: Treatment Value: Drought vs. No Drought
  misc_feature: MA Experiment ID: 20001757 Result: Up-regulated in Transcription
  misc_feature: MA Experiment 20001757 PARAMETER Experiment Name: At_50mM_NH4NO3_L-to-H_P Parameter: Timepoint (hr) Value: 6
  misc_feature: MA Experiment 20001757 PARAMETER Experiment Name: At_50mM_NH4NO3_L-to-H_P Parameter: Tissue Value: Leaf
  misc_feature: MA Experiment 20001757 PARAMETER Experiment Name: At_50mM_NH4NO3_L-to-H_P Parameter: Treatment Value: 50mM NH4NO3 vs 100mM Mannitol
  misc_feature: MA Experiment ID: 20001905 Result: Down-regulated in Transcription
  misc_feature: MA Experiment 20001905 PARAMETER Experiment Name: At_Drought_Reproduction_P Parameter: Age (day) Value: 40
  misc_feature: MA Experiment 20001905 PARAMETER Experiment Name: At_Drought_Reproduction_P Parameter: Organism Value: A. thaliana
  misc_feature: MA Experiment 20001905 PARAMETER Experiment Name: At_Drought_Reproduction_P Parameter: Plant Line Value: WS
  misc_feature: MA Experiment 20001905 PARAMETER Experiment Name: At_Drought_Reproduction_P Parameter: Timepoint (day) Value: 10
  misc_feature: MA Experiment 20001905 PARAMETER Experiment Name: At_Drought_Reproduction_P Parameter: Tissue Value: Rosettes
  misc_feature: MA Experiment 20001905 PARAMETER Experiment Name: At_Drought_Reproduction_P Parameter: Treatment Value: Drought vs. No Drought
  misc_feature: MA Experiment ID: 20001906 Result: Down-regulated in Transcription
  misc_feature: MA Experiment 20001906 PARAMETER Experiment Name: At_Drought_Reproduction_P Parameter: Age (day) Value: 35
  misc_feature: MA Experiment 20001906 PARAMETER Experiment Name: At_Drought_Reproduction_P Parameter: Organism Value: A. thaliana
  misc_feature: MA Experiment 20001906 PARAMETER Experiment Name: At_Drought_Reproduction_P Parameter: Plant Line Value: WS
  misc_feature: MA Experiment 20001906 PARAMETER Experiment Name: At_Drought_Reproduction_P Parameter: Timepoint (day) Value: 5
  misc_feature: MA Experiment 20001906 PARAMETER Experiment Name: At_Drought_Reproduction_P Parameter: Tissue Value: Siliques
  misc_feature: MA Experiment 20001906 PARAMETER Experiment Name: At_Drought_Reproduction_P Parameter: Treatment Value: Drought vs. No Drought
  misc_feature: MA Experiment ID: 20001908 Result: Down-regulated in Transcription
  misc_feature: MA Experiment 20001908 PARAMETER Experiment Name: At_Drought_Reproduction_P Parameter: Age (day) Value: 40
  misc_feature: MA Experiment 20001908 PARAMETER Experiment Name: At_Drought_Reproduction_P Parameter: Organism Value: A. thaliana
  misc_feature: MA Experiment 20001908 PARAMETER Experiment Name: At_Drought_Reproduction_P Parameter: Plant Line Value: WS
  misc_feature: MA Experiment 20001908 PARAMETER Experiment Name: At_Drought_Reproduction_P Parameter: Timepoint (day) Value: 10
  misc_feature: MA Experiment 20001908 PARAMETER Experiment Name: At_Drought_Reproduction_P Parameter: Tissue Value: Siliques
  misc_feature: MA Experiment 20001908 PARAMETER Experiment Name: At_Drought_Reproduction_P Parameter: Treatment Value: Drought vs. No Drought
  misc_feature: MA Experiment ID: 20001911 Result: Down-regulated in Transcription
  misc_feature: MA Experiment 20001911 PARAMETER Experiment Name: At_Drought_Reproduction_P Parameter: Age (day) Value: 40
  misc_feature: MA Experiment 20001911 PARAMETER Experiment Name: At_Drought_Reproduction_P Parameter: Organism Value: A. thaliana
  misc_feature: MA Experiment 20001911 PARAMETER Experiment Name: At_Drought_Reproduction_P Parameter: Plant Line Value: WS
  misc_feature: MA Experiment 20001911 PARAMETER Experiment Name: At_Drought_Reproduction_P Parameter: Timepoint (day) Value: 10
  misc_feature: MA Experiment 20001911 PARAMETER Experiment Name: At_Drought_Reproduction_P Parameter: Tissue Value: Flowers
  misc_feature: MA Experiment 20001911 PARAMETER Experiment Name: At_Drought_Reproduction_P Parameter: Treatment Value: Drought vs. No Drought
aattacattttacactcatctcgttctctcttccgtcaatatggaaggcgtcaccgtcgtgtctttcttccttcttttcatcgccaccgccatggccgccaagtccaccgtctccttccgtgacggcatgttaccaaacggagacttcgagctaggaccaaaaccatcagacatgaaaggaacagaaatactaaacaaactagcaataccaaactgggaagtcacaggattcgtcgaatacattaaatcaggacataaacaaggagacatgcttctcgttgttcccgccggtaaattcgcttgctgctagaacttgtgcacaagacgagagacttaacatatctgtagcacctgactccggtgtgattccgattcagacggtttatagtagtagtggttgggatttatatgcttgggcgtttcaagctgagagtgatgttgctgaagttgtgattcataatcctggtgttgaggaagatccagcttgtggtccacttattgatggtgttgctatgagatctctttaccctcctagaccaactaataagaacattttgaaaaacggaggatttgaagaaggtccattagtattacccggctcgacaactggagttttgatcccaccgtttatagaagacgaccactctcctttacctggatggatggtggagtctctcaaagctgtcaagtacgtagacgttgaacatttctcagtcccacagggtcgcagagctattgagcttgtagcgggtaaagagagtgccatcgctcaagtggttcggactgtcattgggaagacttacgtgctgtcttttgcggttggagacgccaacaatgcttgcaaaggatcaatggtggttgaggcttttgcaggaaaagatacacttaaggtcccttacgagtcgaaaggcacaggagggtttaaacgagcttctattcgatttgtggcggtttcgacccgatcaagaattatgttctacagcactttctatgccatgaggagcgatgatttctcgtcattgtgtgggcctgtgatcgatgatgtcaagcttataagcgttcgtaaaccatagatgaatcaccaatcctattacaagaaaatgcatcgtgtggtcttcttttattttccttaaactgtctttggtgtgtgttggattttattgaaacgagaaggtgaaaaaaacagagttttatttacgagagttagggttttatataggcagatgggcctttgcttatattgtattttc

SEQ ID NO: 72782 - protein, 186 aa, Arabidopsis thaliana
  peptide (1)..(186): Ceres Seq. ID no. 4946682
  misc_feature (1)..(184): Pfam Name: Protein of unknown function, DUF642 Pfam Description: Protein of unknown function, DUF642
  misc_feature (1)..(186): Homolog of NCBI NO: 15239438 NR Description: putative protein; protein id: At5g25460.1, by cDNA: 1351., supported by cDNA: gi_14423449, supported by gi_15809821 [Arabidopsis thaliana]
  misc_feature (1)..(186): Homolog of NCBI NO: 15809822 NR Description: AT5g25460/F18G18_200 [Arabidopsis thaliana]
  misc_feature (1)..(186): Homolog of NCBI NO: 21537379 NR Description: unknown [Arabidopsis thaliana]
  misc_feature (1)..(186): Homolog of NCBI NO: 15239049 NR Description: putative protein; protein id: At5g11420.1, by cDNA: 25522., supported by cDNA: gi_15028264, supported by
  misc_feature (1)..(186): Homolog of NCBI NO: 23397043 NR Description: unknown protein [Arabidopsis thaliana]
  misc_feature (1)..(186): Homolog of NCBI NO: 21554402 NR Description: unknown [Arabidopsis thaliana]
  misc_feature (1)..(186): Homolog of NCBI NO: 18418018 NR Description: putative protein; protein id: At4g32460.1, by cDNA: 37529. [Arabidopsis thaliana]
  misc_feature (1)..(186): Homolog of NCBI NO: 7488898 NR Description: hypothetical protein - castor bean
  misc_feature (1)..(186): Homolog of NCBI NO: 7486632 NR Description: hypothetical protein F8B4.160 - Arabidopsis >gi|4049348|emb|CAA22573.1| putative protein [Arabidopsis >gi|7270150|emb|CAB79963.1| putative protein [Arabidopsis
  misc_feature (1)..(185): Homolog of NCBI NO: 7488741 NR Description: hypothetical protein precursor - alfalfa
MRSLYPPRPTNKNILKNGGFEEGPLVLPGSTTGVLIPPFIEDDHSPLPGWMVESLKAVKYVDVEHFSVPQGRRAIELVAGKESAIAQVVRTVIGKTYVLSFAVGDANNACKGSMVVEAFAGKDTLKVPYESKGTGGFKRASIRFVAVSTRSRIMFYSTFYAMRSDDFSSLCGPVIDDVKLISVRKP

SEQ ID NO: 72783 - protein, 136 aa, Arabidopsis thaliana
  peptide (1)..(136): Ceres Seq. ID no. 4946683
  misc_feature (1)..(134): Pfam Name: Protein of unknown function, DUF642 Pfam Description: Protein of unknown function, DUF642
  misc_feature (1)..(136): Homolog of NCBI NO: 15239438 NR Description: putative protein; protein id: At5g25460.1, by cDNA: 1351., supported by cDNA: gi_14423449, supported by gi_15809821 [Arabidopsis thaliana]
  misc_feature (1)..(136): Homolog of NCBI NO: 15809822 NR Description: AT5g25460/F18G18_200 [Arabidopsis thaliana]
  misc_feature (1)..(136): Homolog of NCBI NO: 21537379 NR Description: unknown [Arabidopsis thaliana]
  misc_feature (1)..(136): Homolog of NCBI NO: 15239049 NR Description: putative protein; protein id: At5g11420.1, by cDNA: 25522., supported by cDNA: gi_15028264, supported by
  misc_feature (1)..(136): Homolog of NCBI NO: 23397043 NR Description: unknown protein [Arabidopsis thaliana]
  misc_feature (1)..(136): Homolog of NCBI NO: 21554402 NR Description: unknown [Arabidopsis thaliana]
  misc_feature (1)..(136): Homolog of NCBI NO: 18418018 NR Description: putative protein; protein id: At4g32460.1, by cDNA: 37529. [Arabidopsis thaliana]
  misc_feature (1)..(136): Homolog of NCBI NO: 7488898 NR Description: hypothetical protein - castor bean
  misc_feature (1)..(136): Homolog of NCBI NO: 7486632 NR Description: hypothetical protein F8B4.160 - Arabidopsis >gi|4049348|emb|CAA22573.1| putative protein [Arabidopsis >gi|7270150|emb|CAB79963.1| putative protein [Arabidopsis
  misc_feature (1)..(135): Homolog of NCBI NO: 7488741 NR Description: hypothetical protein precursor - alfalfa
MVESLKAVKYVDVEHFSVPQGRRAIELVAGKESAIAQVVRTVIGKTYVLSFAVGDANNACKGSMVVEAFAGKDTLKVPYESKGTGGFKRASIRFVAVSTRSRIMFYSTFYAMRSDDFSSLCGPVIDDVKLISVRKP

SEQ ID NO: 72784 - protein, 102 aa, Arabidopsis thaliana; identical to SEQ ID NO: 42800
  peptide (1)..(102): Ceres Seq. ID no. 4946684
  misc_feature (14)..(100): Homolog of NCBI NO: 15239438 NR Description: putative protein; protein id: At5g25460.1, by cDNA: 1351., supported by cDNA: gi_14423449, supported by gi_15809821 [Arabidopsis thaliana]
  misc_feature (14)..(100): Homolog of NCBI NO: 15809822 NR Description: AT5g25460/F18G18_200 [Arabidopsis thaliana]
  misc_feature (14)..(100): Homolog of NCBI NO: 21537379 NR Description: unknown [Arabidopsis thaliana]
  misc_feature (14)..(100): Homolog of NCBI NO: 15239049 NR Description: putative protein; protein id: At5g11420.1, by cDNA: 25522., supported by cDNA: gi_15028264, supported by
  misc_feature (14)..(100): Homolog of NCBI NO: 23397043 NR Description: unknown protein [Arabidopsis thaliana]
  misc_feature (14)..(100): Homolog of NCBI NO: 21554402 NR Description: unknown [Arabidopsis thaliana]
  misc_feature (39)..(100): Homolog of NCBI NO: 18418018 NR Description: putative protein; protein id: At4g32460.1, by cDNA: 37529. [Arabidopsis thaliana]
  misc_feature (24)..(100): Homolog of NCBI NO: 7488898 NR Description: hypothetical protein - castor bean
  misc_feature (58)..(100): Homolog of NCBI NO: 7486632 NR Description: hypothetical protein F8B4.160 - Arabidopsis >gi|4049348|emb|CAA22573.1| putative protein [Arabidopsis >gi|7270150|emb|CAB79963.1| putative protein [Arabidopsis
  misc_feature (13)..(100): Homolog of NCBI NO: 7488741 NR Description: hypothetical protein precursor - alfalfa

SEQ ID NO: 72785 - DNA, 1005 bp, Arabidopsis thaliana
  misc_feature (1)..(1005): Ceres Seq. ID no. 4946723
  misc_feature: MA Experiment ID: 20000440 Result: Up-regulated in Transcription
  misc_feature: MA Experiment 20000440 PARAMETER Experiment Name: At_Closed-Flower__Sub_P Parameter: Tissue Value: Closed Flower vs. Whole Plant
atggagaagaggtttaaggtgtatgtatacgaagaaggcgagccaccgctagttcacgatggaccgtgtaagagtgtttacgcggttgaagggagattcataactgagatggagaaaagaaggactaagtttcgtacttatgatcctaaccaagcttatgtttacttcttgccatttagtgttacttggctggttcgatacttatacgaaggcaattctgatgctaagcctttgaaaacatttgtttccgattatatcagattagtatctactaatcatcctttttggaatcgaactaatggtgctgatcacttcatgcttacttgtcacgattggggacctctgacttcacaagctaatagagatttgttcaacacttcgattcgagttatgtgtaatgctaattcatcagaagggtttaatcctactaaagatgtgactcttcctgagatcaaactctatggtggtgaagttgatcacaaactcaggttatctaaaaccttatccgcttctccgcggccttacctcgggttcttcgcaggcggtgtccacggtccggttagaccgattcttttaaaacactggaaacagcgtgacctggatatgcctgtttatgaataccttcctaaacacttaaactactatgatttcatgagaagttcaaagttctgtttttgtcccagtgggtatgaggtagctagtcctcgagtcatcgaagccatctactctgagtgtatccccgtcattctctcggttaacttcgtgttaccattcactgatgttcttcgttgggagactttctctgtactggtcgacgtttcagagattccgaggttgaaggagattctcatgtcgatctccaatgagaaatatgaatggcttaaaagtaacttgaggtatgtgaggagacatttcgagcttaacgatcctcctcagagatttgatgcatttcacttgactcttcattccatttggttacgtagacttaacttgaagcttacgtaa

SEQ ID NO: 72786 - protein, 334 aa, Arabidopsis thaliana
  peptide (1)..(334): Ceres Seq. ID no. 4946724
  misc_feature (7)..(291): Pfam Name: Exostosin family Pfam Description: Exostosin family
  misc_feature (1)..(334): Homolog of NCBI NO: 15239388 NR Description: Exostosin family; protein id: At5g25310.1
  misc_feature (1)..(333): Homolog of NCBI NO: 34394611 NR Description: putative pectin-glucuronyltransferase [Oryza
  misc_feature (1)..(333): Homolog of NCBI NO: 9758008 NR Description: contains similarity to limonene
  misc_feature (1)..(333): Homolog of NCBI NO: 15237526 NR Description: putative protein; protein id: At5g03800.1
  misc_feature (1)..(333): Homolog of NCBI NO: 38345576 NR Description: OSJNBa0027H06.12 [Oryza sativa (japonica
  misc_feature (1)..(333): Homolog of NCBI NO: 15231488 NR Description: Exostosin family; protein id: At3g07620.1 thaliana] >gi|6466945|gb|AAF13080.1|AC009176_7 hypothetical
  misc_feature (1)..(333): Homolog of NCBI NO: 15238967 NR Description: Exostosin family; protein id: At5g11130.1 thaliana] >gi|8953375|emb|CAB96648.1| putative protein
  misc_feature (1)..(333): Homolog of NCBI NO: 15241301 NR Description: Exostosin family; protein id: At5g20260.1
  misc_feature (1)..(333): Homolog of NCBI NO: 15146187 NR Description: AT5g33290/F19N2_10 [Arabidopsis thaliana]
  misc_feature (4)..(333): Homolog of NCBI NO: 15242798 NR Description: Exostosin family; protein id: At5g33290.1
MEKRFKVYVYEEGEPPLVHDGPCKSVYAVEGRFITEMEKRRTKFRTYDPNQAYVYFLPFSVTWLVRYLYEGNSDAKPLKTFVSDYIRLVSTNHPFWNRTNGADHFMLTCHDWGPLTSQANRDLFNTSIRVMCNANSSEGFNPTKDVTLPEIKLYGGEVDHKLRLSKTLSASPRPYLGFFAGGVHGPVRPILLKHWKQRDLDMPVYEYLPKHLNYYDFMRSSKFCFCPSGYEVASPRVIEAIYSECIPVILSVNFVLPFTDVLRWETFSVLVDVSEIPRLKEILMSISNEKYEWLKSNLRYVRRHFELNDPPQRFDAFHLTLHSIWLRRLNLKLT

SEQ ID NO: 72787 - protein, 298 aa, Arabidopsis thaliana
  peptide (1)..(298): Ceres Seq. ID no. 4946725
  misc_feature (1)..(255): Pfam Name: Exostosin family Pfam Description: Exostosin family
  misc_feature (1)..(298): Homolog of NCBI NO: 15239388 NR Description: Exostosin family; protein id: At5g25310.1
  misc_feature (1)..(297): Homolog of NCBI NO: 34394611 NR Description: putative pectin-glucuronyltransferase [Oryza
  misc_feature (1)..(297): Homolog of NCBI NO: 9758008 NR Description: contains similarity to limonene
  misc_feature (1)..(297): Homolog of NCBI NO: 15237526 NR Description: putative protein; protein id: At5g03800.1
  misc_feature (1)..(297): Homolog of NCBI NO: 38345576 NR Description: OSJNBa0027H06.12 [Oryza sativa (japonica
  misc_feature (1)..(297): Homolog of NCBI NO: 15231488 NR Description: Exostosin family; protein id: At3g07620.1 thaliana] >gi|6466945|gb|AAF13080.1|AC009176_7 hypothetical
  misc_feature (1)..(297): Homolog of NCBI NO: 15238967 NR Description: Exostosin family; protein id: At5g11130.1 thaliana] >gi|8953375|emb|CAB96648.1| putative protein
  misc_feature (1)..(297): Homolog of NCBI NO: 15241301 NR Description: Exostosin family; protein id: At5g20260.1
  misc_feature (1)..(297): Homolog of NCBI NO: 15146187 NR Description: AT5g33290/F19N2_10 [Arabidopsis thaliana]
  misc_feature (1)..(297): Homolog of NCBI NO: 15242798 NR Description: Exostosin family; protein id: At5g33290.1
MEKRRTKFRTYDPNQAYVYFLPFSVTWLVRYLYEGNSDAKPLKTFVSDYIRLVSTNHPFWNRTNGADHFMLTCHDWGPLTSQANRDLFNTSIRVMCNANSSEGFNPTKDVTLPEIKLYGGEVDHKLRLSKTLSASPRPYLGFFAGGVHGPVRPILLKHWKQRDLDMPVYEYLPKHLNYYDFMRSSKFCFCPSGYEVASPRVIEAIYSECIPVILSVNFVLPFTDVLRWETFSVLVDVSEIPRLKEILMSISNEKYEWLKSNLRYVRRHFELNDPPQRFDAFHLTLHSIWLRRLNLKLT

SEQ ID NO: 72788 - protein, 229 aa, Arabidopsis thaliana
  peptide (1)..(229): Ceres Seq. ID no. 4946726
  misc_feature (1)..(186): Pfam Name: Exostosin family Pfam Description: Exostosin family
  misc_feature (1)..(229): Homolog of NCBI NO: 15239388 NR Description: Exostosin family; protein id: At5g25310.1
  misc_feature (1)..(228): Homolog of NCBI NO: 34394611 NR Description: putative pectin-glucuronyltransferase [Oryza
  misc_feature (1)..(228): Homolog of NCBI NO: 9758008 NR Description: contains similarity to limonene
  misc_feature (1)..(228): Homolog of NCBI NO: 15237526 NR Description: putative protein; protein id: At5g03800.1
  misc_feature (1)..(228): Homolog of NCBI NO: 38345576 NR Description: OSJNBa0027H06.12 [Oryza sativa (japonica
  misc_feature (1)..(228): Homolog of NCBI NO: 15231488 NR Description: Exostosin family; protein id: At3g07620.1 thaliana] >gi|6466945|gb|AAF13080.1|AC009176_7 hypothetical
  misc_feature (1)..(228): Homolog of NCBI NO: 15238967 NR Description: Exostosin family; protein id: At5g11130.1 thaliana] >gi|8953375|emb|CAB96648.1| putative protein
  misc_feature (1)..(228): Homolog of NCBI NO: 15241301 NR Description: Exostosin family; protein id: At5g20260.1
  misc_feature (1)..(228): Homolog of NCBI NO: 15146187 NR Description: AT5g33290/F19N2_10 [Arabidopsis thaliana]
  misc_feature (1)..(228): Homolog of NCBI NO: 15242798 NR Description: Exostosin family; protein id: At5g33290.1
MLTCHDWGPLTSQANRDLFNTSIRVMCNANSSEGFNPTKDVTLPEIKLYGGEVDHKLRLSKTLSASPRPYLGFFAGGVHGPVRPILLKHWKQRDLDMPVYEYLPKHLNYYDFMRSSKFCFCPSGYEVASPRVIEAIYSECIPVILSVNFVLPFTDVLRWETFSVLVDVSEIPRLKEILMSISNEKYEWLKSNLRYVRRHFELNDPPQRFDAFHLTLHSIWLRRLNLKLT

SEQ ID NO: 72789 - DNA, 1875 bp, Arabidopsis thaliana
  misc_feature (1)..(1875): Ceres Seq. ID no. 4946804
  misc_feature: MA Experiment ID: 108573 Result: Up-regulated in Transcription
  misc_feature: MA Experiment 108573 PARAMETER Experiment Name: At_Drought_cDNA_P Parameter: Timepoint (hr) Value: 6
  misc_feature: MA Experiment 108573 PARAMETER Experiment Name: At_Drought_cDNA_P Parameter: Tissue Value: Aerial
  misc_feature: MA Experiment 108573 PARAMETER Experiment Name: At_Drought_cDNA_P Parameter: Treatment Value: Drought vs. No Drought
  misc_feature: MA Experiment ID: 108577 Result: Down-regulated in Transcription
  misc_feature: MA Experiment 108577 PARAMETER Experiment Name: At_42deg_Heat_cDNA_P Parameter: Temperature (deg C) Value: 42 vs. 22
  misc_feature: MA Experiment 108577 PARAMETER Experiment Name: At_42deg_Heat_cDNA_P Parameter: Timepoint (hr) Value: 6
  misc_feature: MA Experiment 108577 PARAMETER Experiment Name: At_42deg_Heat_cDNA_P Parameter: Tissue Value: Aerial
  misc_feature: MA Experiment ID: 108579 Result: Down-regulated in Transcription
  misc_feature: MA Experiment 108579 PARAMETER Experiment Name: At_4deg_Cold_cDNA_P Parameter: Temperature (deg C) Value: 4 vs. 22
  misc_feature: MA Experiment 108579 PARAMETER Experiment Name: At_4deg_Cold_cDNA_P Parameter: Timepoint (hr) Value: 6
  misc_feature: MA Experiment 108579 PARAMETER Experiment Name: At_4deg_Cold_cDNA_P Parameter: Tissue Value: Aerial
  misc_feature: MA Experiment ID: 108594 Result: Up-regulated in Transcription
  misc_feature: MA Experiment 108594 PARAMETER Experiment Name: At_Ler-rhl_Root_cDNA_P Parameter: Plant Line Value: null
  misc_feature: MA Experiment ID: 20000214 Result: Down-regulated in Transcription
  misc_feature: MA Experiment 20000214 PARAMETER Experiment Name: At_4deg_Cold_P Parameter: Timepoint (hr) Value: 6
  misc_feature: MA Experiment ID: 20000224 Result: Down-regulated in Transcription
  misc_feature: MA Experiment ID: 20001247 Result: Up-regulated in Transcription
  misc_feature: MA Experiment 20001247 PARAMETER Experiment Name: At_Far-red-induction_P Parameter: Age (day) Value: 7
  misc_feature: MA Experiment 20001247 PARAMETER Experiment Name: At_Far-red-induction_P Parameter: Light Value: Far-red vs. White
  misc_feature: MA Experiment 20001247 PARAMETER Experiment Name: At_Far-red-induction_P Parameter: Organism Value: A. thaliana
  misc_feature: MA Experiment 20001247 PARAMETER Experiment Name: At_Far-red-induction_P Parameter: Plant Line Value: Columbia
  misc_feature: MA Experiment 20001247 PARAMETER Experiment Name: At_Far-red-induction_P Parameter: Timepoint (hr) Value: 1
  misc_feature: MA Experiment 20001247 PARAMETER Experiment Name: At_Far-red-induction_P Parameter: Tissue Value: Whole Plant
  misc_feature: MA Experiment ID: 20001248 Result: Up-regulated in Transcription
  misc_feature: MA Experiment 20001248 PARAMETER Experiment Name: At_Far-red-induction_P Parameter: Age (day) Value: 7
  misc_feature: MA Experiment 20001248 PARAMETER Experiment Name: At_Far-red-induction_P Parameter: Light Value: Far-red vs. White
  misc_feature: MA Experiment 20001248 PARAMETER Experiment Name: At_Far-red-induction_P Parameter: Organism Value: A. thaliana
  misc_feature: MA Experiment 20001248 PARAMETER Experiment Name: At_Far-red-induction_P Parameter: Plant Line Value: Columbia
  misc_feature: MA Experiment 20001248 PARAMETER Experiment Name: At_Far-red-induction_P Parameter: Timepoint (hr) Value: 4
  misc_feature: MA Experiment 20001248 PARAMETER Experiment Name: At_Far-red-induction_P Parameter: Tissue Value: Whole Plant
  misc_feature: MA Experiment ID: 20001450 Result: Up-regulated in Transcription
  misc_feature: MA Experiment 20001450 PARAMETER Experiment Name: At_Far-red-induction_P Parameter: Age (day) Value: 7
  misc_feature: MA Experiment 20001450 PARAMETER Experiment Name: At_Far-red-induction_P Parameter: Light Value: Far-red vs. White
  misc_feature: MA Experiment 20001450 PARAMETER Experiment Name: At_Far-red-induction_P Parameter: Organism Value: A. thaliana
  misc_feature: MA Experiment 20001450 PARAMETER Experiment Name: At_Far-red-induction_P Parameter: Plant Line Value: Columbia
  misc_feature: MA Experiment 20001450 PARAMETER Experiment Name: At_Far-red-induction_P Parameter: Timepoint (hr) Value: 8
  misc_feature: MA Experiment 20001450 PARAMETER Experiment Name: At_Far-red-induction_P Parameter: Tissue Value: Whole Plant
  misc_feature: MA Experiment ID: 20001451 Result: Up-regulated in Transcription
  misc_feature: MA Experiment 20001451 PARAMETER Experiment Name: At_Far-red-induction_P Parameter: Age (day) Value: 7
  misc_feature: MA Experiment 20001451 PARAMETER Experiment Name: At_Far-red-induction_P Parameter: Light Value: Far-red vs. White
  misc_feature: MA Experiment 20001451 PARAMETER Experiment Name: At_Far-red-induction_P Parameter: Organism Value: A. thaliana
  misc_feature: MA Experiment 20001451 PARAMETER Experiment Name: At_Far-red-induction_P Parameter: Plant Line Value: Columbia
  misc_feature: MA Experiment 20001451 PARAMETER Experiment Name: At_Far-red-induction_P Parameter: Timepoint (hr) Value: 24
  misc_feature: MA Experiment 20001451 PARAMETER Experiment Name: At_Far-red-induction_P Parameter: Tissue Value: Whole Plant
attcctttttaacaatcttctgcattttcgaacttgctttgctgtgataaagttctctcctttcctttctaaaggaagaagaaaggctttatctctcaaaaccctcatccacaaaatcccctttaatccgctaatcagagggtttttctgtttttgtgttgcttcgttactacggttacattcttctcttccccttttgatttcaaaggtacgaattttatcctcaattgcgtttcgatcgtatctcaaattctcttcgatctctgacagaaagtttccaactttagtgaatcgcgaaattgggttcgtgttcttgctctgatttcggtgtaacccttcaatttcagaaccctcttgataccttaagaagaggcaatttgaagttttcttcacagatccgtcttagctctttctagagaatggcggatttgataccattttatctgaatattgtggcgtttctatgtactgttggagctattgctttggcgatatttcatatctacaggcatcttttgaattacacggaaccaacttatcagagatatattgtacgcattatcttcatggtcccggtttatgccttcatgtcattcttgtctcttgtgttacccaaaagctcgatatattttgattccatacgagaagtatatgaagcatgggttatctacaattttctatcgctgtgtttggcatgggttggaggcccaggatcagtagtgcttagtttgagtggtcgttctttaaagccatcatggtctcttatgacatgttgctttccgcctttaacactggacgggcgatttattcgacgatgcaagcagggttgtctgcaatttgtaattctgaagcctatcctagttgctgtcacacttgtgctttatgctaaagggaagtacaaggatggaaattttaaccctgatcaagcatatctctatcttaccatcatctataccatatcctacacagtggctttgtacgcacttgtgctgttttatatggcatgcagagatctacttcagccattcaatccagtcccaaagtttgtgatcataaagtctgtggtctttctaacctattggcagggtgttctcgttttccttgctgcaaaatctggattcataaagagtgcagaggcagcagctcattttcaaaattttataatatgtgtcgagatgctcattgctgcagcatgtcatttctatgcttttccatacaaggagtatgctggtgccaatgttggtggatctggcagtttctcaggaagcttatcacatgctgtaaaactaaatgacttttaccatgacactgttcaccagtttgctcctacctatcacgattatgtgctctataaccatcaagatggtggtgacgaggggacaaagaagtaccgatcgagaacctttgtgccaactggccaagagatggatgcaatgagaaaaaacaaacctgtgtatgcaaacaagatagatggtgtttcagtctcaagtagtctatcttcagaggcaagctcacctaaaagctccagcgtaacttctgatcctgcacgctctgatgctgtgaaatcttccttgctggtggatgcctcagattctcttgaaacaatgtatgatatgtcgctcattgacattgatctatctagtttccccagcaatgtcccatctgcaagtgaaagtgggcctagataggagcagagaaaatgtagaaatcaccattaacaggtacaaaacatgctcctaatagttgtattcagatgaatcttctgaggtgtgttcttagttggaagatgttgttagttggagacttgaggataaatgaaaaaagcttataaacccatttaccttttgtagctttatacaatgagtcttctactgc

SEQ ID NO: 72790 - protein, 422 aa, Arabidopsis thaliana
  peptide (1)..(422): Ceres Seq. ID no. 4946805
  misc_feature (5)..(281): Pfam Name: Domain of unknown function Pfam Description: Domain of unknown function
  misc_feature (1)..(422): Homolog of NCBI NO: 30690265 NR Description: expressed protein [Arabidopsis thaliana] unknown protein [Arabidopsis thaliana]
  misc_feature (81)..(422): Homolog of NCBI NO: 7485938 NR Description: hypothetical protein F21E10.13 - Arabidopsis >gi|3047085|gb|AAC13598.1| Hypothetical protein F21E10.13
  misc_feature (1)..(81): Homolog of NCBI NO: 7485938 NR Description: hypothetical protein F21E10.13 - Arabidopsis >gi|3047085|gb|AAC13598.1| Hypothetical protein F21E10.13
  misc_feature (1)..(420): Homolog of NCBI NO: 6671963 NR Description: unknown protein [Arabidopsis thaliana]
  misc_feature (128)..(420): Homolog of NCBI NO: 15230584 NR Description: unknown protein; protein id: At3g05940.1 thaliana] >gi|6714407|gb|AAF26096.1|AC012393_22 unknown protein
  misc_feature (1)..(77): Homolog of NCBI NO: 15230584 NR Description: unknown protein; protein id: At3g05940.1 thaliana] >gi|6714407|gb|AAF26096.1|AC012393_22 unknown protein
  misc_feature (13)..(400): Homolog of NCBI NO: 34897328 NR Description: putative organic solute transporter [Oryza >gi|18855064|gb|AAL79756.1| putative organic solute transporter
  misc_feature (13)..(388): Homolog of NCBI NO: 34900750 NR Description: OJ1341_A08.33 [Oryza sativa (japonica
  misc_feature (20)..(308): Homolog of NCBI NO: 7110635 NR Description: chromosome 22 open reading frame 5 [Homo sapiens] Protein C22orf5 >gi|5596705|emb|CAB51403.1| hypothetical protein sapiens] >gi|15930090|gb|AAH15489.1|AAH15489 chromosome 22 open
  misc_feature (20)..(308): Homolog of NCBI NO: 39932737 NR Description: Putative MAP kinase activating protein C22orf5
MADLIPFYLNIVAFLCTVGAIALAIFHIYRHLLNYTEPTYQRYIVRIIFMVPVYAFMSFLSLVLPKSSIYFDSIREVYEAWVIYNFLSLCLAWVGGPGSVVLSLSGRSLKPSWSLMTCCFPPLTLDGRFIRRCKQGCLQFVILKPILVAVTLVLYAKGKYKDGNFNPDQAYLYLTIIYTISYTVALYALVLFYMACRDLLQPFNPVPKFVIIKSVVFLTYWQGVLVFLAAKSGFIKSAEAAAHFQNFIICVEMLIAAACHFYAFPYKEYAGANVGGSGSFSGSLSHAVKLNDFYHDTVHQFAPTYHDYVLYNHQDGGDEGTKKYRSRTFVPTGQEMDAMRKNKPVYANKIDGVSVSSSLSSEASSPKSSSVTSDPARSDAVKSSLLVDASDSLETMYDMSLIDIDLSSFPSNVPSASESGPR

SEQ ID NO: 72791 - protein, 373 aa, Arabidopsis thaliana
  peptide (1)..(373): Ceres Seq. ID no. 4946806
  misc_feature (1)..(232): Pfam Name: Domain of unknown function Pfam Description: Domain of unknown function
  misc_feature (1)..(373): Homolog of NCBI NO: 30690265 NR Description: expressed protein [Arabidopsis thaliana] unknown protein [Arabidopsis thaliana]
  misc_feature (32)..(373): Homolog of NCBI NO: 7485938 NR Description: hypothetical protein F21E10.13 - Arabidopsis >gi|3047085|gb|AAC13598.1| Hypothetical protein F21E10.13
  misc_feature (1)..(32): Homolog of NCBI NO: 7485938 NR Description: hypothetical protein F21E10.13 - Arabidopsis >gi|3047085|gb|AAC13598.1| Hypothetical protein F21E10.13
  misc_feature (1)..(371): Homolog of NCBI NO: 6671963 NR Description: unknown protein [Arabidopsis thaliana]
  misc_feature (79)..(371): Homolog of NCBI NO: 15230584 NR Description: unknown protein; protein id: At3g05940.1 thaliana] >gi|6714407|gb|AAF26096.1|AC012393_22 unknown protein
  misc_feature (1)..(28): Homolog of NCBI NO: 15230584 NR Description: unknown protein; protein id: At3g05940.1 thaliana] >gi|6714407|gb|AAF26096.1|AC012393_22 unknown protein
  misc_feature (1)..(351): Homolog of NCBI NO: 34897328 NR Description: putative organic solute transporter [Oryza >gi|18855064|gb|AAL79756.1| putative organic solute transporter
  misc_feature (1)..(339): Homolog of NCBI NO: 34900750 NR Description: OJ1341_A08.33 [Oryza sativa (japonica
  misc_feature (1)..(259): Homolog of NCBI NO: 7110635 NR Description: chromosome 22 open reading frame 5 [Homo sapiens] Protein C22orf5 >gi|5596705|emb|CAB51403.1| hypothetical protein sapiens] >gi|15930090|gb|AAH15489.1|AAH15489 chromosome 22 open
  misc_feature (1)..(259): Homolog of NCBI NO: 39932737 NR Description: Putative MAP kinase activating protein C22orf5
MVPVYAFMSFLSLVLPKSSIYFDSIREVYEAWVIYNFLSLCLAWVGGPGSVVLSLSGRSLKPSWSLMTCCFPPLTLDGRFIRRCKQGCLQFVILKPILVAVTLVLYAKGKYKDGNFNPDQAYLYLTIIYTISYTVALYALVLFYMACRDLLQPFNPVPKFVIIKSVVFLTYWQGVLVFLAAKSGFIKSAEAAAHFQNFIICVEMLIAAACHFYAFPYKEYAGANVGGSGSFSGSLSHAVKLNDFYHDTVHQFAPTYHDYVLYNHQDGGDEGTKKYRSRTFVPTGQEMDAMRKNKPVYANKIDGVSVSSSLSSEASSPKSSSVTSDPARSDAVKSSLLVDASDSLETMYDMSLIDIDLSSFPSNVPSASESGPR

SEQ ID NO: 72792 - protein, 366 aa, Arabidopsis thaliana
  peptide (1)..(366): Ceres Seq. ID no. 4946807
  misc_feature (1)..(225): Pfam Name: Domain of unknown function Pfam Description: Domain of unknown function
  misc_feature (1)..(366): Homolog of NCBI NO: 30690265 NR Description: expressed protein [Arabidopsis thaliana] unknown protein [Arabidopsis thaliana]
  misc_feature (25)..(366): Homolog of NCBI NO: 7485938 NR Description: hypothetical protein F21E10.13 - Arabidopsis >gi|3047085|gb|AAC13598.1| Hypothetical protein F21E10.13
  misc_feature (1)..(25): Homolog of NCBI NO: 7485938 NR Description: hypothetical protein F21E10.13 - Arabidopsis >gi|3047085|gb|AAC13598.1| Hypothetical protein F21E10.13
  misc_feature (1)..(364): Homolog of NCBI NO: 6671963 NR Description: unknown protein [Arabidopsis thaliana]
  misc_feature (72)..(364): Homolog of NCBI NO: 15230584 NR Description: unknown protein; protein id: At3g05940.1 thaliana] >gi|6714407|gb|AAF26096.1|AC012393_22 unknown protein
  misc_feature (1)..(21): Homolog of NCBI NO: 15230584 NR Description: unknown protein; protein id: At3g05940.1 thaliana] >gi|6714407|gb|AAF26096.1|AC012393_22 unknown protein
  misc_feature (1)..(344): Homolog of NCBI NO: 34897328 NR Description: putative organic solute transporter [Oryza >gi|18855064|gb|AAL79756.1| putative organic solute transporter
  misc_feature (1)..(332): Homolog of NCBI NO: 34900750 NR Description: OJ1341_A08.33 [Oryza sativa (japonica
  misc_feature (1)..(252): Homolog of NCBI NO: 7110635 NR Description: chromosome 22 open reading frame 5 [Homo sapiens] Protein C22orf5 >gi|5596705|emb|CAB51403.1| hypothetical protein sapiens] >gi|15930090|gb|AAH15489.1|AAH15489 chromosome 22 open
  misc_feature (1)..(252): Homolog of NCBI NO: 39932737 NR Description: Putative MAP kinase activating protein C22orf5
MSFLSLVLPKSSIYFDSIREVYEAWVIYNFLSLCLAWVGGPGSVVLSLSGRSLKPSWSLMTCCFPPLTLDGRFIRRCKQGCLQFVILKPILVAVTLVLYAKGKYKDGNFNPDQAYLYLTIIYTISYTVALYALVLFYMACRDLLQPFNPVPKFVIIKSVVFLTYWQGVLVFLAAKSGFIKSAEAAAHFQNFIICVEMLIAAACHFYAFPYKEYAGANVGGSGSFSGSLSHAVKLNDFYHDTVHQFAPTYHDYVLYNHQDGGDEGTKKYRSRTFVPTGQEMDAMRKNKPVYANKIDGVSVSSSLSSEASSPKSSSVTSDPARSDAVKSSLLVDASDSLETMYDMSLIDIDLSSFPSNVPSASESGPR

SEQ ID NO: 72793 - DNA, 2286 bp, Arabidopsis thaliana
  misc_feature (1)..(2286): Ceres Seq. ID no. 4947296
  misc_feature: MA Experiment ID: 108433 Result: Down-regulated in Transcription
  misc_feature: MA Experiment 108433 PARAMETER Experiment Name: At_rhl_Mutant2_cDNA_P Parameter: Age (day) Value: 7
  misc_feature: MA Experiment 108433 PARAMETER Experiment Name: At_rhl_Mutant2_cDNA_P Parameter: Organism Value: A. thaliana
  misc_feature: MA Experiment 108433 PARAMETER Experiment Name: At_rhl_Mutant2_cDNA_P Parameter: Plant Line Value: rhl Mutant vs. wt landsburg
  misc_feature: MA Experiment 108433 PARAMETER Experiment Name: At_rhl_Mutant2_cDNA_P Parameter: Tissue Value: Roots
  misc_feature: MA Experiment ID: 108434 Result: Up-regulated in Transcription
  misc_feature: MA Experiment 108434 PARAMETER Experiment Name: At_Root_Tips_cDNA_P Parameter: Tissue Value: Root Tips
  misc_feature: MA Experiment ID: 108461 Result: Down-regulated in Transcription
  misc_feature: MA Experiment 108461 PARAMETER Experiment Name: At_Germinating_Seeds_cDNA_P Parameter: Age (day) Value: 1 vs. 0
  misc_feature: MA Experiment 108461 PARAMETER Experiment Name: At_Germinating_Seeds_cDNA_P Parameter: Tissue Value: Germinating Seeds
  misc_feature: MA Experiment ID: 108462 Result: Down-regulated in Transcription
  misc_feature: MA Experiment 108462 PARAMETER Experiment Name: At_Germinating_Seeds_cDNA_P Parameter: Age (day) Value: 2 vs. 0
  misc_feature: MA Experiment 108462 PARAMETER Experiment Name: At_Germinating_Seeds_cDNA_P Parameter: Tissue Value: Germinating Seeds
  misc_feature: MA Experiment ID: 108463 Result: Down-regulated in Transcription
  misc_feature: MA Experiment 108463 PARAMETER Experiment Name: At_Germinating_Seeds_cDNA_P Parameter: Age (day) Value: 3 vs. 0
  misc_feature: MA Experiment 108463 PARAMETER Experiment Name: At_Germinating_Seeds_cDNA_P Parameter: Tissue Value: Germinating Seeds
  misc_feature: MA Experiment ID: 108464 Result: Down-regulated in Transcription
  misc_feature: MA Experiment 108464 PARAMETER Experiment Name: At_Germinating_Seeds_cDNA_P Parameter: Age (day) Value: 4 vs. 0
  misc_feature: MA Experiment 108464 PARAMETER Experiment Name: At_Germinating_Seeds_cDNA_P Parameter: Tissue Value: Germinating Seeds
  misc_feature: MA Experiment ID: 20000089 Result: Up-regulated in Transcription
  misc_feature: MA Experiment ID: 20000090 Result: Up-regulated in Transcription
  misc_feature: MA Experiment ID: 20000111 Result: Down-regulated in Transcription
  misc_feature: MA Experiment 20000111 PARAMETER Experiment Name: At_42deg_Heat_cDNA_P Parameter: Temperature (deg C) Value: 42 vs. 22
  misc_feature: MA Experiment 20000111 PARAMETER Experiment Name: At_42deg_Heat_cDNA_P Parameter: Timepoint (hr) Value: 6
  misc_feature: MA Experiment 20000111 PARAMETER Experiment Name: At_42deg_Heat_cDNA_P Parameter: Tissue Value: Aerial
  misc_feature: MA Experiment ID: 20000113 Result: Down-regulated in Transcription
  misc_feature: MA Experiment 20000113 PARAMETER Experiment Name: At_42deg_Heat_cDNA_P Parameter: Temperature (deg C) Value: 42 vs. 22
  misc_feature: MA Experiment 20000113 PARAMETER Experiment Name: At_42deg_Heat_cDNA_P Parameter: Timepoint (hr) Value: 8
  misc_feature: MA Experiment 20000113 PARAMETER Experiment Name: At_42deg_Heat_cDNA_P Parameter: Tissue Value: Aerial
  misc_feature: MA Experiment ID: 20000224 Result: Up-regulated in Transcription
  misc_feature: MA Experiment ID: 20000307 Result: Down-regulated in Transcription
  misc_feature: MA Experiment 20000307 PARAMETER Experiment Name: At_Germinating_Seeds_Sub_P Parameter: Age (hr) Value: 24 vs. 0
  misc_feature: MA Experiment 20000307 PARAMETER Experiment Name: At_Germinating_Seeds_Sub_P Parameter: Organism Value: A. thaliana
  misc_feature: MA Experiment 20000307 PARAMETER Experiment Name: At_Germinating_Seeds_Sub_P Parameter: Plant Line Value: WS
  misc_feature: MA Experiment 20000307 PARAMETER Experiment Name: At_Germinating_Seeds_Sub_P Parameter: Tissue Value: Germinating Seeds
  misc_feature: MA Experiment ID: 20000327 Result: Down-regulated in Transcription
  misc_feature: MA Experiment 20000327 PARAMETER Experiment Name: At_42deg_Heat_Sub_P Parameter: Age (day) Value: 14
  misc_feature: MA Experiment 20000327 PARAMETER Experiment Name: At_42deg_Heat_Sub_P Parameter: Organism Value: A. thaliana
  misc_feature: MA Experiment 20000327 PARAMETER Experiment Name: At_42deg_Heat_Sub_P Parameter: Plant Line Value: WS
  misc_feature: MA Experiment 20000327 PARAMETER Experiment Name: At_42deg_Heat_Sub_P Parameter: Temperature (deg C) Value: 42 vs. 22
  misc_feature: MA Experiment 20000327 PARAMETER Experiment Name: At_42deg_Heat_Sub_P Parameter: Timepoint (hr) Value: 1
  misc_feature: MA Experiment 20000327 PARAMETER Experiment Name: At_42deg_Heat_Sub_P Parameter: Tissue Value: Aerial
  misc_feature: MA Experiment ID: 20000328 Result: Down-regulated in Transcription
  misc_feature: MA Experiment 20000328 PARAMETER Experiment Name: At_42deg_Heat_Sub_P Parameter: Age (day) Value: 14
  misc_feature: MA Experiment 20000328 PARAMETER Experiment Name: At_42deg_Heat_Sub_P Parameter: Organism Value: A. thaliana
  misc_feature: MA Experiment 20000328 PARAMETER Experiment Name: At_42deg_Heat_Sub_P Parameter: Plant Line Value: WS
  misc_feature: MA Experiment 20000328 PARAMETER Experiment Name: At_42deg_Heat_Sub_P Parameter: Temperature (deg C) Value: 42 vs. 22
  misc_feature: MA Experiment 20000328 PARAMETER Experiment Name: At_42deg_Heat_Sub_P Parameter: Timepoint (hr) Value: 6
  misc_feature: MA Experiment 20000328 PARAMETER Experiment Name: At_42deg_Heat_Sub_P Parameter: Tissue Value: Aerial
atgagtatcatgctatcaatttcccggcgccagaactcttatattctgctcaaccattctcgattcctccggcgtttttcttatgatgttgacccacggccggaaatcaaatcggagagccaggaatttgtagtagtcaaatttgtgaaaactcttcaaaataccccgcaacatgattgggcgtcgagcgagtcgctaagtgcgcttgtcgtatcttcttcttctgcttctcctttagtattctcgcaaatcacgcggcggctaggatcgtattctctagcaatctcgttcttcgagtacctggatgcgaagtctcagtctctgaaacgccgtgaagaatctctctccttggcgcttcagtcggtcattgaattcgccggtagtgaaccggacccgcgtgataaacttctccgtctctacgagatcgccaaagagaagaacattcctcttactatcgttgccactaagcttctgatccgatggtttgggcgtatgggtatggtgaatcagtcggttcttgtatacgaaagactcgattcgaatatgaaaaactcgcaggttcgtaatgttgtggtagacgtcttgctaagaaatggacttgtggatgatgccttcaaggtgctcgacgaaatgcttcagaaagaatctgtttttcctcctaatagaatcacagcggatattgtgttacacgaggtttggaaggaaaggcttttgacagaagaaaagataattgctttgatttcaagatttagctctcatggtgtctccccaaactctgtttggttgactcggtttatatcaagtctatgcaaaaatgctcgcgccaatactgcttgggatattttgagcgacctgatgaagaacaaaaccccacttgaagctcctcccttcaatgcgcttttgtcttgcttaggaaggaatatggacattagtagaatgaatgatttagtcttgaagatggatgaggtgaaaatccggcctgatgttgtgactttagggattcttattaacactttatgcaaatcaagaagggtagatgaagctctcgaagtttttgaacaaatgcgtggaaagagaactgatgatggaaatgtgattaaagctgattcgattcattttaatactctcattgacgggctctgcaaggtggggaggttgaaagaagcagaggagttattggtaaggatgaaactggaagagagatgtgtgcccaatgcagttacttacaattgcttgattgatgggtattgcagagctggaaagcttgagacggctaaagaagtcgtttctcggatgaaagaggacgagattaaacctaatgtggtaactgttaatacaatcgttggtgggatgtgcaggcaccatggattgaacatggcggttgttttctttatggatatggaaaaggaaggcgtgaaagggaatgtggttacttatatgacattgattcatgcttgttgcagcgtcagtaatgtagagaaggctatgtattggtatgaaaaaatgttggaagctggttgttctcctgatgcaaagatctattatgctttgatctctggattgtgccaagttagacgggatcatgacgccattagagtggtggagaaactgaaagaaggagggttttctcttgacttattggcttacaacatgcttattgggttgttttgtgataagaataatgcagagaaagtctatgagatgctaaccgatatggaaaaagaagggaagaaacctgattccatcacttacaacactctgatttcgtttttcggtaaacacaaggacttcgagagtgttgagagaatgatggagcagatgagagaagacgggttagacccgactgtcacgacatatggagcggtgattgacgcttattgctcagtcggcgaattagacgaagcattgaagctctttaaggacatgggtttgcactcaaaggtcaatccgaacactgtaatatacaacattctcataaacgcattttctaagctggggaatttcgggcaagcgctctctctgaaagaggaaatgaagatgaagatggtgagacctaatgttgaaacttacaatgccttgtttaagtgtcttaacgagaaaacccaaggagagacattacttaaactgatggatgagatggtcgaacatcttatcacaatggagattctaatggagcgtctctcaggttctgatgagttagttaagctgaggaagtttatgcaaggctactctgttgcttcgccgaccgagaaagcttcacctttcgatgtctttagcttgggataa

SEQ ID NO: 72794 - protein, 761 aa, Arabidopsis thaliana
  peptide (1)..(761): Ceres Seq. ID no. 4947297
  misc_feature (477)..(511): Pfam Name: PPR repeat Pfam Description: PPR repeat
  misc_feature (297)..(756): Homolog of NCBI NO: 15242446 NR Description: putative protein; protein id: At5g39710.1
  misc_feature (162)..(718): Homolog of NCBI NO: 15221300 NR Description: hypothetical protein; protein id: At1g74580.1
  misc_feature (189)..(681): Homolog of NCBI NO: 37572999 NR Description: putative fertility restorer homologue [Oryza
  misc_feature (215)..(716): Homolog of NCBI NO: 25404374 NR Description: hypothetical protein F16P17.1 [imported] - thaliana >gi|8493575|gb|AAF75798.1|AC011000_1 Contains multiple
  misc_feature (189)..(715): Homolog of NCBI NO: 15237662 NR Description: putative protein; protein id: At5g64320.1
  misc_feature (208)..(713): Homolog of NCBI NO: 15221549 NR Description: PPR-repeat protein; protein id: At1g62670.1
  misc_feature (189)..(642): Homolog of NCBI NO: 15221674 NR Description: unknown protein; protein id: At1g63080.1
  misc_feature (87)..(713): Homolog of NCBI NO: 32527604 NR Description: pentatricopeptide repeat-containing protein
  misc_feature (179)..(713): Homolog of NCBI NO: 34394343 NR Description: putative fertility restorer homologue [Oryza
  misc_feature (134)..(713): Homolog of NCBI NO: 30840221 NR Description: fertility restorer [Raphanus sativus]
MSIMLSISRRQNSYILLNHSRFLRRFSYDVDPRPEIKSESQEFVVVKFVKTLQNTPQHDWASSESLSALVVSSSSASPLVFSQITRRLGSYSLAISFFEYLDAKSQSLKRREESLSLALQSVIEFAGSEPDPRDKLLRLYEIAKEKNIPLTIVATKLLIRWFGRMGMVNQSVLVYERLDSNMKNSQVRNVVVDVLLRNGLVDDAFKVLDEMLQKESVFPPNRITADIVLHEVWKERLLTEEKIIALISRFSSHGVSPNSVWLTRFISSLCKNARANTAWDILSDLMKNKTPLEAPPFNALLSCLGRNMDISRMNDLVLKMDEVKIRPDVVTLGILINTLCKSRRVDEALEVFEQMRGKRTDDGNVIKADSIHFNTLIDGLCKVGRLKEAEELLVRMKLEERCVPNAVTYNCLIDGYCRAGKLETAKEVVSRMKEDEIKPNVVTVNTIVGGMCRHHGLNMAVVFFMDMEKEGVKGNVVTYMTLIHACCSVSNVEKAMYWYEKMLEAGCSPDAKIYYALISGLCQVRRDHDAIRVVEKLKEGGFSLDLLAYNMLIGLFCDKNNAEKVYEMLTDMEKEGKKPDSITYNTLISFFGKHKDFESVERMMEQMREDGLDPTVTTYGAVIDAYCSVGELDEALKLFKDMGLHSKVNPNTVIYNILINAFSKLGNFGQALSLKEEMKMKMVRPNVETYNALFKCLNEKTQGETLLKLMDEMVEHLITMEILMERLSGSDELVKLRKFMQGYSVASPTEKASPFDVFSLG

SEQ ID NO: 72795 - protein, 758 aa, Arabidopsis thaliana
  peptide (1)..(758): Ceres Seq. ID no. 4947298
  misc_feature (474)..(508): Pfam Name: PPR repeat Pfam Description: PPR repeat
  misc_feature (294)..(753): Homolog of NCBI NO: 15242446 NR Description: putative protein; protein id: At5g39710.1
  misc_feature (159)..(715): Homolog of NCBI NO: 15221300 NR Description: hypothetical protein; protein id: At1g74580.1
  misc_feature (186)..(678): Homolog of NCBI NO: 37572999 NR Description: putative fertility restorer homologue [Oryza
  misc_feature (212)..(713): Homolog of NCBI NO: 25404374 NR Description: hypothetical protein F16P17.1 [imported] - thaliana >gi|8493575|gb|AAF75798.1|AC011000_1 Contains multiple
  misc_feature (186)..(712): Homolog of NCBI NO: 15237662 NR Description: putative protein; protein id: At5g64320.1
  misc_feature (205)..(710): Homolog of NCBI NO: 15221549 NR Description: PPR-repeat protein; protein id: At1g62670.1
  misc_feature (186)..(639): Homolog of NCBI NO: 15221674 NR Description: unknown protein; protein id: At1g63080.1
  misc_feature (84)..(710): Homolog of NCBI NO: 32527604 NR Description: pentatricopeptide repeat-containing protein
  misc_feature (176)..(710): Homolog of NCBI NO: 34394343 NR Description: putative fertility restorer homologue [Oryza
  misc_feature (131)..(710): Homolog of NCBI NO: 30840221 NR Description: fertility restorer [Raphanus sativus]
MLSISRRQNSYILLNHSRFLRRFSYDVDPRPEIKSESQEFVVVKFVKTLQNTPQHDWASSESLSALVVSSSSASPLVFSQITRRLGSYSLAISFFEYLDAKSQSLKRREESLSLALQSVIEFAGSEPDPRDKLLRLYEIAKEKNIPLTIVATKLLIRWFGRMGMVNQSVLVYERLDSNMKNSQVRNVVVDVLLRNGLVDDAFKVLDEMLQKESVFPPNRITADIVLHEVWKERLLTEEKIIALISRFSSHGVSPNSVWLTRFISSLCKNARANTAWDILSDLMKNKTPLEAPPFNALLSCLGRNMDISRMNDLVLKMDEVKIRPDVVTLGILINTLCKSRRVDEALEVFEQMRGKRTDDGNVIKADSIHFNTLIDGLCKVGRLKEAEELLVRMKLEERCVPNAVTYNCLIDGYCRAGKLETAKEVVSRMKEDEIKPNVVTVNTIVGGMCRHHGLNMAVVFFMDMEKEGVKGNVVTYMTLIHACCSVSNVEKAMYWYEKMLEAGCSPDAKIYYALISGLCQVRRDHDAIRVVEKLKEGGFSLDLLAYNMLIGLFCDKNNAEKVYEMLTDMEKEGKKPDSITYNTLISFFGKHKDFESVERMMEQMREDGLDPTVTTYGAVIDAYCSVGELDEALKLFKDMGLHSKVNPNTVIYNILINAFSKLGNFGQALSLKEEMKMKMVRPNVETYNALFKCLNEKTQGETLLKLMDEMVEHLITMEILMERLSGSDELVKLRKFMQGYSVASPTEKASPFDVFSLG

SEQ ID NO: 72796 - protein, 597 aa, Arabidopsis thaliana
  peptide (1)..(597): Ceres Seq. ID no. 4947299
  misc_feature (313)..(347): Pfam Name: PPR repeat Pfam Description: PPR repeat
  misc_feature (133)..(592): Homolog of NCBI NO: 15242446 NR Description: putative protein; protein id: At5g39710.1
  misc_feature (1)..(554): Homolog of NCBI NO: 15221300 NR Description: hypothetical protein; protein id: At1g74580.1
  misc_feature (25)..(517): Homolog of NCBI NO: 37572999 NR Description: putative fertility restorer homologue [Oryza
  misc_feature (51)..(552): Homolog of NCBI NO: 25404374 NR Description: hypothetical protein F16P17.1 [imported] - thaliana >gi|8493575|gb|AAF75798.1|AC011000_1 Contains multiple
  misc_feature (25)..(551): Homolog of NCBI NO: 15237662 NR Description: putative protein; protein id: At5g64320.1
  misc_feature (44)..(549): Homolog of NCBI NO: 15221549 NR Description: PPR-repeat protein; protein id: At1g62670.1
  misc_feature (25)..(478): Homolog of NCBI NO: 15221674 NR Description: unknown protein; protein id: At1g63080.1
  misc_feature (1)..(549): Homolog of NCBI NO: 32527604 NR Description: pentatricopeptide repeat-containing protein
  misc_feature (15)..(549): Homolog of NCBI NO: 34394343 NR Description: putative fertility restorer homologue [Oryza
  misc_feature (1)..(549): Homolog of NCBI NO: 30840221 NR Description: fertility restorer [Raphanus sativus]
MGMVNQSVLVYERLDSNMKNSQVRNVVVDVLLRNGLVDDAFKVLDEMLQKESVFPPNRITADIVLHEVWKERLLTEEKIIALISRFSSHGVSPNSVWLTRFISSLCKNARANTAWDILSDLMKNKTPLEAPPFNALLSCLGRNMDISRMNDLVLKMDEVKIRPDVVTLGILINTLCKSRRVDEALEVFEQMRGKRTDDGNVIKADSIHFNTLIDGLCKVGRLKEAEELLVRMKLEERCVPNAVTYNCLIDGYCRAGKLETAKEVVSRMKEDEIKPNVVTVNTIVGGMCRHHGLNMAVVFFMDMEKEGVKGNVVTYMTLIHACCSVSNVEKAMYWYEKMLEAGCSPDAKIYYALISGLCQVRRDHDAIRVVEKLKEGGFSLDLLAYNMLIGLFCDKNNAEKVYEMLTDMEKEGKKPDSITYNTLISFFGKHKDFESVERMMEQMREDGLDPTVTTYGAVIDAYCSVGELDEALKLFKDMGLHSKVNPNTVIYNILINAFSKLGNFGQALSLKEEMKMKMVRPNVETYNALFKCLNEKTQGETLLKLMDEMVEHLITMEILMERLSGSDELVKLRKFMQGYSVASPTEKASPFDVFSLG

SEQ ID NO: 72797 - DNA, 2184 bp, Arabidopsis thaliana
  misc_feature (1)..(2184): Ceres Seq. ID no. 4947356
  misc_feature: MA Experiment ID: 108433 Result: Down-regulated in Transcription
  misc_feature: MA Experiment 108433 PARAMETER Experiment Name: At_rhl_Mutant2_cDNA_P Parameter: Age (day) Value: 7
  misc_feature: MA Experiment 108433 PARAMETER Experiment Name: At_rhl_Mutant2_cDNA_P Parameter: Organism Value: A. thaliana
  misc_feature: MA Experiment 108433 PARAMETER Experiment Name: At_rhl_Mutant2_cDNA_P Parameter: Plant Line Value: rhl Mutant vs. wt landsburg
  misc_feature: MA Experiment 108433 PARAMETER Experiment Name: At_rhl_Mutant2_cDNA_P Parameter: Tissue Value: Roots
  misc_feature: MA Experiment ID: 108434 Result: Up-regulated in Transcription
  misc_feature: MA Experiment 108434 PARAMETER Experiment Name: At_Root_Tips_cDNA_P Parameter: Tissue Value: Root Tips
  misc_feature: MA Experiment ID: 108461 Result: Down-regulated in Transcription
  misc_feature: MA Experiment 108461 PARAMETER Experiment Name: At_Germinating_Seeds_cDNA_P Parameter: Age (day) Value: 1 vs. 0
  misc_feature: MA Experiment 108461 PARAMETER Experiment Name: At_Germinating_Seeds_cDNA_P Parameter: Tissue Value: Germinating Seeds
  misc_feature: MA Experiment ID: 108462 Result: Down-regulated in Transcription
  misc_feature: MA Experiment 108462 PARAMETER Experiment Name: At_Germinating_Seeds_cDNA_P Parameter: Age (day) Value: 2 vs. 0
  misc_feature: MA Experiment 108462 PARAMETER Experiment Name: At_Germinating_Seeds_cDNA_P Parameter: Tissue Value: Germinating Seeds
  misc_feature: MA Experiment ID: 108463 Result: Down-regulated in Transcription
  misc_feature: MA Experiment 108463 PARAMETER Experiment Name: At_Germinating_Seeds_cDNA_P Parameter: Age (day) Value: 3 vs. 0
  misc_feature: MA Experiment 108463 PARAMETER Experiment Name: At_Germinating_Seeds_cDNA_P Parameter: Tissue Value: Germinating Seeds
  misc_feature: MA Experiment ID: 108464 Result: Down-regulated in Transcription
  misc_feature: MA Experiment 108464 PARAMETER Experiment Name: At_Germinating_Seeds_cDNA_P Parameter: Age (day) Value: 4 vs. 0
  misc_feature: MA Experiment 108464 PARAMETER Experiment Name: At_Germinating_Seeds_cDNA_P Parameter: Tissue Value: Germinating Seeds
  misc_feature: MA Experiment ID: 20000089 Result: Up-regulated in Transcription
  misc_feature: MA Experiment ID: 20000090 Result: Up-regulated in Transcription
  misc_feature: MA Experiment ID: 20000111 Result: Down-regulated in Transcription
  misc_feature: MA Experiment 20000111 PARAMETER Experiment Name: At_42deg_Heat_cDNA_P Parameter: Temperature (deg C) Value: 42 vs. 22
  misc_feature: MA Experiment 20000111 PARAMETER Experiment Name: At_42deg_Heat_cDNA_P Parameter: Timepoint (hr) Value: 6
  misc_feature: MA Experiment 20000111 PARAMETER Experiment Name: At_42deg_Heat_cDNA_P Parameter: Tissue Value: Aerial
  misc_feature: MA Experiment ID: 20000113 Result: Down-regulated in Transcription
  misc_feature: MA Experiment 20000113 PARAMETER Experiment Name: At_42deg_Heat_cDNA_P Parameter: Temperature (deg C) Value: 42 vs. 22
  misc_feature: MA Experiment 20000113 PARAMETER Experiment Name: At_42deg_Heat_cDNA_P Parameter: Timepoint (hr) Value: 8
  misc_feature: MA Experiment 20000113 PARAMETER Experiment Name: At_42deg_Heat_cDNA_P Parameter: Tissue Value: Aerial
  misc_feature: MA Experiment ID: 20000224 Result: Up-regulated in Transcription
atgagtatcatgctatcaatttcccggcgccagaactcttatattctgctcaaccattctcgattcctccggcgtttttcttatgatgttgacccacggccggaaatcaaatcggagagccaggaatttgtagtagtcaaatttgtgaaaactcttcaaaataccccgcaacatgattgggcgtcgagcgagtcgctaagtgcgcttgtcgtatcttcttcttctgcttctcctttagtattctcgcaaatcacgcggcggctaggatcgtattctctagcaatctcgttcttcgagtacctggatgcgaagtctcagtctctgaaacgccgtgaagaatctctctccttggcgcttcagtcggtcattgaattcgccggtagtgaaccggacccgcgtgataaacttctccgtctctacgagatcgccaaagagaagaacattcctcttactatcgttgccactaagcttctgatccgatggtttgggcgtatgggtatggtgaatcagtcggttcttgtatacgaaagactcgattcgaatatgaaaaactcgcaggttcgtaatgttgtggtagacgtcttgctaagaaatggacttgtggatgatgccttcaaggtgctcgacgaaatgcttcagaaagaatctgtttttcctcctaatagaatcacagcggatattgtgttacacgaggtttggaaggaaaggcttttgacagaagaaaagataattgctttgatttcaagatttagctctcatggtgtctccccaaactctgtttggttgactcggtttatatcaagtctatgcaaaaatgctcgcgccaatactgcttgggatattttgagcgacctgatgaagaacaaaaccccacttgaagctcctcccttcaatgcgcttttgtcttgcttaggaaggaatatggacattagtagaatgaatgatttagtcttgaagatggatgaggtgaaaatccggcctgatgttgtgactttagggattcttattaacactttatgcaaatcaagaagggtagatgaagctctcgaagtttttgaacaaatgcgtggaaagagaactgatgatggaaatgtgattaaagctgattcgattcattttaatactctcattgacgggctctgcaaggtggggaggttgaaagaagcagaggagttattggtaaggatgaaactggaagagagatgtgtgcccaatgcagttacttacaattgcttgattgatgggtattgcagagctggaaagcttgagacggctaaagaagtcgtttctcggatgaaagaggacgagattaaacctaatgtggtaactgttaatacaatcgttggtgggatgtgcaggcaccatggattgaacatggcggttgttttctttatggatatggaaaaggaaggcgtgaaagggaatgtggttacttatatgacattgattcatgcttgttgcagcgtcagtaatgtagagaaggctatgtattggtatgaaaaaatgttggaagctggttgttctcctgatgcaaagatctattatgctttgatctctggattgtgccaagttagacgggatcatgacgccattagagtggtggagaaactgaaagaaggagggttttctcttgacttattggcttacaacatgcttattgggttgttttgtgataagaataatgcagagaaagtctatgagatgctaaccgatatggaaaaagaagggaagaaacctgattccatcacttacaacactctgatttcgtttttcggtaaacacaaggacttcgagagtgttgagagaatgatggagcagatgagagaagacgggttagacccgactgtcacgacatatggagcggtgattgacgcttattgctcagtcggcgaattagacgaagcattgaagctctttaaggacatgggtttgcactcaaaggtcaatccgaacactgtaatatacaacattctcataaacgcattttctaagctggggaatttcgggcaagcgctctctctgaaagaggaaatgaagatgaagatggtgagacctaatgttgaaacttacaatgccttgtttaagtgtcttaacgagaaaacccaaggagagacattacttaaactgatggatgagatggtcgaacatcttgtgaaccaaatcagatcacaatggagattctaa

SEQ ID NO: 72798 - protein, 727 aa, Arabidopsis thaliana
  peptide (1)..(727): Ceres Seq. ID no. 4947357
  misc_feature (477)..(511): Pfam Name: PPR repeat Pfam Description: PPR repeat
  misc_feature (297)..(710): Homolog of NCBI NO: 15242446 NR Description: putative protein; protein id: At5g39710.1
  misc_feature (162)..(715): Homolog of NCBI NO: 15221300 NR Description: hypothetical protein; protein id: At1g74580.1
  misc_feature (189)..(681): Homolog of NCBI NO: 37572999 NR Description: putative fertility restorer homologue [Oryza
  misc_feature (215)..(716): Homolog of NCBI NO: 25404374 NR Description: hypothetical protein F16P17.1 [imported] - thaliana >gi|8493575|gb|AAF75798.1|AC011000_1 Contains multiple
  misc_feature (189)..(715): Homolog of NCBI NO: 15237662 NR Description: putative protein; protein id: At5g64320.1
  misc_feature (208)..(713): Homolog of NCBI NO: 15221549 NR Description: PPR-repeat protein; protein id: At1g62670.1
  misc_feature (189)..(642): Homolog of NCBI NO: 15221674 NR Description: unknown protein; protein id: At1g63080.1
  misc_feature (87)..(713): Homolog of NCBI NO: 32527604 NR Description: pentatricopeptide repeat-containing protein
  misc_feature (179)..(713): Homolog of NCBI NO: 34394343 NR Description: putative fertility restorer homologue [Oryza
  misc_feature (134)..(713): Homolog of NCBI NO: 30840221 NR Description: fertility restorer [Raphanus sativus]
MSIMLSISRRQNSYILLNHSRFLRRFSYDVDPRPEIKSESQEFVVVKFVKTLQNTPQHDWASSESLSALVVSSSSASPLVFSQITRRLGSYSLAISFFEYLDAKSQSLKRREESLSLALQSVIEFAGSEPDPRDKLLRLYEIAKEKNIPLTIVATKLLIRWFGRMGMVNQSVLVYERLDSNMKNSQVRNVVVDVLLRNGLVDDAFKVLDEMLQKESVFPPNRITADIVLHEVWKERLLTEEKIIALISRFSSHGVSPNSVWLTRFISSLCKNARANTAWDILSDLMKNKTPLEAPPFNALLSCLGRNMDISRMNDLVLKMDEVKIRPDVVTLGILINTLCKSRRVDEALEVFEQMRGKRTDDGNVIKADSIHFNTLIDGLCKVGRLKEAEELLVRMKLEERCVPNAVTYNCLIDGYCRAGKLETAKEVVSRMKEDEIKPNVVTVNTIVGGMCRHHGLNMAVVFFMDMEKEGVKGNVVTYMTLIHACCSVSNVEKAMYWYEKMLEAGCSPDAKIYYALISGLCQVRRDHDAIRVVEKLKEGGFSLDLLAYNMLIGLFCDKNNAEKVYEMLTDMEKEGKKPDSITYNTLISFFGKHKDFESVERMMEQMREDGLDPTVTTYGAVIDAYCSVGELDEALKLFKDMGLHSKVNPNTVIYNILINAFSKLGNFGQALSLKEEMKMKMVRPNVETYNALFKCLNEKTQGETLLKLMDEMVEHLVNQIRSQWRF

SEQ ID NO: 72799 - protein, 724 aa, Arabidopsis thaliana
  peptide (1)..(724): Ceres Seq. ID no. 4947358
  misc_feature (474)..(508): Pfam Name: PPR repeat Pfam Description: PPR repeat
  misc_feature (294)..(707): Homolog of NCBI NO: 15242446 NR Description: putative protein; protein id: At5g39710.1
  misc_feature (159)..(712): Homolog of NCBI NO: 15221300 NR Description: hypothetical protein; protein id: At1g74580.1
  misc_feature (186)..(678): Homolog of NCBI NO: 37572999 NR Description: putative fertility restorer homologue [Oryza
  misc_feature (212)..(713): Homolog of NCBI NO: 25404374 NR Description: hypothetical protein F16P17.1 [imported] - thaliana >gi|8493575|gb|AAF75798.1|AC011000_1 Contains multiple
  misc_feature (186)..(712): Homolog of NCBI NO: 15237662 NR Description: putative protein; protein id: At5g64320.1
  misc_feature (205)..(710): Homolog of NCBI NO: 15221549 NR Description: PPR-repeat protein; protein id: At1g62670.1
  misc_feature (186)..(639): Homolog of NCBI NO: 15221674 NR Description: unknown protein; protein id: At1g63080.1
  misc_feature (84)..(710): Homolog of NCBI NO: 32527604 NR Description: pentatricopeptide repeat-containing protein
  misc_feature (176)..(710): Homolog of NCBI NO: 34394343 NR Description: putative fertility restorer homologue [Oryza
  misc_feature (131)..(710): Homolog of NCBI NO: 30840221 NR Description: fertility restorer [Raphanus sativus]
MLSISRRQNSYILLNHSRFLRRFSYDVDPRPEIKSESQEFVVVKFVKTLQNTPQHDWASSESLSALVVSSSSASPLVFSQITRRLGSYSLAISFFEYLDAKSQSLKRREESLSLALQSVIEFAGSEPDPRDKLLRLYEIAKEKNIPLTIVATKLLIRWFGRMGMVNQSVLVYERLDSNMKNSQVRNVVVDVLLRNGLVDDAFKVLDEMLQKESVFPPNRITADIVLHEVWKERLLTEEKIIALISRFSSHGVSPNSVWLTRFISSLCKNARANTAWDILSDLMKNKTPLEAPPFNALLSCLGRNMDISRMNDLVLKMDEVKIRPDVVTLGILINTLCKSRRVDEALEVFEQMRGKRTDDGNVIKADSIHFNTLIDGLCKVGRLKEAEELLVRMKLEERCVPNAVTYNCLIDGYCRAGKLETAKEVVSRMKEDEIKPNVVTVNTIVGGMCRHHGLNMAVVFFMDMEKEGVKGNVVTYMTLIHACCSVSNVEKAMYWYEKMLEAGCSPDAKIYYALISGLCQVRRDHDAIRVVEKLKEGGFSLDLLAYNMLIGLFCDKNNAEKVYEMLTDMEKEGKKPDSITYNTLISFFGKHKDFESVERMMEQMREDGLDPTVTTYGAVIDAYCSVGELDEALKLFKDMGLHSKVNPNTVIYNILINAFSKLGNFGQALSLKEEMKMKMVRPNVETYNALFKCLNEKTQGETLLKLMDEMVEHLVNQIRSQWRF

SEQ ID NO: 72800 - protein, 563 aa, Arabidopsis thaliana
  peptide (1)..(563): Ceres Seq. ID no. 4947359
  misc_feature (313)..(347): Pfam Name: PPR repeat Pfam Description: PPR repeat
  misc_feature (133)..(546): Homolog of NCBI NO: 15242446 NR Description: putative protein; protein id: At5g39710.1
  misc_feature (1)..(551): Homolog of NCBI NO: 15221300 NR Description: hypothetical protein; protein id: At1g74580.1
  misc_feature (25)..(517): Homolog of NCBI NO: 37572999 NR Description: putative fertility restorer homologue [Oryza
  misc_feature (51)..(552): Homolog of NCBI NO: 25404374 NR Description: hypothetical protein F16P17.1 [imported] - thaliana >gi|8493575|gb|AAF75798.1|AC011000_1 Contains multiple
  misc_feature (25)..(551): Homolog of NCBI NO: 15237662 NR Description: putative protein; protein id: At5g64320.1
  misc_feature (44)..(549): Homolog of NCBI NO: 15221549 NR Description: PPR-repeat protein; protein id: At1g62670.1
  misc_feature (25)..(478): Homolog of NCBI NO: 15221674 NR Description: unknown protein; protein id: At1g63080.1
  misc_feature (1)..(549): Homolog of NCBI NO: 32527604 NR Description: pentatricopeptide repeat-containing protein
  misc_feature (15)..(549): Homolog of NCBI NO: 34394343 NR Description: putative fertility restorer homologue [Oryza
  misc_feature (1)..(549): Homolog of NCBI NO: 30840221 NR Description: fertility restorer [Raphanus sativus]
MGMVNQSVLVYERLDSNMKNSQVRNVVVDVLLRNGLVDDAFKVLDEMLQKESVFPPNRITADIVLHEVWKERLLTEEKIIALISRFSSHGVSPNSVWLTRFISSLCKNARANTAWDILSDLMKNKTPLEAPPFNALLSCLGRNMDISRMNDLVLKMDEVKIRPDVVTLGILINTLCKSRRVDEALEVFEQMRGKRTDDGNVIKADSIHFNTLIDGLCKVGRLKEAEELLVRMKLEERCVPNAVTYNCLIDGYCRAGKLETAKEVVSRMKEDEIKPNVVTVNTIVGGMCRHHGLNMAVVFFMDMEKEGVKGNVVTYMTLIHACCSVSNVEKAMYWYEKMLEAGCSPDAKIYYALISGLCQVRRDHDAIRVVEKLKEGGFSLDLLAYNMLIGLFCDKNNAEKVYEMLTDMEKEGKKPDSITYNTLISFFGKHKDFESVERMMEQMREDGLDPTVTTYGAVIDAYCSVGELDEALKLFKDMGLHSKVNPNTVIYNILINAFSKLGNFGQALSLKEEMKMKMVRPNVETYNALFKCLNEKTQGETLLKLMDEMVEHLVNQIRSQWRF

SEQ ID NO: 72801 - DNA, 1611 bp, Arabidopsis thaliana
  misc_feature (1)..(1611): Ceres Seq. ID no. 4948138
  misc_feature: MA Experiment ID: 20000179 Result: Up-regulated in Transcription
  misc_feature: MA Experiment 20000179 PARAMETER Experiment Name: At_Germinating_Seeds_P Parameter: Age (hr) Value: 6 vs. 0
  misc_feature: MA Experiment 20000179 PARAMETER Experiment Name: At_Germinating_Seeds_P Parameter: Tissue Value: Germinating Seeds
  misc_feature: MA Experiment ID: 20000180 Result: Up-regulated in Transcription
  misc_feature: MA Experiment 20000180 PARAMETER Experiment Name: At_Germinating_Seeds_P Parameter: Age (hr) Value: 24 vs. 0
  misc_feature: MA Experiment 20000180 PARAMETER Experiment Name: At_Germinating_Seeds_P Parameter: Tissue Value: Germinating Seeds
  misc_feature: MA Experiment ID: 20000185 Result: Up-regulated in Transcription
  misc_feature: MA Experiment 20000185 PARAMETER Experiment Name: At_Roots__P Parameter: Age (day) Value: 7 vs. 21
  misc_feature: MA Experiment 20000185 PARAMETER Experiment Name: At_Roots__P Parameter: Organism Value: A. thaliana
  misc_feature: MA Experiment 20000185 PARAMETER Experiment Name: At_Roots__P Parameter: Tissue Value: Roots vs. Whole Plant
  misc_feature: MA Experiment ID: 20000438 Result: Down-regulated in Transcription
  misc_feature: MA Experiment 20000438 PARAMETER Experiment Name: At_Shoots__P Parameter: Age (day) Value: 14
  misc_feature: MA Experiment 20000438 PARAMETER Experiment Name: At_Shoots__P Parameter: Tissue Value: Shoots vs. Whole Plant
  misc_feature: MA Experiment ID: 20000439 Result: Up-regulated in Transcription
  misc_feature: MA Experiment 20000439 PARAMETER Experiment Name: At_Roots__P Parameter: Age (day) Value: 14 vs. 21
  misc_feature: MA Experiment 20000439 PARAMETER Experiment Name: At_Roots__P Parameter: Organism Value: A. thaliana
  misc_feature: MA Experiment 20000439 PARAMETER Experiment Name: At_Roots__P Parameter: Tissue Value: Roots vs. Whole Plant
  misc_feature: MA Experiment ID: 20000794 Result: Up-regulated in Transcription
  misc_feature: MA Experiment 20000794 PARAMETER Experiment Name: At_Petals_P Parameter: Age (day) Value: 23-25 days
  misc_feature: MA Experiment 20000794 PARAMETER Experiment Name: At_Petals_P Parameter: Plant Line Value: WS
  misc_feature: MA Experiment 20000794 PARAMETER Experiment Name: At_Petals_P Parameter: Tissue Value: Petals vs. Whole plant
  misc_feature: MA Experiment ID: 20001905 Result: Up-regulated in Transcription
  misc_feature: MA Experiment 20001905 PARAMETER Experiment Name: At_Drought_Reproduction_P Parameter: Age (day) Value: 40
  misc_feature: MA Experiment 20001905 PARAMETER Experiment Name: At_Drought_Reproduction_P Parameter: Organism Value: A. thaliana
  misc_feature: MA Experiment 20001905 PARAMETER Experiment Name: At_Drought_Reproduction_P Parameter: Plant Line Value: WS
  misc_feature: MA Experiment 20001905 PARAMETER Experiment Name: At_Drought_Reproduction_P Parameter: Timepoint (day) Value: 10
  misc_feature: MA Experiment 20001905 PARAMETER Experiment Name: At_Drought_Reproduction_P Parameter: Tissue Value: Rosettes
  misc_feature: MA Experiment 20001905 PARAMETER Experiment Name: At_Drought_Reproduction_P Parameter: Treatment Value: Drought vs. No Drought
atggcttatcgtcaaattttggccatagttttgtttctttgtgtgtttcaattcttggactgcactgttagctccgccgtagaagagaatgggactgtgtttgtgtacggaagagccgccgttggaacaatagatgaagacttcatttgcgccaccttagactggtggccaccggagaaatgtgactacggcagttgtagttgggaccatgcttcaattctcaatctggatttgaccattgttgttccaatttccaaaaacacagcatttgctccgttgaaaataagaataggaggaacattacaagacatagtgatatatgagacaccagattcgaagcaaccatgtcttccttttaccaaaaactcttcaattctttttggttacacacaaggatgtctacctatgcgtcgatgggacgagctcaatgccttctttcgcaaaaccggaactaaagtcatcttcgggctgaatgcactttctggacgttccataaaatctaacggtgaagccataggagcctggaattacaccaatgctgaatcgttcatccggtttacagcagagaacaattacaccatcgacgggtgggagctcggcaatgagctgtgtggaagtggtgttggtgcacgagttggtgcaaatcaatatgctatagacaccataaatctgcgaaacattgtgaaccgggtttacaagaatgtgagtcccatgccgttggtgataggtccgggtggcttctttgaagttgattggttcacagaatacctgaacaaagcagaaaactctctcaatgctactactcgacatatctacgatctcggtccaggagtcgatgaacatctgatagaaaagattctaaacccttcatatctggaccaagaggcaaaaagttttcgcagtctcaagaacataatcaaaaactcctcaacaaaggctgtggcatgggttggtgagtccggtggtgcctacaacagtgggcggaatcttgtctctaatgctttcgtgtatagtttctggtacctggaccagcttggtatggcatcgctttatgatacaaaaacatactgtagacagtctctgatcggaggaaactatgggctgctaaatactactaacttcacaccaaatccagactattacagtgctctgatctggcgacaacttatgggaagaaaggcattgttcacaaccttttccggaaccaaaaagatacgttcgtacacccattgtgcaagacaatcgaaagggatcacagttttactgatgaaccttgacaatactacaacggttgtagcgaaagtagagttaaataacagtttcagtctgagacatacaaagcacatgaagtcttataaaagagcaagttcccaactttttgggggtcctaatggagtaatccaaagagaagagtaccatttgacagcaaaggatggaaacctacacagtcagactatgctactcaacggaaatgctcttcaggttaattcgatgggtgatttacctcctatagagccgatacatataaattcaacagagccaataacaatagctccatattccattgtgtttgtgcatatgcggaatgttgttgtacctgcatgtgcttaa

SEQ ID NO: 72802 - protein, 536 aa, Arabidopsis thaliana
  peptide (1)..(536): Ceres Seq. ID no. 4948139
  misc_feature (28)..(346): Pfam Name: Glycosyl hydrolase family 79, N-terminal domain Pfam Description: Glycosyl hydrolase family 79, N-terminal domain
  misc_feature (1)..(536): Homolog of NCBI NO: 10177640 NR Description: contains similarity to heparanase~gene_id:MGG23.2
  misc_feature (1)..(536): Homolog of NCBI NO: 30692670 NR Description: expressed protein [Arabidopsis thaliana]
  misc_feature (136)..(536): Homolog of NCBI NO: 30692666 NR Description: expressed protein [Arabidopsis thaliana]
  misc_feature (1)..(381): Homolog of NCBI NO: 30692673 NR Description: expressed protein [Arabidopsis thaliana]
  misc_feature (77)..(536): Homolog of NCBI NO: 24413987 NR Description: contains ESTs
  misc_feature (1)..(76): Homolog of NCBI NO: 24413987 NR Description: contains ESTs
  misc_feature (9)..(535): Homolog of NCBI NO: 38174813 NR Description: putative heparanase [Hordeum vulgare subsp.
  misc_feature (9)..(536): Homolog of NCBI NO: 22327999 NR Description: glycosyl hydrolase family 79 (endo-beta- protein id: At5g61250.1, supported by cDNA: gi_20466539 thaliana] >gi|20466540|gb|AAM20587.1| putative protein
  misc_feature (1)..(536): Homolog of NCBI NO: 10176717 NR Description: contains similarity to heparanase~gene_id:MXM12.7
  misc_feature (29)..(536): Homolog of NCBI NO: 9757846 NR Description: contains similarity to heparanase~gene_id:MFB13.2
MAYRQILAIVLFLCVFQFLDCTVSSAVEENGTVFVYGRAAVGTIDEDFICATLDWWPPEKCDYGSCSWDHASILNLDLTIVVPISKNTAFAPLKIRIGGTLQDIVIYETPDSKQPCLPFTKNSSILFGYTQGCLPMRRWDELNAFFRKTGTKVIFGLNALSGRSIKSNGEAIGAWNYTNAESFIRFTAENNYTIDGWELGNELCGSGVGARVGANQYAIDTINLRNIVNRVYKNVSPMPLVIGPGGFFEVDWFTEYLNKAENSLNATTRHIYDLGPGVDEHLIEKILNPSYLDQEAKSFRSLKNIIKNSSTKAVAWVGESGGAYNSGRNLVSNAFVYSFWYLDQLGMASLYDTKTYCRQSLIGGNYGLLNTTNFTPNPDYYSALIWRQLMGRKALFTTFSGTKKIRSYTHCARQSKGITVLLMNLDNTTTVVAKVELNNSFSLRHTKHMKSYKRASSQLFGGPNGVIQREEYHLTAKDGNLHSQTMLLNGNALQVNSMGDLPPIEPIHINSTEPITIAPYSIVFVHMRNVVVPACA

SEQ ID NO: 72803 - protein, 401 aa, Arabidopsis thaliana; identical to SEQ ID NO: 20424
  peptide (1)..(401): Ceres Seq. ID no. 4948140
  misc_feature (1)..(211): Pfam Name: Glycosyl hydrolase family 79, N-terminal domain Pfam Description: Glycosyl hydrolase family 79, N-terminal domain
  misc_feature (1)..(401): Homolog of NCBI NO: 10177640 NR Description: contains similarity to heparanase~gene_id:MGG23.2
  misc_feature (1)..(401): Homolog of NCBI NO: 30692670 NR Description: expressed protein [Arabidopsis thaliana]
  misc_feature (1)..(401): Homolog of NCBI NO: 30692666 NR Description: expressed protein [Arabidopsis thaliana]
  misc_feature (1)..(246): Homolog of NCBI NO: 30692673 NR Description: expressed protein [Arabidopsis thaliana]
  misc_feature (1)..(401): Homolog of NCBI NO: 24413987 NR Description: contains ESTs
  misc_feature (1)..(400): Homolog of NCBI NO: 38174813 NR Description: putative heparanase [Hordeum vulgare subsp.
  misc_feature (1)..(401): Homolog of NCBI NO: 22327999 NR Description: glycosyl hydrolase family 79 (endo-beta- protein id: At5g61250.1, supported by cDNA: gi_20466539 thaliana] >gi|20466540|gb|AAM20587.1| putative protein
  misc_feature (1)..(401): Homolog of NCBI NO: 10176717 NR Description: contains similarity to heparanase~gene_id:MXM12.7
  misc_feature (1)..(401): Homolog of NCBI NO: 9757846 NR Description: contains similarity to heparanase~gene_id:MFB13.2
  misc_feature (1)..(401): Homolog of NCBI NO: 15240869 NR Description: glycosyl hydrolase family 79 (endo-beta-

SEQ ID NO: 72804 - protein, 299 aa, Arabidopsis thaliana; identical to SEQ ID NO: 20425
  peptide (1)..(299): Ceres Seq. ID no. 4948141
  misc_feature (1)..(109): Pfam Name: Glycosyl hydrolase family 79, N-terminal domain Pfam Description: Glycosyl hydrolase family 79, N-terminal domain
  misc_feature (1)..(299): Homolog of NCBI NO: 10177640 NR Description: contains similarity to heparanase~gene_id:MGG23.2
  misc_feature (1)..(299): Homolog of NCBI NO: 30692670 NR Description: expressed protein [Arabidopsis thaliana]
  misc_feature (1)..(299): Homolog of NCBI NO: 30692666 NR Description: expressed protein [Arabidopsis thaliana]
  misc_feature (1)..(144): Homolog of NCBI NO: 30692673 NR Description: expressed protein [Arabidopsis thaliana]
  misc_feature (1)..(299): Homolog of NCBI NO: 24413987 NR Description: contains ESTs
  misc_feature (1)..(298): Homolog of NCBI NO: 38174813 NR Description: putative heparanase [Hordeum vulgare subsp.
  misc_feature (1)..(299): Homolog of NCBI NO: 22327999 NR Description: glycosyl hydrolase family 79 (endo-beta- protein id: At5g61250.1, supported by cDNA: gi_20466539 thaliana] >gi|20466540|gb|AAM20587.1| putative protein
  misc_feature (1)..(299): Homolog of NCBI NO: 10176717 NR Description: contains similarity to heparanase~gene_id:MXM12.7
  misc_feature (1)..(299): Homolog of NCBI NO: 9757846 NR Description: contains similarity to heparanase~gene_id:MFB13.2
  misc_feature (1)..(299): Homolog of NCBI NO: 15240869 NR Description: glycosyl hydrolase family 79 (endo-beta-

SEQ ID NO: 72805 - DNA, 1140 bp, Arabidopsis thaliana
  misc_feature (1)..(1140): Ceres Seq. ID no. 4948502
  misc_feature: MA Experiment ID: 108433 Result: Down-regulated in Transcription
  misc_feature: MA Experiment 108433 PARAMETER Experiment Name: At_rhl_Mutant2_cDNA_P Parameter: Age (day) Value: 7
  misc_feature: MA Experiment 108433 PARAMETER Experiment Name: At_rhl_Mutant2_cDNA_P Parameter: Organism Value: A. thaliana
  misc_feature: MA Experiment 108433 PARAMETER Experiment Name: At_rhl_Mutant2_cDNA_P Parameter: Plant Line Value: rhl Mutant vs. wt landsburg
  misc_feature: MA Experiment 108433 PARAMETER Experiment Name: At_rhl_Mutant2_cDNA_P Parameter: Tissue Value: Roots
  misc_feature: MA Experiment ID: 108461 Result: Up-regulated in Transcription
  misc_feature: MA Experiment 108461 PARAMETER Experiment Name: At_Germinating_Seeds_cDNA_P Parameter: Age (day) Value: 1 vs. 0
  misc_feature: MA Experiment 108461 PARAMETER Experiment Name: At_Germinating_Seeds_cDNA_P Parameter: Tissue Value: Germinating Seeds
  misc_feature: MA Experiment ID: 20000112 Result: Up-regulated in Transcription
  misc_feature: MA Experiment 20000112 PARAMETER Experiment Name: At_42deg_Heat_cDNA_P Parameter: Temperature (deg C) Value: 42 vs. 22
  misc_feature: MA Experiment 20000112 PARAMETER Experiment Name: At_42deg_Heat_cDNA_P Parameter: Timepoint (hr) Value: 2
  misc_feature: MA Experiment 20000112 PARAMETER Experiment Name: At_42deg_Heat_cDNA_P Parameter: Tissue Value: Aerial
  misc_feature: MA Experiment ID: 20000144 Result: Up-regulated in Transcription
  misc_feature: MA Experiment 20000144 PARAMETER Experiment Name: At_42deg_Heat_cDNA_P Parameter: Temperature (deg C) Value: 42 vs. 22
  misc_feature: MA Experiment 20000144 PARAMETER Experiment Name: At_42deg_Heat_cDNA_P Parameter: Timepoint (hr) Value: 1
  misc_feature: MA Experiment 20000144 PARAMETER Experiment Name: At_42deg_Heat_cDNA_P Parameter: Tissue Value: Aerial
  misc_feature: MA Experiment ID: 20000179 Result: Up-regulated in Transcription
  misc_feature: MA Experiment 20000179 PARAMETER Experiment Name: At_Germinating_Seeds_P Parameter: Age (hr) Value: 6 vs. 0
  misc_feature: MA Experiment 20000179 PARAMETER Experiment Name: At_Germinating_Seeds_P Parameter: Tissue Value: Germinating Seeds
  misc_feature: MA Experiment ID: 20000180 Result: Up-regulated in Transcription
  misc_feature: MA Experiment 20000180 PARAMETER Experiment Name: At_Germinating_Seeds_P Parameter: Age (hr) Value: 24 vs. 0
  misc_feature: MA Experiment 20000180 PARAMETER Experiment Name: At_Germinating_Seeds_P Parameter: Tissue Value: Germinating Seeds
  misc_feature: MA Experiment ID: 20000224 Result: Down-regulated in Transcription
ctttctcagattcgctctttcccgagaaaatttgaagaaacagagattcatcattttctcttcctctcaaaaatcagatctgcaaaactctcagatcactcatgggtttgatttcaaaccctacccgtttgattctcgtcgccaccatcttcttcctcgtttcttcaatctccggtcaggattctgtcgttgagaacaatgagagacaagaatctgaaggatctggtaaagagcttggtcgtcgtggaatggttggtactgaacgaattggagttgatactgttgtagacaatattggtgctcttggtttgaatctagaccttgatgctactgctcctagtgtatttgatgctttgttttcgagtttctcgatgatacttgtcaccgagattggggatgaaacttttataatagcggcattgatggctatgcgacatcctaaagctactgttttatctggtgcactctcagctttgtttgttatgactatactttctactggacttggtaggatagtgccaaacttgatatcgaggaagcacaccaatagtgctgctacagtgctctatgcattttttggtttgcgactactctacattgcttggaggtctactgattcaaagtcaaatcagaagaaagaaatggaggaagttgaagagaagctcgagtcaggtcaagggaagacacccttccgtcgtttattctcaagattttgtaccccaatatttctggagtccttcatcttaacctttctagctgaatggggtgaccgtagccagatcgctacaatagctttggcgactcacaagaacgccataggagtggccattggggcaagtattggacacactgtgtgtacttcactagcagttgttggaggaagcatgctggcttcaaggatctcgcaacgtacggtcgcaactgttggaggcttactcttcctcggcttttcagtctcctcctatttctatcctccattgtagtaaatgtgcttctttcgaaaatgggtgttagagacaatttctaagtaaagtttcaattttttttttgattttaatttaagtttgatattttgtttaatatcaatggccaaaatggccaaaccaaagaatccaacgcctatgcttttacaatttactt

SEQ ID NO: 72806 - protein, 293 aa, Arabidopsis thaliana; identical to SEQ ID NO: 25308
  peptide (1)..(293): Ceres Seq. ID no. 4948503
  misc_feature (209)..(284): Pfam Name: Uncharacterized protein family UPF0016 Pfam Description: Uncharacterized protein family UPF0016
  misc_feature (1)..(293): Homolog of NCBI NO: 18421551 NR Description: transmembrane protein FT27/PFT27-like; protein At5g36290.1, supported by cDNA: 12993., supported by cDNA: [Arabidopsis thaliana] >gi|15450794|gb|AAK96668.1| transmembrane
  misc_feature (1)..(273): Homolog of NCBI NO: 9759042 NR Description: transmembrane protein FT27/PFT27-like
  misc_feature (84)..(198): Homolog of NCBI NO: 31240317 NR Description: ENSANGP00000008699 [Anopheles gambiae]
  misc_feature (208)..(292): Homolog of NCBI NO: 31240317 NR Description: ENSANGP00000008699 [Anopheles gambiae]
  misc_feature (73)..(292): Homolog of NCBI NO: 21357589 NR Description: CG4196-PC [Drosophila melanogaster]
  misc_feature (10)..(189): Homolog of NCBI NO: 20385488 NR Description: transmembrane protein HTP-1 [Danio rerio]
  misc_feature (177)..(292): Homolog of NCBI NO: 20385488 NR Description: transmembrane protein HTP-1 [Danio rerio]
  misc_feature (80)..(288): Homolog of NCBI NO: 15222613 NR Description: transmembrane protein, putative; protein id: supported by cDNA: 40780. [Arabidopsis thaliana]
  misc_feature (80)..(288): Homolog of NCBI NO: 21593636 NR Description: transmembrane protein, putative [Arabidopsis
  misc_feature (80)..(289): Homolog of NCBI NO: 15420543 NR Description: putative membrane protein [Crithidia fasciculata]

SEQ ID NO: 72807 - protein, 244 aa, Arabidopsis thaliana; identical to SEQ ID NO: 25309
  peptide (1)..(244): Ceres Seq. ID no. 4948504
  misc_feature (160)..(235): Pfam Name: Uncharacterized protein family UPF0016 Pfam Description: Uncharacterized protein family UPF0016
  misc_feature (1)..(244): Homolog of NCBI NO: 18421551 NR Description: transmembrane protein FT27/PFT27-like; protein At5g36290.1, supported by cDNA: 12993., supported by cDNA: [Arabidopsis thaliana] >gi|15450794|gb|AAK96668.1| transmembrane
  misc_feature (1)..(224): Homolog of NCBI NO: 9759042 NR Description: transmembrane protein FT27/PFT27-like
  misc_feature (35)..(149): Homolog of NCBI NO: 31240317 NR Description: ENSANGP00000008699 [Anopheles gambiae]
  misc_feature (159)..(243): Homolog of NCBI NO: 31240317 NR Description: ENSANGP00000008699 [Anopheles gambiae]
  misc_feature (24)..(243): Homolog of NCBI NO: 21357589 NR Description: CG4196-PC [Drosophila melanogaster]
  misc_feature (1)..(140): Homolog of NCBI NO: 20385488 NR Description: transmembrane protein HTP-1 [Danio rerio]
  misc_feature (128)..(243): Homolog of NCBI NO: 20385488 NR Description: transmembrane protein HTP-1 [Danio rerio]
  misc_feature (31)..(239): Homolog of NCBI NO: 15222613 NR Description: transmembrane protein, putative; protein id: supported by cDNA: 40780. [Arabidopsis thaliana]
  misc_feature (31)..(239): Homolog of NCBI NO: 21593636 NR Description: transmembrane protein, putative [Arabidopsis
  misc_feature (31)..(240): Homolog of NCBI NO: 15420543 NR Description: putative membrane protein [Crithidia fasciculata]

SEQ ID NO: 72808 - protein, 203 aa, Arabidopsis thaliana; identical to SEQ ID NO: 25310
  peptide (1)..(203): Ceres Seq. ID no. 4948505
  misc_feature (119)..(194): Pfam Name: Uncharacterized protein family UPF0016 Pfam Description: Uncharacterized protein family UPF0016
  misc_feature (1)..(203): Homolog of NCBI NO: 18421551 NR Description: transmembrane protein FT27/PFT27-like; protein At5g36290.1, supported by cDNA: 12993., supported by cDNA: [Arabidopsis thaliana] >gi|15450794|gb|AAK96668.1| transmembrane
  misc_feature (1)..(183): Homolog of NCBI NO: 9759042 NR Description: transmembrane protein FT27/PFT27-like
  misc_feature (1)..(108): Homolog of NCBI NO: 31240317 NR Description: ENSANGP00000008699 [Anopheles gambiae]
  misc_feature (118)..(202): Homolog of NCBI NO: 31240317 NR Description: ENSANGP00000008699 [Anopheles gambiae]
  misc_feature (1)..(202): Homolog of NCBI NO: 21357589 NR Description: CG4196-PC [Drosophila melanogaster]
  misc_feature (1)..(99): Homolog of NCBI NO: 20385488 NR Description: transmembrane protein HTP-1 [Danio rerio]
  misc_feature (87)..(202): Homolog of NCBI NO: 20385488 NR Description: transmembrane protein HTP-1 [Danio rerio]
  misc_feature (1)..(198): Homolog of NCBI NO: 15222613 NR Description: transmembrane protein, putative; protein id: supported by cDNA: 40780. [Arabidopsis thaliana]
  misc_feature (1)..(198): Homolog of NCBI NO: 21593636 NR Description: transmembrane protein, putative [Arabidopsis
  misc_feature (1)..(199): Homolog of NCBI NO: 15420543 NR Description: putative membrane protein [Crithidia fasciculata]

SEQ ID NO: 72809 - DNA, 1899 bp, Arabidopsis thaliana
  misc_feature (1)..(1899): Ceres Seq. ID no. 4948732
  misc_feature: MA Experiment ID: 20000227 Result: Down-regulated in Transcription
  misc_feature: MA Experiment 20000227 PARAMETER Experiment Name: At_Root-Tips-vs-Tops_P Parameter: Tissue Value: Root Tips vs. Root Tops
  misc_feature: MA Experiment ID: 20000264 Result: Up-regulated in Transcription
  misc_feature: MA Experiment 20000264 PARAMETER Experiment Name: At_Open_Flower_P Parameter: Age (day) Value: 21
  misc_feature: MA Experiment 20000264 PARAMETER Experiment Name: At_Open_Flower_P Parameter: Plant Line Value: WS
  misc_feature: MA Experiment 20000264 PARAMETER Experiment Name: At_Open_Flower_P Parameter: Tissue Value: Open Flower vs. Whole Plant
  misc_feature: MA Experiment ID: 20000794 Result: Up-regulated in Transcription
  misc_feature: MA Experiment 20000794 PARAMETER Experiment Name: At_Petals_P Parameter: Age (day) Value: 23-25 days
  misc_feature: MA Experiment 20000794 PARAMETER Experiment Name: At_Petals_P Parameter: Plant Line Value: WS
  misc_feature: MA Experiment 20000794 PARAMETER Experiment Name: At_Petals_P Parameter: Tissue Value: Petals vs. Whole plant
  misc_feature: MA Experiment ID: 20001560 Result: Down-regulated in Transcription
  misc_feature: MA Experiment 20001560 PARAMETER Experiment Name: At_Drought_Soil_Dry_P Parameter: Age (day) Value: 28
  misc_feature: MA Experiment 20001560 PARAMETER Experiment Name: At_Drought_Soil_Dry_P Parameter: Organism Value: A. thaliana
  misc_feature: MA Experiment 20001560 PARAMETER Experiment Name: At_Drought_Soil_Dry_P Parameter: Plant Line Value: WS
  misc_feature: MA Experiment 20001560 PARAMETER Experiment Name: At_Drought_Soil_Dry_P Parameter: Post Timepoint (hr) Value: None
  misc_feature: MA Experiment 20001560 PARAMETER Experiment Name: At_Drought_Soil_Dry_P Parameter: Post-Treatment Value: None
  misc_feature: MA Experiment 20001560 PARAMETER Experiment Name: At_Drought_Soil_Dry_P Parameter: Timepoint (day) Value: 14
  misc_feature: MA Experiment 20001560 PARAMETER Experiment Name: At_Drought_Soil_Dry_P Parameter: Treatment Value: Drought vs. No Drought
atgggttgtttaagaagcttagtaagaaggaaacaattcgactcttcaaatggcaaagcagagactcatcatcatcaccaacagcttgcaaaagcgttgacctttcctcacttgattgccattggtgttggatcaacaattggagcaggggtttatattcttgtgggaacagtagctagagagcattcaggacctgctcttgctttatccttccttatagctggaatttctgctgccctttctgcgttttgttatgcggaactatctagtcgttttccctctgctgggagtgcctatcattattcttacatttgcattggtgaaggtttactcattgcctttgcagttttgcttatgaattcttggtactgcagtgttgcgtggttgattggctgggcgctgattttggaatacacaattggtggttcaacagttgcccgcggcatatctccaaatctggcaatgattttcggtggtgaagattgtctgcctacaatattagctcgtcatcaaatcccaggccttgatattgttgttgacccgtgtgctgctgtgctagtgttcattgtaacaggactttgttgccttggagtaaaggagagcacatttgctcagggaattgtaacaacagcaaatgtctttgtcatgatatttgtcatagtagctggaagctatttgtgtttcaagacaggttgggttggttatgaacttccaacggggtattttccttacggggttgatggaatgcttactggatctgctactgtcttctttgcctacatcgggtttgatacagttgcaagtatggcagaggaggtgaaaaatccccggcgggatttaccgctcggtattgggatttcgctcctgctttgttgtttgctgtacatgatggtgtctgttgttattgttggtttagtgccgtattatgctatggaccctgacactccaatatcatccgcattttctagtcatggaattcaatgggctgcatatttgataaatttaggtgctgtcatggctctctgttctgcattaatgggctccattctccctcagccgcggattctgatggcaatggctagggatggtctcttgccttcatatttctcatatgtgaatcaacgcacgcaggttccaattaatggcaccataaccactggtgtttgtgcagcaatcttagctttctttatggatgtttcgcaactggcgggaatggtgagtgtcgggacacttgttgcatttacaatggttgcaatatcattgttgatagtcagatatgttgttcctccagatgaggtactgataagattggaactggtacctcttccctcatcacttcaagaaaactcatccagtcacgtcggaacttccatccgtagtaaacaacctttacttggcaaagtggatgattcagttgtcgataaggaaaatgctccaggaagttgggttctcaacaaaaaaaacagacggaaatttgctggttggagcattatgttcacttgtattggaaacttccttttaagctatgcagcgtcaagcttcctcttgccaggactcctccgatattctctatgtggtgttggtggattgttccttcttgtcggtttgattgttctgatttgcatagatcaggatgatgctagacacagttttgggcattctggaggcttcatttgcccgtttgttccgcttttgcctatagtttgcattcttatcaacatgtatctcttggtaaaccttggagctgcgacgtgggttcgtgtatcggtttggctgttcctcggagtggttgtttacattttctatgggagaagaaacagctctcttgtgaatgctgtttatgtctccactgctcatctccaggagattcgtcgcacttctggacattctttggcttaa

SEQ ID NO: 72810 - protein, 632 aa, Arabidopsis thaliana
  peptide (1)..(632): Ceres Seq. ID no. 4948733
  misc_feature (20)..(632): Homolog of NCBI NO: 30696198 NR Description: expressed protein [Arabidopsis thaliana]
  misc_feature (20)..(632): Homolog of NCBI NO: 23306414 NR Description: Unknown protein [Arabidopsis thaliana]
  misc_feature (2)..(627): Homolog of NCBI NO: 29244640 NR Description: putative cationic amino acid transporter [Oryza
  misc_feature (28)..(629): Homolog of NCBI NO: 22330822 NR Description: putative cationic amino acid transporter; protein At3g03720.1, supported by cDNA: gi_17064863 [Arabidopsis >gi|17064864|gb|AAL32586.1| putative cationic amino acid
  misc_feature (4)..(629): Homolog of NCBI NO: 6006869 NR Description: putative cationic amino acid transporter
  misc_feature (43)..(614): Homolog of NCBI NO: 37534696 NR Description: putative cationic amino acid transporter -like
  misc_feature (6)..(453): Homolog of NCBI NO: 31211135 NR Description: ENSANGP00000016984 [Anopheles gambiae]
  misc_feature (532)..(607): Homolog of NCBI NO: 31211135 NR Description: ENSANGP00000016984 [Anopheles gambiae]
  misc_feature (5)..(428): Homolog of NCBI NO: 24666159 NR Description: CG5535-PB [Drosophila melanogaster]
  misc_feature (529)..(609): Homolog of NCBI NO: 24666159 NR Description: CG5535-PB [Drosophila melanogaster]
MGCLRSLVRRKQFDSSNGKAETHHHHQQLAKALTFPHLIAIGVGSTIGAGVYILVGTVAREHSGPALALSFLIAGISAALSAFCYAELSSRFPSAGSAYHYSYICIGEGLLIAFAVLLMNSWYCSVAWLIGWALILEYTIGGSTVARGISPNLAMIFGGEDCLPTILARHQIPGLDIVVDPCAAVLVFIVTGLCCLGVKESTFAQGIVTTANVFVMIFVIVAGSYLCFKTGWVGYELPTGYFPYGVDGMLTGSATVFFAYIGFDTVASMAEEVKNPRRDLPLGIGISLLLCCLLYMMVSVVIVGLVPYYAMDPDTPISSAFSSHGIQWAAYLINLGAVMALCSALMGSILPQPRILMAMARDGLLPSYFSYVNQRTQVPINGTITTGVCAAILAFFMDVSQLAGMVSVGTLVAFTMVAISLLIVRYVVPPDEVLIRLELVPLPSSLQENSSSHVGTSIRSKQPLLGKVDDSVVDKENAPGSWVLNKKNRRKFAGWSIMFTCIGNFLLSYAASSFLLPGLLRYSLCGVGGLFLLVGLIVLICIDQDDARHSFGHSGGFICPFVPLLPIVCILINMYLLVNLGAATWVRVSVWLFLGVVVYIFYGRRNSSLVNAVYVSTAHLQEIRRTSGHSLA

SEQ ID NO: 72811 - protein, 514 aa, Arabidopsis thaliana
  peptide (1)..(514): Ceres Seq. ID no. 4948734
  misc_feature (1)..(514): Homolog of NCBI NO: 30696198 NR Description: expressed protein [Arabidopsis thaliana]
  misc_feature (1)..(514): Homolog of NCBI NO: 23306414 NR Description: Unknown protein [Arabidopsis thaliana]
  misc_feature (1)..(509): Homolog of NCBI NO: 29244640 NR Description: putative cationic amino acid transporter [Oryza
  misc_feature (1)..(511): Homolog of NCBI NO: 22330822 NR Description: putative cationic amino acid transporter; protein At3g03720.1, supported by cDNA: gi_17064863 [Arabidopsis >gi|17064864|gb|AAL32586.1| putative cationic amino acid
  misc_feature (1)..(511): Homolog of NCBI NO: 6006869 NR Description: putative cationic amino acid transporter
  misc_feature (1)..(496): Homolog of NCBI NO: 37534696 NR Description: putative cationic amino acid transporter -like
  misc_feature (1)..(335): Homolog of NCBI NO: 31211135 NR Description: ENSANGP00000016984 [Anopheles gambiae]
  misc_feature (414)..(489): Homolog of NCBI NO: 31211135 NR Description: ENSANGP00000016984 [Anopheles gambiae]
  misc_feature (1)..(310): Homolog of NCBI NO: 24666159 NR Description: CG5535-PB [Drosophila melanogaster]
  misc_feature (411)..(491): Homolog of NCBI NO: 24666159 NR Description: CG5535-PB [Drosophila melanogaster]
MNSWYCSVAWLIGWALILEYTIGGSTVARGISPNLAMIFGGEDCLPTILARHQIPGLDIVVDPCAAVLVFIVTGLCCLGVKESTFAQGIVTTANVFVMIFVIVAGSYLCFKTGWVGYELPTGYFPYGVDGMLTGSATVFFAYIGFDTVASMAEEVKNPRRDLPLGIGISLLLCCLLYMMVSVVIVGLVPYYAMDPDTPISSAFSSHGIQWAAYLINLGAVMALCSALMGSILPQPRILMAMARDGLLPSYFSYVNQRTQVPINGTITTGVCAAILAFFMDVSQLAGMVSVGTLVAFTMVAISLLIVRYVVPPDEVLIRLELVPLPSSLQENSSSHVGTSIRSKQPLLGKVDDSVVDKENAPGSWVLNKKNRRKFAGWSIMFTCIGNFLLSYAASSFLLPGLLRYSLCGVGGLFLLVGLIVLICIDQDDARHSFGHSGGFICPFVPLLPIVCILINMYLLVNLGAATWVRVSVWLFLGVVVYIFYGRRNSSLVNAVYVSTAHLQEIRRTSGHSLA

SEQ ID NO: 72812 - protein, 478 aa, Arabidopsis thaliana
  peptide (1)..(478): Ceres Seq. ID no. 4948735
  misc_feature (1)..(478): Homolog of NCBI NO: 30696198 NR Description: expressed protein [Arabidopsis thaliana]
  misc_feature (1)..(478): Homolog of NCBI NO: 23306414 NR Description: Unknown protein [Arabidopsis thaliana]
  misc_feature (1)..(473): Homolog of NCBI NO: 29244640 NR Description: putative cationic amino acid transporter [Oryza
  misc_feature (1)..(475): Homolog of NCBI NO: 22330822 NR Description: putative cationic amino acid transporter; protein At3g03720.1, supported by cDNA: gi_17064863 [Arabidopsis >gi|17064864|gb|AAL32586.1| putative cationic amino acid
  misc_feature (1)..(475): Homolog of NCBI NO: 6006869 NR Description: putative cationic amino acid transporter
  misc_feature (1)..(460): Homolog of NCBI NO: 37534696 NR Description: putative cationic amino acid transporter -like
  misc_feature (1)..(299): Homolog of NCBI NO: 31211135 NR Description: ENSANGP00000016984 [Anopheles gambiae]
  misc_feature (378)..(453): Homolog of NCBI NO: 31211135 NR Description: ENSANGP00000016984 [Anopheles gambiae]
  misc_feature (1)..(274): Homolog of NCBI NO: 24666159 NR Description: CG5535-PB [Drosophila melanogaster]
  misc_feature (375)..(455): Homolog of NCBI NO: 24666159 NR Description: CG5535-PB [Drosophila melanogaster]
MIFGGEDCLPTILARHQIPGLDIVVDPCAAVLVFIVTGLCCLGVKESTFAQGIVTTANVFVMIFVIVAGSYLCFKTGWVGYELPTGYFPYGVDGMLTGSATVFFAYIGFDTVASMAEEVKNPRRDLPLGIGISLLLCCLLYMMVSVVIVGLVPYYAMDPDTPISSAFSSHGIQWAAYLINLGAVMALCSALMGSILPQPRILMAMARDGLLPSYFSYVNQRTQVPINGTITTGVCAAILAFFMDVSQLAGMVSVGTLVAFTMVAISLLIVRYVVPPDEVLIRLELVPLPSSLQENSSSHVGTSIRSKQPLLGKVDDSVVDKENAPGSWVLNKKNRRKFAGWSIMFTCIGNFLLSYAASSFLLPGLLRYSLCGVGGLFLLVGLIVLICIDQDDARHSFGHSGGFICPFVPLLPIVCILINMYLLVNLGAATWVRVSVWLFLGVVVYIFYGRRNSSLVNAVYVSTAHLQEIRRTSGHSLA

SEQ ID NO: 72813 - DNA, 1089 bp, Arabidopsis thaliana
  misc_feature (1)..(1089): Ceres Seq. ID no. 4948902
  misc_feature: MA Experiment ID: 20000314 Result: Up-regulated in Transcription
  misc_feature: MA Experiment 20000314 PARAMETER Experiment Name: At_14day_Shoots-Roots_Sub_P Parameter: Age (day) Value: 14
  misc_feature: MA Experiment 20000314 PARAMETER Experiment Name: At_14day_Shoots-Roots_Sub_P Parameter: Organism Value: A. thaliana
  misc_feature: MA Experiment 20000314 PARAMETER Experiment Name: At_14day_Shoots-Roots_Sub_P Parameter: Plant Line Value: WS
  misc_feature: MA Experiment 20000314 PARAMETER Experiment Name: At_14day_Shoots-Roots_Sub_P Parameter: Tissue Value: Roots vs. Whole Plant
  misc_feature: MA Experiment ID: 20000315 Result: Up-regulated in Transcription
  misc_feature: MA Experiment 20000315 PARAMETER Experiment Name: At_14day_Shoots-Roots_Sub_P Parameter: Age (day) Value: 14
  misc_feature: MA Experiment 20000315 PARAMETER Experiment Name: At_14day_Shoots-Roots_Sub_P Parameter: Organism Value: A. thaliana
  misc_feature: MA Experiment 20000315 PARAMETER Experiment Name: At_14day_Shoots-Roots_Sub_P Parameter: Plant Line Value: WS
  misc_feature: MA Experiment 20000315 PARAMETER Experiment Name: At_14day_Shoots-Roots_Sub_P Parameter: Tissue Value: Shoots vs. Whole Plant
  misc_feature: MA Experiment ID: 20000634 Result: Down-regulated in Transcription
  misc_feature: MA Experiment 20000634 PARAMETER Experiment Name: At_10percent_PEG_Sub_P Parameter: Age (day) Value: 12
  misc_feature: MA Experiment 20000634 PARAMETER Experiment Name: At_10percent_PEG_Sub_P Parameter: Organism Value: A. thaliana
  misc_feature: MA Experiment 20000634 PARAMETER Experiment Name: At_10percent_PEG_Sub_P Parameter: Plant Line Value: WS
  misc_feature: MA Experiment 20000634 PARAMETER Experiment Name: At_10percent_PEG_Sub_P Parameter: Timepoint (day) Value: 12
  misc_feature: MA Experiment 20000634 PARAMETER Experiment Name: At_10percent_PEG_Sub_P Parameter: Tissue Value: Whole Plant
  misc_feature: MA Experiment 20000634 PARAMETER Experiment Name: At_10percent_PEG_Sub_P Parameter: Treatment Value: 10% PEG vs. No Treatment
atgccaacatttcctcaatcgtttcctatgaacggtggtgatggtccgcacagttacatccacaattcctcttatcaaaaagtagcgatagatggcgctaaagaaaagacaagtgaagccatcctaaaaaacctcgatctcgaactcttgaaccgtaattctgatgaaaatatcttaagaattgcggattttggttgttctattggacccaacacgttcgaagtagtccaaaatattatcgatacggtgaagcaaaaaaacctaaaagaaaacaatgcctatattggtgctcctctcgagttccaagtttgcttcaatgatcaaccaaacaatgattttaacacactttttagaacccaacctatctcttccaaacaagcatatttatcggttggagttccaggatctttccatggtagagtattaccaaaaaatagcctccatatcggtcacattacctatgcgctccactggctttctacagttccccaacatgtttgcgacaagaaatctccggcattgaataaaagctacattcaatgtaataatttagtagaggaagtgactgaagcttaccgggtccagtttaaaaaggacatgggagattttcttggggcaagagctgaagagcttgtttcgggcggattgatgatcctatcaggacaatgcttgcccgatggtgtccctaaggctttgacatggcaaggggttgtgatcgatatgattggagattgtcttatggatatggctaaacagggaattacgaccaaggaaaagatcgaactgttcagtttgcccatatatattccgcatattagtgaattcaaggcagaaatagagcgaaatgaaaactttagtatcgagacaatggagaagataagtcatcctatggattataagccactaaccaacgacttcatcacttccatgtttcgagccattctcaatacgattattgaagaacactttggagatggtgtggtcaatgagctattcgatcgatttgctaagaagctcaacaagtacccaattgatttcaaaaggtgtaaaaagtatgtgaattattttatcgtgcttaaaagaaaataa

SEQ ID NO: 72814 - protein, 362 aa, Arabidopsis thaliana; identical to SEQ ID NO: 71119
  peptide (1)..(362): Ceres Seq. ID no. 4948903
  misc_feature (37)..(362): Pfam Name: SAM dependent carboxyl methyltransferase Pfam Description: SAM dependent carboxyl methyltransferase
  misc_feature (1)..(362): Homolog of NCBI NO: 9758498 NR Description: S-adenosyl-L-methionine:salicylic acid carboxyl
  misc_feature (1)..(362): Homolog of NCBI NO: 15240811 NR Description: methyltransferase-related; protein id:
  misc_feature (1)..(362): Homolog of NCBI NO: 9758496 NR Description: S-adenosyl-L-methionine:salicylic acid carboxyl
  misc_feature (1)..(362): Homolog of NCBI NO: 15240809 NR Description: methyltransferase-related; protein id:
  misc_feature (1)..(362): Homolog of NCBI NO: 8885614 NR Description: S-adenosyl-L-methionine:salicylic acid carboxyl
  misc_feature (1)..(362): Homolog of NCBI NO: 15241002 NR Description: methyltransferase-related; protein id: supported by cDNA: gi_17380699, supported by cDNA: gi_20259006
  misc_feature (1)..(253): Homolog of NCBI NO: 15240841 NR Description: methyltransferase-related; protein id:
  misc_feature (7)..(361): Homolog of NCBI NO: 14009292 NR Description: defense-related protein [Brassica carinata]
  misc_feature (7)..(361): Homolog of NCBI NO: 15230523 NR Description: methyltransferase-related; protein id: At3g44840.1
  misc_feature (7)..(361): Homolog of NCBI NO: 15230529 NR Description: methyltransferase-related; protein id: supported by cDNA: gi_15293070 [Arabidopsis thaliana]

SEQ ID NO: 72815 - protein, 353 aa, Arabidopsis thaliana
  peptide (1)..(353): Ceres Seq. ID no. 4948904
  misc_feature (28)..(353): Pfam Name: SAM dependent carboxyl methyltransferase Pfam Description: SAM dependent carboxyl methyltransferase
  misc_feature (1)..(353): Homolog of NCBI NO: 9758498 NR Description: S-adenosyl-L-methionine:salicylic acid carboxyl
  misc_feature (1)..(353): Homolog of NCBI NO: 15240811 NR Description: methyltransferase-related; protein id:
  misc_feature (1)..(353): Homolog of NCBI NO: 9758496 NR Description: S-adenosyl-L-methionine:salicylic acid carboxyl
  misc_feature (1)..(353): Homolog of NCBI NO: 15240809 NR Description: methyltransferase-related; protein id:
  misc_feature (1)..(353): Homolog of NCBI NO: 8885614 NR Description: S-adenosyl-L-methionine:salicylic acid carboxyl
  misc_feature (1)..(353): Homolog of NCBI NO: 15241002 NR Description: methyltransferase-related; protein id: supported by cDNA: gi_17380699, supported by cDNA: gi_20259006
  misc_feature (1)..(244): Homolog of NCBI NO: 15240841 NR Description: methyltransferase-related; protein id:
  misc_feature (1)..(352): Homolog of NCBI NO: 14009292 NR Description: defense-related protein [Brassica carinata]
  misc_feature (1)..(352): Homolog of NCBI NO: 15230523 NR Description: methyltransferase-related; protein id: At3g44840.1
  misc_feature (1)..(352): Homolog of NCBI NO: 15230529 NR Description: methyltransferase-related; protein id: supported by cDNA: gi_15293070 [Arabidopsis thaliana]
MNGGDGPHSYIHNSSYQKVAIDGAKEKTSEAILKNLDLELLNRNSDENILRIADFGCSIGPNTFEVVQNIIDTVKQKNLKENNAYIGAPLEFQVCFNDQPNNDFNTLFRTQPISSKQAYLSVGVPGSFHGRVLPKNSLHIGHITYALHWLSTVPQHVCDKKSPALNKSYIQCNNLVEEVTEAYRVQFKKDMGDFLGARAEELVSGGLMILSGQCLPDGVPKALTWQGVVIDMIGDCLMDMAKQGITTKEKIELFSLPIYIPHISEFKAEIERNENFSIETMEKISHPMDYKPLTNDFITSMFRAILNTIIEEHFGDGVVNELFDRFAKKLNKYPIDFKRCKKYVNYFIVLKRK

SEQ ID NO: 72816 - DNA, 1557 bp, Arabidopsis thaliana
  misc_feature (1)..(1557): Ceres Seq. ID no. 4948905
  misc_feature: MA Experiment ID: 20000173 Result: Up-regulated in Transcription
  misc_feature: MA Experiment 20000173 PARAMETER Experiment Name: At_42deg_Heat_P Parameter: Age (day) Value: 14
  misc_feature: MA Experiment 20000173 PARAMETER Experiment Name: At_42deg_Heat_P Parameter: Organism Value: A. thaliana
  misc_feature: MA Experiment 20000173 PARAMETER Experiment Name: At_42deg_Heat_P Parameter: Plant Line Value: WS
  misc_feature: MA Experiment 20000173 PARAMETER Experiment Name: At_42deg_Heat_P Parameter: Temperature (deg C) Value: 42 vs. 22
  misc_feature: MA Experiment 20000173 PARAMETER Experiment Name: At_42deg_Heat_P Parameter: Timepoint (hr) Value: 6
  misc_feature: MA Experiment 20000173 PARAMETER Experiment Name: At_42deg_Heat_P Parameter: Tissue Value: Aerial
  misc_feature: MA Experiment ID: 20000185 Result: Up-regulated in Transcription
  misc_feature: MA Experiment 20000185 PARAMETER Experiment Name: At_Roots__P Parameter: Age (day) Value: 7 vs. 21
  misc_feature: MA Experiment 20000185 PARAMETER Experiment Name: At_Roots__P Parameter: Organism Value: A. thaliana
  misc_feature: MA Experiment 20000185 PARAMETER Experiment Name: At_Roots__P Parameter: Tissue Value: Roots vs. Whole Plant
  misc_feature: MA Experiment ID: 20000436 Result: Down-regulated in Transcription
  misc_feature: MA Experiment 20000436 PARAMETER Experiment Name: At_Drought_P Parameter: Age (day) Value: 7
  misc_feature: MA Experiment 20000436 PARAMETER Experiment Name: At_Drought_P Parameter: Organism Value: A. thaliana
  misc_feature: MA Experiment 20000436 PARAMETER Experiment Name: At_Drought_P Parameter: Plant Line Value: WS
  misc_feature: MA Experiment 20000436 PARAMETER Experiment Name: At_Drought_P Parameter: Timepoint (hr) Value: 12
  misc_feature: MA Experiment 20000436 PARAMETER Experiment Name: At_Drought_P Parameter: Tissue Value: Whole Plant
  misc_feature: MA Experiment 20000436 PARAMETER Experiment Name: At_Drought_P Parameter: Treatment Value: Drought vs. No Drought
  misc_feature: MA Experiment ID: 20000439 Result: Up-regulated in Transcription
  misc_feature: MA Experiment 20000439 PARAMETER Experiment Name: At_Roots__P Parameter: Age (day) Value: 14 vs. 21
  misc_feature: MA Experiment 20000439 PARAMETER Experiment Name: At_Roots__P Parameter: Organism Value: A. thaliana
  misc_feature: MA Experiment 20000439 PARAMETER Experiment Name: At_Roots__P Parameter: Tissue Value: Roots vs. Whole Plant
  misc_feature: MA Experiment ID: 20000451 Result: Down-regulated in Transcription
  misc_feature: MA Experiment 20000451 PARAMETER Experiment Name: At_CS6879_Shoots-Roots_P Parameter: Age (day) Value: 14
  misc_feature: MA Experiment 20000451 PARAMETER Experiment Name: At_CS6879_Shoots-Roots_P Parameter: Organism Value: A. thaliana
  misc_feature: MA Experiment 20000451 PARAMETER Experiment Name: At_CS6879_Shoots-Roots_P Parameter: Plant Line Value: CS6879 vs. WS
  misc_feature: MA Experiment 20000451 PARAMETER Experiment Name: At_CS6879_Shoots-Roots_P Parameter: Tissue Value: Roots
  misc_feature: MA Experiment ID: 20000460 Result: Up-regulated in Transcription
  misc_feature: MA Experiment 20000460 PARAMETER Experiment Name: At_10percent_PEG_P Parameter: Age (day) Value: 12
  misc_feature: MA Experiment 20000460 PARAMETER Experiment Name: At_10percent_PEG_P Parameter: Organism Value: A. thaliana
  misc_feature: MA Experiment 20000460 PARAMETER Experiment Name: At_10percent_PEG_P Parameter: Plant Line Value: WS
  misc_feature: MA Experiment 20000460 PARAMETER Experiment Name: At_10percent_PEG_P Parameter: Timepoint (day) Value: 12
  misc_feature: MA Experiment 20000460 PARAMETER Experiment Name: At_10percent_PEG_P Parameter: Tissue Value: Whole Plant
  misc_feature: MA Experiment 20000460 PARAMETER Experiment Name: At_10percent_PEG_P Parameter: Treatment Value: 10percent PEG vs. No Treatment
  misc_feature: MA Experiment ID: 20000527 Result: Up-regulated in Transcription
  misc_feature: MA Experiment 20000527 PARAMETER Experiment Name: At_10percent_PEG_P Parameter: Age (day) Value: 20
  misc_feature: MA Experiment 20000527 PARAMETER Experiment Name: At_10percent_PEG_P Parameter: Organism Value: A. thaliana
  misc_feature: MA Experiment 20000527 PARAMETER Experiment Name: At_10percent_PEG_P Parameter: Plant Line Value: WS
  misc_feature: MA Experiment 20000527 PARAMETER Experiment Name: At_10percent_PEG_P Parameter: Timepoint (day) Value: 20
  misc_feature: MA Experiment 20000527 PARAMETER Experiment Name: At_10percent_PEG_P Parameter: Tissue Value: Whole Plant
  misc_feature: MA Experiment 20000527 PARAMETER Experiment Name: At_10percent_PEG_P Parameter: Treatment Value: 10percent PEG vs. No Treatment
  misc_feature: Pfam Name: p450 Pfam Description: Cytochrome P450
atgttgcttactatattaaaatcactcctcgtgatattcgtgactacgatattgagagttttatacgacaccatatcgtgctactggctaacacctagacgaatcaagaagatcatggaacagcaaggcgtaacgggtcctaaaccgcgtccgttaaccggaaatatccttgaaatctcggccatggtttcgcaatccgcttccaaggattgtgactctattcaccatgacatcgtcggccgccttctcccgcattacgttgcttggtccaaacaatacgggaagaggtttattgtgtggaacgggacggatcctcggctttgcttaacggaaacggaattgataaaggagttgctgatgaaacacaacggtgttagtggaagatcgtggctacaacaacaagggactaagaattttatcggtcgcggtctcctaatggctaatggccaagattggcaccaccaacgccaccttgctgcaccggcatttaccggagaaagactcaagggatacgcaaggcatatggtggagtgcacaagcaagctagttgagaggttgaggaaggaagttggggaaggagcaaatgaggtggagataggagaggagatgcataaactcacggctgatattatatcgaggacaaagttcggaagcagctttgagaaaggcaaagagcttttcaaccacctcactgtcctccagcgccgttgcgctcaagccacccgccacctctgctttcccggcagccggtttcttccaagcaaatacaacagagagatcaagtctctgaaaaaagaagttgagcgtttgttgattgagatcatacaaagcaggcgagactgcgctgaaatgggtaggagtagcactcacggtgacgaccttctcgggcttctcttgaacgaaatggatattgacaagaacaataacaataacaacaacaatcttcagttgataatggatgaatgcaagacattcttctttgctggccatgaaaccacggctttgctcctcacatggacaacaatgctcctcgccgataatcccacatggcaggaaaaagtccgtgaggaggtcagggaggtctttggccgcaatggccttccctcagtcgatcaactatctaagctaacctcgttaagcaaagtgattaacgagtcactaagactttaccctccagctactcttctaccaaggatggcatttgaagatctaaaactaggtgatctaaccattcctaaaggtttatcaatatggataccggttcttgctatccatcacagtgaagaattatggggtaaagacgcgaaccaattcaatcccgaacgttttggaggcagaccattcgcgtctggtcgccatttcatcccatttgcagccggtccacggaactgcatcggacaacagtttgcgttgatggaagctaaaataatattagccacgttaatttcaaagtttaacttcacaatatcaaagaattataggcatgccccaatcgttgtgcttactataaaacctaagtatggagttcaagtgatattgaagccattggtttcatga

SEQ ID NO: 72817 - protein, 518 aa, Arabidopsis thaliana
  peptide (1)..(518): Ceres Seq. ID no. 4948906
  misc_feature: Pfam Name: p450 Pfam Description: Cytochrome P450
  misc_feature (1)..(518): Homolog of NCBI NO: 15240917 NR Description: cytochrome p450, putative; protein id: At5g38450.1
  misc_feature (1)..(516): Homolog of NCBI NO: 15219831 NR Description: cytochrome P450, putative; protein id: [Arabidopsis thaliana] >gi|25282618|pir||A96695 hypothetical
  misc_feature (17)..(516): Homolog of NCBI NO: 25553701 NR Description: putative cytochrome P450 [Oryza sativa (japonica
  misc_feature (2)..(516): Homolog of NCBI NO: 15226472 NR Description: cytochrome p450, putative; protein id: [Arabidopsis thaliana] >gi|7430708|pir||T02192 probable
  misc_feature (11)..(516): Homolog of NCBI NO: 21805645 NR Description: cytochrome P450 monooxygenase CYP72A5 [Zea mays
  misc_feature (1)..(516): Homolog of NCBI NO: 18407219 NR Description: cytochrome P450, putative; protein id: supported by cDNA: gi_13605860, supported by cDNA: gi_20147140 thaliana] >gi|13605861|gb|AAK32916.1|AF367329_1
  misc_feature (29)..(516): Homolog of NCBI NO: 38112707 NR Description: cytochrome P450 [Triticum aestivum]
  misc_feature (1)..(516): Homolog of NCBI NO: 7484896 NR Description: cytochrome P450 homolog F14M4.21 - Arabidopsis
  misc_feature (24)..(516): Homolog of NCBI NO: 21842133 NR Description: cytochrome P450 monooxygenase CYP72A16 [Zea mays
  misc_feature (2)..(516): Homolog of NCBI NO: 15234248 NR Description: cytochrome P450 - like protein; protein id: [Arabidopsis thaliana] >gi|7484900|pir||T05876 cytochrome P450
MLLTILKSLLVIFVTTILRVLYDTISCYWLTPRRIKKIMEQQGVTGPKPRPLTGNILEISAMVSQSASKDCDSIHHDIVGRLLPHYVAWSKQYGKRFIVWNGTDPRLCLTETELIKELLMKHNGVSGRSWLQQQGTKNFIGRGLLMANGQDWHHQRHLAAPAFTGERLKGYARHMVECTSKLVERLRKEVGEGANEVEIGEEMHKLTADIISRTKFGSSFEKGKELFNHLTVLQRRCAQATRHLCFPGSRFLPSKYNREIKSLKKEVERLLIEIIQSRRDCAEMGRSSTHGDDLLGLLLNEMDIDKNNNNNNNNLQLIMDECKTFFFAGHETTALLLTWTTMLLADNPTWQEKVREEVREVFGRNGLPSVDQLSKLTSLSKVINESLRLYPPATLLPRMAFEDLKLGDLTIPKGLSIWIPVLAIHHSEELWGKDANQFNPERFGGRPFASGRHFIPFAAGPRNCIGQQFALMEAKIILATLISKFNFTISKNYRHAPIVVLTIKPKYGVQVILKPLVS

SEQ ID NO: 72818 - protein, 480 aa, Arabidopsis thaliana
  peptide (1)..(480): Ceres Seq. ID no. 4948907
  misc_feature: Pfam Name: p450 Pfam Description: Cytochrome P450
  misc_feature (1)..(480): Homolog of NCBI NO: 15240917 NR Description: cytochrome p450, putative; protein id: At5g38450.1
  misc_feature (1)..(478): Homolog of NCBI NO: 15219831 NR Description: cytochrome P450, putative; protein id: [Arabidopsis thaliana] >gi|25282618|pir||A96695 hypothetical
  misc_feature (1)..(478): Homolog of NCBI NO: 25553701 NR Description: putative cytochrome P450 [Oryza sativa (japonica
  misc_feature (1)..(478): Homolog of NCBI NO: 15226472 NR Description: cytochrome p450, putative; protein id: [Arabidopsis thaliana] >gi|7430708|pir||T02192 probable
  misc_feature (1)..(478): Homolog of NCBI NO: 21805645 NR Description: cytochrome P450 monooxygenase CYP72A5 [Zea mays
  misc_feature (1)..(478): Homolog of NCBI NO: 18407219 NR Description: cytochrome P450, putative; protein id: supported by cDNA: gi_13605860, supported by cDNA: gi_20147140 thaliana] >gi|13605861|gb|AAK32916.1|AF367329_1
  misc_feature (1)..(478): Homolog of NCBI NO: 38112707 NR Description: cytochrome P450 [Triticum aestivum]
  misc_feature (1)..(478): Homolog of NCBI NO: 7484896 NR Description: cytochrome P450 homolog F14M4.21 - Arabidopsis
  misc_feature (1)..(478): Homolog of NCBI NO: 21842133 NR Description: cytochrome P450 monooxygenase CYP72A16 [Zea mays
  misc_feature (1)..(478): Homolog of NCBI NO: 15234248 NR Description: cytochrome P450 - like protein; protein id: [Arabidopsis thaliana] >gi|7484900|pir||T05876 cytochrome P450
MEQQGVTGPKPRPLTGNILEISAMVSQSASKDCDSIHHDIVGRLLPHYVAWSKQYGKRFIVWNGTDPRLCLTETELIKELLMKHNGVSGRSWLQQQGTKNFIGRGLLMANGQDWHHQRHLAAPAFTGERLKGYARHMVECTSKLVERLRKEVGEGANEVEIGEEMHKLTADIISRTKFGSSFEKGKELFNHLTVLQRRCAQATRHLCFPGSRFLPSKYNREIKSLKKEVERLLIEIIQSRRDCAEMGRSSTHGDDLLGLLLNEMDIDKNNNNNNNNLQLIMDECKTFFFAGHETTALLLTWTTMLLADNPTWQEKVREEVREVFGRNGLPSVDQLSKLTSLSKVINESLRLYPPATLLPRMAFEDLKLGDLTIPKGLSIWIPVLAIHHSEELWGKDANQFNPERFGGRPFASGRHFIPFAAGPRNCIGQQFALMEAKIILATLISKFNFTISKNYRHAPIVVLTIKPKYGVQVILKPLVS

SEQ ID NO: 72819 - protein, 457 aa, Arabidopsis thaliana
  peptide (1)..(457): Ceres Seq. ID no. 4948908
  misc_feature: Pfam Name: p450 Pfam Description: Cytochrome P450
  misc_feature (1)..(457): Homolog of NCBI NO: 15240917 NR Description: cytochrome p450, putative; protein id: At5g38450.1
  misc_feature (1)..(455): Homolog of NCBI NO: 15219831 NR Description: cytochrome P450, putative; protein id: [Arabidopsis thaliana] >gi|25282618|pir||A96695 hypothetical
  misc_feature (1)..(455): Homolog of NCBI NO: 25553701 NR Description: putative cytochrome P450 [Oryza sativa (japonica
  misc_feature (1)..(455): Homolog of NCBI NO: 15226472 NR Description: cytochrome p450, putative; protein id: [Arabidopsis thaliana] >gi|7430708|pir||T02192 probable
  misc_feature (1)..(455): Homolog of NCBI NO: 21805645 NR Description: cytochrome P450 monooxygenase CYP72A5 [Zea mays
  misc_feature (1)..(455): Homolog of NCBI NO: 18407219 NR Description: cytochrome P450, putative; protein id: supported by cDNA: gi_13605860, supported by cDNA: gi_20147140 thaliana] >gi|13605861|gb|AAK32916.1|AF367329_1
  misc_feature (1)..(455): Homolog of NCBI NO: 38112707 NR Description: cytochrome P450 [Triticum aestivum]
  misc_feature (1)..(455): Homolog of NCBI NO: 7484896 NR Description: cytochrome P450 homolog F14M4.21 - Arabidopsis
  misc_feature (1)..(455): Homolog of NCBI NO: 21842133 NR Description: cytochrome P450 monooxygenase CYP72A16 [Zea mays
  misc_feature (1)..(455): Homolog of NCBI NO: 15234248 NR Description: cytochrome P450 - like protein; protein id: [Arabidopsis thaliana] >gi|7484900|pir||T05876 cytochrome P450
MVSQSASKDCDSIHHDIVGRLLPHYVAWSKQYGKRFIVWNGTDPRLCLTETELIKELLMKHNGVSGRSWLQQQGTKNFIGRGLLMANGQDWHHQRHLAAPAFTGERLKGYARHMVECTSKLVERLRKEVGEGANEVEIGEEMHKLTADIISRTKFGSSFEKGKELFNHLTVLQRRCAQATRHLCFPGSRFLPSKYNREIKSLKKEVERLLIEIIQSRRDCAEMGRSSTHGDDLLGLLLNEMDIDKNNNNNNNNLQLIMDECKTFFFAGHETTALLLTWTTMLLADNPTWQEKVREEVREVFGRNGLPSVDQLSKLTSLSKVINESLRLYPPATLLPRMAFEDLKLGDLTIPKGLSIWIPVLAIHHSEELWGKDANQFNPERFGGRPFASGRHFIPFAAGPRNCIGQQFALMEAKIILATLISKFNFTISKNYRHAPIVVLTIKPKYGVQVILKPLVS

SEQ ID NO: 72820 - DNA, 1072 bp, Arabidopsis thaliana
  misc_feature (1)..(1072): Ceres Seq. ID no. 4948995
  misc_feature: MA Experiment ID: 20000185 Result: Down-regulated in Transcription
  misc_feature: MA Experiment 20000185 PARAMETER Experiment Name: At_Roots__P Parameter: Age (day) Value: 7 vs. 21
  misc_feature: MA Experiment 20000185 PARAMETER Experiment Name: At_Roots__P Parameter: Organism Value: A. thaliana
  misc_feature: MA Experiment 20000185 PARAMETER Experiment Name: At_Roots__P Parameter: Tissue Value: Roots vs. Whole Plant
  misc_feature: MA Experiment ID: 20000439 Result: Down-regulated in Transcription
  misc_feature: MA Experiment 20000439 PARAMETER Experiment Name: At_Roots__P Parameter: Age (day) Value: 14 vs. 21
  misc_feature: MA Experiment 20000439 PARAMETER Experiment Name: At_Roots__P Parameter: Organism Value: A. thaliana
  misc_feature: MA Experiment 20000439 PARAMETER Experiment Name: At_Roots__P Parameter: Tissue Value: Roots vs. Whole Plant
  misc_feature: Pfam Name: Pept_tRNA_hydro Pfam Description: Peptidyl-tRNA hydrolase
acttaaagatgataagtactgtactgtactgtctaatgtctatcctctcttaaggcttcgtttcaaattcttcaatcgtcctttagaaatcctcaaaatatccacaattttcctctctttacccagaagatttcatcagaacctcttcgccattaatggttacagcgatgttttgtgcatcatcttctccaattacatctcctctctacccaaaagcttataaattttctcaaacaaaatcgaattcgaagagattttcctctctgcgtgcttcgttgcctgtttctgataacaagcttcttaaatttgaatacacaccatggcttattgttggacttggtaaccctggattaaagtattacggaacaaggcataatattggttttgagatgattgatcatatagctcgagcaacggatatttctatgaacacaattcagtccaaggctttagttgggataggttctgttggagaagttccgattttgttggttaaacctcaaggatacatgaatttcagtggtgaatcggttgggccgttagctgcttactaccaaatacccttacgtcacattcttatgatatatgatgacatgggtttgtctaatggtgtcttgagacttcaaccaaaaggtgggcatagccaacacaatggattgaagaatgtgacagaacatttaaatggttgtcgcggctatccccgcttatcaatcggaattggaaatccaccaggtaacatggacatgaaagcgtttcttctccagaaattcagccccttggagcgcaaacagatggatgagggactggaacaaggtgttgaaggtgtgaagacacttgttgaagaggggtttagtgactcaatatctcgattcaatttgggacagaaatacaagtttcataaagtttgattccttgacatttgcctcatcgtgatacctgtcacagtaacagtagcaacacccatagtccaacattgttcatttgttcttatccttgtggtctttgtttagctgataggtaatattgtaacatttgtattctctaagatcaattttattgatttatattttgt

SEQ ID NO: 72821 - protein, 250 aa, Arabidopsis thaliana
  peptide (1)..(250): Ceres Seq. ID no. 4948996
  misc_feature: Pfam Name: Pept_tRNA_hydro Pfam Description: Peptidyl-tRNA hydrolase
  misc_feature (5)..(250): Homolog of NCBI NO: 15240875 NR Description: CRS2 -like protein; protein id: At5g38290.1
  misc_feature (5)..(250): Homolog of NCBI NO: 26451849 NR Description: putative CRS2 [Arabidopsis thaliana]
  misc_feature (16)..(250): Homolog of NCBI NO: 15237280 NR Description: CRS2-like protein; protein id: At5g16140.1
  misc_feature (1)..(250): Homolog of NCBI NO: 6752919 NR Description: CRS2 [Zea mays]
  misc_feature (52)..(250): Homolog of NCBI NO: 40889730 NR Description: Chain A, Crystal Structure Of The Chloroplast
  misc_feature (52)..(250): Homolog of NCBI NO: 40889731 NR Description: Chain A, Structure Of The Group Ii Intron
  misc_feature (52)..(248): Homolog of NCBI NO: 40889732 NR Description: Chain A, Structure Of The Chloroplast Group Ii
  misc_feature (53)..(249): Homolog of NCBI NO: 30687503 NR Description: expressed protein [Arabidopsis thaliana]
  misc_feature (20)..(240): Homolog of NCBI NO: 30685853 NR Description: expressed protein [Arabidopsis thaliana]
  misc_feature (20)..(240): Homolog of NCBI NO: 26453108 NR Description: unknown protein [Arabidopsis thaliana]
MVTAMFCASSSPITSPLYPKAYKFSQTKSNSKRFSSLRASLPVSDNKLLKFEYTPWLIVGLGNPGLKYYGTRHNIGFEMIDHIARATDISMNTIQSKALVGIGSVGEVPILLVKPQGYMNFSGESVGPLAAYYQIPLRHILMIYDDMGLSNGVLRLQPKGGHSQHNGLKNVTEHLNGCRGYPRLSIGIGNPPGNMDMKAFLLQKFSPLERKQMDEGLEQGVEGVKTLVEEGFSDSISRFNLGQKYKFHKV

SEQ ID NO: 72822 - protein, 246 aa, Arabidopsis thaliana
  peptide (1)..(246): Ceres Seq. ID no. 4948997
  misc_feature: Pfam Name: Pept_tRNA_hydro Pfam Description: Peptidyl-tRNA hydrolase
  misc_feature (1)..(246): Homolog of NCBI NO: 15240875 NR Description: CRS2 -like protein; protein id: At5g38290.1
  misc_feature (1)..(246): Homolog of NCBI NO: 26451849 NR Description: putative CRS2 [Arabidopsis thaliana]
  misc_feature (12)..(246): Homolog of NCBI NO: 15237280 NR Description: CRS2-like protein; protein id: At5g16140.1
  misc_feature (1)..(246): Homolog of NCBI NO: 6752919 NR Description: CRS2 [Zea mays]
  misc_feature (48)..(246): Homolog of NCBI NO: 40889730 NR Description: Chain A, Crystal Structure Of The Chloroplast
  misc_feature (48)..(246): Homolog of NCBI NO: 40889731 NR Description: Chain A, Structure Of The Group Ii Intron
  misc_feature (48)..(244): Homolog of NCBI NO: 40889732 NR Description: Chain A, Structure Of The Chloroplast Group Ii
  misc_feature (49)..(245): Homolog of NCBI NO: 30687503 NR Description: expressed protein [Arabidopsis thaliana]
  misc_feature (16)..(236): Homolog of NCBI NO: 30685853 NR Description: expressed protein [Arabidopsis thaliana]
  misc_feature (16)..(236): Homolog of NCBI NO: 26453108 NR Description: unknown protein [Arabidopsis thaliana]
MFCASSSPITSPLYPKAYKFSQTKSNSKRFSSLRASLPVSDNKLLKFEYTPWLIVGLGNPGLKYYGTRHNIGFEMIDHIARATDISMNTIQSKALVGIGSVGEVPILLVKPQGYMNFSGESVGPLAAYYQIPLRHILMIYDDMGLSNGVLRLQPKGGHSQHNGLKNVTEHLNGCRGYPRLSIGIGNPPGNMDMKAFLLQKFSPLERKQMDEGLEQGVEGVKTLVEEGFSDSISRFNLGQKYKFHKV

SEQ ID NO: 72823 - protein, 172 aa, Arabidopsis thaliana
  peptide (1)..(172): Ceres Seq. ID no. 4948998
  misc_feature: Pfam Name: Pept_tRNA_hydro Pfam Description: Peptidyl-tRNA hydrolase
  misc_feature (1)..(172): Homolog of NCBI NO: 15240875 NR Description: CRS2 -like protein; protein id: At5g38290.1
  misc_feature (1)..(172): Homolog of NCBI NO: 26451849 NR Description: putative CRS2 [Arabidopsis thaliana]
  misc_feature (1)..(172): Homolog of NCBI NO: 15237280 NR Description: CRS2-like protein; protein id: At5g16140.1
  misc_feature (1)..(172): Homolog of NCBI NO: 6752919 NR Description: CRS2 [Zea mays]
  misc_feature (1)..(172): Homolog of NCBI NO: 40889730 NR Description: Chain A, Crystal Structure Of The Chloroplast
  misc_feature (1)..(172): Homolog of NCBI NO: 40889731 NR Description: Chain A, Structure Of The Group Ii Intron
  misc_feature (1)..(170): Homolog of NCBI NO: 40889732 NR Description: Chain A, Structure Of The Chloroplast Group Ii
  misc_feature (1)..(171): Homolog of NCBI NO: 30687503 NR Description: expressed protein [Arabidopsis thaliana]
  misc_feature (1)..(162): Homolog of NCBI NO: 30685853 NR Description: expressed protein [Arabidopsis thaliana]
  misc_feature (1)..(162): Homolog of NCBI NO: 26453108 NR Description: unknown protein [Arabidopsis thaliana]
MIDHIARATDISMNTIQSKALVGIGSVGEVPILLVKPQGYMNFSGESVGPLAAYYQIPLRHILMIYDDMGLSNGVLRLQPKGGHSQHNGLKNVTEHLNGCRGYPRLSIGIGNPPGNMDMKAFLLQKFSPLERKQMDEGLEQGVEGVKTLVEEGFSDSISRFNLGQKYKFHKV

SEQ ID NO: 72824 - DNA, 2034 bp, Arabidopsis thaliana
  misc_feature (1)..(2034): Ceres Seq. ID no. 4949128
  misc_feature: MA Experiment ID: 20000307 Result: Down-regulated in Transcription
  misc_feature: MA Experiment 20000307 PARAMETER Experiment Name: At_Germinating_Seeds_Sub_P Parameter: Age (hr) Value: 24 vs. 0
  misc_feature: MA Experiment 20000307 PARAMETER Experiment Name: At_Germinating_Seeds_Sub_P Parameter: Organism Value: A. thaliana
  misc_feature: MA Experiment 20000307 PARAMETER Experiment Name: At_Germinating_Seeds_Sub_P Parameter: Plant Line Value: WS
  misc_feature: MA Experiment 20000307 PARAMETER Experiment Name: At_Germinating_Seeds_Sub_P Parameter: Tissue Value: Germinating Seeds
atgagtgaagttttgcgcagagccaacaacgcacttagtagcgtcaagcaataccaatctctcttgaatcactttgcagctactcaatcaatttcaaaaaccaaagctttacactgccacgtcatcaccggcggtcgagtttccggccacattctctcgactctctccgtaacttatgcgttatgtggtcacatcacttatgcacggaagctgttcgaggaaatgcctcaaagctctttgctttcttataacattgttattagaatgtacgtgcgtgaaggattgtatcacgatgcgattagcgtgtttattaggatggttagtgagggggttaagtgtgttccggatggttatacatacccttttgttgctaaagctgctggagaattgaaatcgatgaaattggggttggttgttcatgggaggatcttgaggagttggtttggtagggataagtatgtgcagaacgcgttgttagcgatgtatatgaactttgggaaggttgaaatggcgagggatgtgtttgatgtgatgaagaaccgtgatgtgatttcgtggaacacgatgattagtgggtattataggaatggttatatgaatgatgcgttaatgatgtttgattggatggttaatgaaagtgttgatcttgaccatgctacgattgtttctatgttgcctgtttgtggtcacttgaaggatttggagatggggaggaatgttcataagttggtggaagagaagcggttaggggataaaattgaggtgaagaatgcgttggtgaatatgtacttgaaatgtggtcgtatggatgaagcgagatttgtttttgacaggatggaacgaagggatgtgatcacgtggacttgtatgattaacggatatactgaagatggagatgtggaaaacgctttagagttgtgtagattgatgcagtttgaaggcgtaagacctaatgctgtgactatagcttctcttgtttcggtgtgtggtgatgctttgaaggtgaatgatggtaaatgtttacacggttgggcggtgaggcaacaggtttattccgatatcattatagaaacatctttgatcagcatgtatgctaaatgcaaacgtgtagacctctgctttagagtattttcgggggcttcgaaataccataccggtccttggagtgcaattatcgctggttgtgtacagaatgaacttgtgagtgatgcgttaggtctattcaaacggatgcgacgggaagatgtggagcccaatattgctacattaaacagtctccttccagcatatgcagctttggcagatttgcgtcaagcaatgaatatccattgctacctaaccaaaaccgggtttatgtcaagccttgatgctgctacagggttggttcatgtttactcaaagtgtggaacattagaatctgctcacaagatattcaatggaatccaggaaaaacacaagagcaaagatgtagttctatggggtgcgttaatatccggctacgggatgcacggagatggtcataatgcgttgcaagttttcatggaaatggttcgatctggtgtaacgccaaacgaaatcacatttacatctgccttgaatgcttgcagtcattcgggtttggttgaagaaggcttgacattattcaggttcatgcttgaacattacaaaacgttagccagatcaaaccattacacttgcattgttgatctccttggtcgagcaggtcggttagacgaagcttacaatctcatcacaacaattccatttgaaccaacgtcaaccgtttggggtgcgttgcttgctgcttgtgtcacacatgagaatgtccagcttggagaaatggcagcaaacaagttgttcgagctggaaccagagaacacgggcaactatgtgttgttggcaaacatctatgcggctttaggacgatggaaagatatggagaaggtgagaagcatgatggagaatgttggattgagaaagaaaccaggtcatagcacaatcgagatcagaagtaattcagttgatacaagatga

SEQ ID NO: 72825 - protein, 677 aa, Arabidopsis thaliana
  peptide (1)..(677): Ceres Seq. ID no. 4949129
  misc_feature (184)..(218): Pfam Name: PPR repeat Pfam Description: PPR repeat
  misc_feature (20)..(670): Homolog of NCBI NO: 15234006 NR Description: putative protein; protein id: At4g18750.1
  misc_feature (63)..(670): Homolog of NCBI NO: 15218216 NR Description: hypothetical protein; protein id: At1g15510.1
  misc_feature (41)..(671): Homolog of NCBI NO: 15220337 NR Description: hypothetical protein; protein id: At1g11290.1
  misc_feature (59)..(672): Homolog of NCBI NO: 15228590 NR Description: hypothetical protein; protein id: At3g03580.1 thaliana] >gi|6091764|gb|AAF03474.1|AC009327_13 hypothetical [Arabidopsis thaliana] >gi|28393735|gb|AAO42278.1| unknown
  misc_feature (53)..(673): Homolog of NCBI NO: 34903762 NR Description: unnamed protein product [Oryza sativa (japonica group)] >gi|7340873|dbj|BAA92963.1| unnamed protein product
  misc_feature (51)..(676): Homolog of NCBI NO: 38606535 NR Description: OSJNBa0016O02.23 [Oryza sativa (japonica
  misc_feature (68)..(673): Homolog of NCBI NO: 15236277 NR Description: putative protein; protein id: At4g35130.1
  misc_feature (1)..(669): Homolog of NCBI NO: 15234831 NR Description: putative protein; protein id: At4g30700.1
  misc_feature (99)..(676): Homolog of NCBI NO: 34897884 NR Description: Similar to Arabidopsis thaliana DNA chromosome 4,
  misc_feature (20)..(669): Homolog of NCBI NO: 15240444 NR Description: putative protein; protein id: At5g27110.1
MSEVLRRANNALSSVKQYQSLLNHFAATQSISKTKALHCHVITGGRVSGHILSTLSVTYALCGHITYARKLFEEMPQSSLLSYNIVIRMYVREGLYHDAISVFIRMVSEGVKCVPDGYTYPFVAKAAGELKSMKLGLVVHGRILRSWFGRDKYVQNALLAMYMNFGKVEMARDVFDVMKNRDVISWNTMISGYYRNGYMNDALMMFDWMVNESVDLDHATIVSMLPVCGHLKDLEMGRNVHKLVEEKRLGDKIEVKNALVNMYLKCGRMDEARFVFDRMERRDVITWTCMINGYTEDGDVENALELCRLMQFEGVRPNAVTIASLVSVCGDALKVNDGKCLHGWAVRQQVYSDIIIETSLISMYAKCKRVDLCFRVFSGASKYHTGPWSAIIAGCVQNELVSDALGLFKRMRREDVEPNIATLNSLLPAYAALADLRQAMNIHCYLTKTGFMSSLDAATGLVHVYSKCGTLESAHKIFNGIQEKHKSKDVVLWGALISGYGMHGDGHNALQVFMEMVRSGVTPNEITFTSALNACSHSGLVEEGLTLFRFMLEHYKTLARSNHYTCIVDLLGRAGRLDEAYNLITTIPFEPTSTVWGALLAACVTHENVQLGEMAANKLFELEPENTGNYVLLANIYAALGRWKDMEKVRSMMENVGLRKKPGHSTIEIRSNSVDTR

SEQ ID NO: 72826 - protein, 603 aa, Arabidopsis thaliana
  peptide (1)..(603): Ceres Seq. ID no. 4949130
  misc_feature (110)..(144): Pfam Name: PPR repeat Pfam Description: PPR repeat
  misc_feature (1)..(596): Homolog of NCBI NO: 15234006 NR Description: putative protein; protein id: At4g18750.1
  misc_feature (1)..(596): Homolog of NCBI NO: 15218216 NR Description: hypothetical protein; protein id: At1g15510.1
  misc_feature (1)..(597): Homolog of NCBI NO: 15220337 NR Description: hypothetical protein; protein id: At1g11290.1
  misc_feature (1)..(598): Homolog of NCBI NO: 15228590 NR Description: hypothetical protein; protein id: At3g03580.1 thaliana] >gi|6091764|gb|AAF03474.1|AC009327_13 hypothetical [Arabidopsis thaliana] >gi|28393735|gb|AAO42278.1| unknown
  misc_feature (1)..(599): Homolog of NCBI NO: 34903762 NR Description: unnamed protein product [Oryza sativa (japonica group)] >gi|7340873|dbj|BAA92963.1| unnamed protein product
  misc_feature (1)..(602): Homolog of NCBI NO: 38606535 NR Description: OSJNBa0016O02.23 [Oryza sativa (japonica
  misc_feature (1)..(599): Homolog of NCBI NO: 15236277 NR Description: putative protein; protein id: At4g35130.1
  misc_feature (1)..(595): Homolog of NCBI NO: 15234831 NR Description: putative protein; protein id: At4g30700.1
  misc_feature (25)..(602): Homolog of NCBI NO: 34897884 NR Description: Similar to Arabidopsis thaliana DNA chromosome 4,
  misc_feature (1)..(595): Homolog of NCBI NO: 15240444 NR Description: putative protein; protein id: At5g27110.1
MPQSSLLSYNIVIRMYVREGLYHDAISVFIRMVSEGVKCVPDGYTYPFVAKAAGELKSMKLGLVVHGRILRSWFGRDKYVQNALLAMYMNFGKVEMARDVFDVMKNRDVISWNTMISGYYRNGYMNDALMMFDWMVNESVDLDHATIVSMLPVCGHLKDLEMGRNVHKLVEEKRLGDKIEVKNALVNMYLKCGRMDEARFVFDRMERRDVITWTCMINGYTEDGDVENALELCRLMQFEGVRPNAVTIASLVSVCGDALKVNDGKCLHGWAVRQQVYSDIIIETSLISMYAKCKRVDLCFRVFSGASKYHTGPWSAIIAGCVQNELVSDALGLFKRMRREDVEPNIATLNSLLPAYAALADLRQAMNIHCYLTKTGFMSSLDAATGLVHVYSKCGTLESAHKIFNGIQEKHKSKDVVLWGALISGYGMHGDGHNALQVFMEMVRSGVTPNEITFTSALNACSHSGLVEEGLTLFRFMLEHYKTLARSNHYTCIVDLLGRAGRLDEAYNLITTIPFEPTSTVWGALLAACVTHENVQLGEMAANKLFELEPENTGNYVLLANIYAALGRWKDMEKVRSMMENVGLRKKPGHSTIEIRSNSVDTR

SEQ ID NO: 72827 - protein, 589 aa, Arabidopsis thaliana
  peptide (1)..(589): Ceres Seq. ID no. 4949131
  misc_feature (96)..(130): Pfam Name: PPR repeat Pfam Description: PPR repeat
  misc_feature (1)..(582): Homolog of NCBI NO: 15234006 NR Description: putative protein; protein id: At4g18750.1
  misc_feature (1)..(582): Homolog of NCBI NO: 15218216 NR Description: hypothetical protein; protein id: At1g15510.1
  misc_feature (1)..(583): Homolog of NCBI NO: 15220337 NR Description: hypothetical protein; protein id: At1g11290.1
  misc_feature (1)..(584): Homolog of NCBI NO: 15228590 NR Description: hypothetical protein; protein id: At3g03580.1 thaliana] >gi|6091764|gb|AAF03474.1|AC009327_13 hypothetical [Arabidopsis thaliana] >gi|28393735|gb|AAO42278.1| unknown
  misc_feature (1)..(585): Homolog of NCBI NO: 34903762 NR Description: unnamed protein product [Oryza sativa (japonica group)] >gi|7340873|dbj|BAA92963.1| unnamed protein product
  misc_feature (1)..(588): Homolog of NCBI NO: 38606535 NR Description: OSJNBa0016O02.23 [Oryza sativa (japonica
  misc_feature (1)..(585): Homolog of NCBI NO: 15236277 NR Description: putative protein; protein id: At4g35130.1
  misc_feature (1)..(581): Homolog of NCBI NO: 15234831 NR Description: putative protein; protein id: At4g30700.1
  misc_feature (11)..(588): Homolog of NCBI NO: 34897884 NR Description: Similar to Arabidopsis thaliana DNA chromosome 4,
  misc_feature (1)..(581): Homolog of NCBI NO: 15240444 NR Description: putative protein; protein id: At5g27110.1
MYVREGLYHDAISVFIRMVSEGVKCVPDGYTYPFVAKAAGELKSMKLGLVVHGRILRSWFGRDKYVQNALLAMYMNFGKVEMARDVFDVMKNRDVISWNTMISGYYRNGYMNDALMMFDWMVNESVDLDHATIVSMLPVCGHLKDLEMGRNVHKLVEEKRLGDKIEVKNALVNMYLKCGRMDEARFVFDRMERRDVITWTCMINGYTEDGDVENALELCRLMQFEGVRPNAVTIASLVSVCGDALKVNDGKCLHGWAVRQQVYSDIIIETSLISMYAKCKRVDLCFRVFSGASKYHTGPWSAIIAGCVQNELVSDALGLFKRMRREDVEPNIATLNSLLPAYAALADLRQAMNIHCYLTKTGFMSSLDAATGLVHVYSKCGTLESAHKIFNGIQEKHKSKDVVLWGALISGYGMHGDGHNALQVFMEMVRSGVTPNEITFTSALNACSHSGLVEEGLTLFRFMLEHYKTLARSNHYTCIVDLLGRAGRLDEAYNLITTIPFEPTSTVWGALLAACVTHENVQLGEMAANKLFELEPENTGNYVLLANIYAALGRWKDMEKVRSMMENVGLRKKPGHSTIEIRSNSVDTR

SEQ ID NO: 72828 - DNA, 786 bp, Arabidopsis thaliana
  misc_feature (1)..(786): Ceres Seq. ID no. 4949143
  misc_feature: MA Experiment ID: 20000315 Result: Down-regulated in Transcription
  misc_feature: MA Experiment 20000315 PARAMETER Experiment Name: At_14day_Shoots-Roots_Sub_P Parameter: Age (day) Value: 14
  misc_feature: MA Experiment 20000315 PARAMETER Experiment Name: At_14day_Shoots-Roots_Sub_P Parameter: Organism Value: A. thaliana
  misc_feature: MA Experiment 20000315 PARAMETER Experiment Name: At_14day_Shoots-Roots_Sub_P Parameter: Plant Line Value: WS
  misc_feature: MA Experiment 20000315 PARAMETER Experiment Name: At_14day_Shoots-Roots_Sub_P Parameter: Tissue Value: Shoots vs. Whole Plant
  misc_feature: MA Experiment ID: 20000355 Result: Up-regulated in Transcription
  misc_feature: MA Experiment 20000355 PARAMETER Experiment Name: At_Siliques_Sub_P Parameter: Age (day) Value: 21
  misc_feature: MA Experiment 20000355 PARAMETER Experiment Name: At_Siliques_Sub_P Parameter: Organism Value: A. thaliana
  misc_feature: MA Experiment 20000355 PARAMETER Experiment Name: At_Siliques_Sub_P Parameter: Plant Line Value: WS
  misc_feature: MA Experiment 20000355 PARAMETER Experiment Name: At_Siliques_Sub_P Parameter: Tissue Value: Less Than 5mm Siliques vs. Whole Plant
atggtgatatgggtcgtgcccatgagttacggtcatggagcgatgattggtaatgcagtcgaagcacctgatgtagcggaagcaccagggattaatgacccaagcaaggcactcgacactaattggtatgacgcacgagccacgttctacggtgacatccatggtggcgacactcaaccttgtggatacggtaatctattcagacaaggctatggtctagccaccgcagcgttaagtacggcactcttcaacgacgggtacacatgtggggcttgttatgaaatcatgtgcacgcgtgatccacaatggtgtttacccggatccgtcaagatcacagcaacaaacttctgtcccgcaaattacagcaaaaccacagacctttggtgcaacccaccacagaaacactttgatctctccttagcaatgtttctcaagattgccaagtacaaagccggggttgtcccagttagatacagacgtattccttgtagcaaaactggtggtgtcaagtttgaaaccaaaggaaacccttatttcttaatggtcttgatatacaacgtaggaggagctggagatattaagtacgtgcaagttaaaggaaacaagaccgggtggataacaatgaaaaagaactgggggcagaattggaccactattacagtattgaccggccaaggtttatcgttcagggttacaacgagtgatgggattacaaaagatttttggaatgtgatgccaaaaaattgggggtttggacagacttttgatggtaggattaacttttag

SEQ ID NO: 72829 - protein, 261 aa, Arabidopsis thaliana
  peptide (1)..(261): Ceres Seq. ID no. 4949144
  misc_feature (169)..(246): Pfam Name: Pollen allergen Pfam Description: Pollen allergen
  misc_feature (1)..(261): Homolog of NCBI NO: 15241678 NR Description: expansin-like protein; protein id: At5g39270.1
  misc_feature (1)..(261): Homolog of NCBI NO: 9758856 NR Description: expansin-like protein [Arabidopsis thaliana]
  misc_feature (1)..(261): Homolog of NCBI NO: 20137958 NR Description: Putative alpha-expansin 22 precursor (At-EXP22)
  misc_feature (1)..(261): Homolog of NCBI NO: 15241682 NR Description: expansin, putative; protein id: At5g39290.1
  misc_feature (1)..(261): Homolog of NCBI NO: 20137956 NR Description: Putative alpha-expansin 26 precursor (At-EXP26)
  misc_feature (1)..(261): Homolog of NCBI NO: 15241684 NR Description: expansin, putative; protein id: At5g39300.1
  misc_feature (1)..(261): Homolog of NCBI NO: 20137955 NR Description: Putative alpha-expansin 25 precursor (At-EXP25)
  misc_feature (8)..(261): Homolog of NCBI NO: 9758859 NR Description: expansin-like protein [Arabidopsis thaliana]
  misc_feature (1)..(261): Homolog of NCBI NO: 15241680 NR Description: expansin, putative; protein id: At5g39280.1
  misc_feature (1)..(261): Homolog of NCBI NO: 20137957 NR Description: Putative alpha-expansin 23 precursor (At-EXP23)
MVIWVVPMSYGHGAMIGNAVEAPDVAEAPGINDPSKALDTNWYDARATFYGDIHGGDTQPCGYGNLFRQGYGLATAALSTALFNDGYTCGACYEIMCTRDPQWCLPGSVKITATNFCPANYSKTTDLWCNPPQKHFDLSLAMFLKIAKYKAGVVPVRYRRIPCSKTGGVKFETKGNPYFLMVLIYNVGGAGDIKYVQVKGNKTGWITMKKNWGQNWTTITVLTGQGLSFRVTTSDGITKDFWNVMPKNWGFGQTFDGRINF

SEQ ID NO: 72830 - protein, 254 aa, Arabidopsis thaliana
  peptide (1)..(254): Ceres Seq. ID no. 4949145
  misc_feature (162)..(239): Pfam Name: Pollen allergen Pfam Description: Pollen allergen
  misc_feature (1)..(254): Homolog of NCBI NO: 15241678 NR Description: expansin-like protein; protein id: At5g39270.1
  misc_feature (1)..(254): Homolog of NCBI NO: 9758856 NR Description: expansin-like protein [Arabidopsis thaliana]
  misc_feature (1)..(254): Homolog of NCBI NO: 20137958 NR Description: Putative alpha-expansin 22 precursor (At-EXP22)
  misc_feature (1)..(254): Homolog of NCBI NO: 15241682 NR Description: expansin, putative; protein id: At5g39290.1
  misc_feature (1)..(254): Homolog of NCBI NO: 20137956 NR Description: Putative alpha-expansin 26 precursor (At-EXP26)
  misc_feature (1)..(254): Homolog of NCBI NO: 15241684 NR Description: expansin, putative; protein id: At5g39300.1
  misc_feature (1)..(254): Homolog of NCBI NO: 20137955 NR Description: Putative alpha-expansin 25 precursor (At-EXP25)
  misc_feature (1)..(254): Homolog of NCBI NO: 9758859 NR Description: expansin-like protein [Arabidopsis thaliana]
  misc_feature (1)..(254): Homolog of NCBI NO: 15241680 NR Description: expansin, putative; protein id: At5g39280.1
  misc_feature (1)..(254): Homolog of NCBI NO: 20137957 NR Description: Putative alpha-expansin 23 precursor (At-EXP23)
MSYGHGAMIGNAVEAPDVAEAPGINDPSKALDTNWYDARATFYGDIHGGDTQPCGYGNLFRQGYGLATAALSTALFNDGYTCGACYEIMCTRDPQWCLPGSVKITATNFCPANYSKTTDLWCNPPQKHFDLSLAMFLKIAKYKAGVVPVRYRRIPCSKTGGVKFETKGNPYFLMVLIYNVGGAGDIKYVQVKGNKTGWITMKKNWGQNWTTITVLTGQGLSFRVTTSDGITKDFWNVMPKNWGFGQTFDGRINF

SEQ ID NO: 72831 - protein, 247 aa, Arabidopsis thaliana
  peptide (1)..(247): Ceres Seq. ID no. 4949146
  misc_feature (155)..(232): Pfam Name: Pollen allergen Pfam Description: Pollen allergen
  misc_feature (1)..(247): Homolog of NCBI NO: 15241678 NR Description: expansin-like protein; protein id: At5g39270.1
  misc_feature (1)..(247): Homolog of NCBI NO: 9758856 NR Description: expansin-like protein [Arabidopsis thaliana]
  misc_feature (1)..(247): Homolog of NCBI NO: 20137958 NR Description: Putative alpha-expansin 22 precursor (At-EXP22)
  misc_feature (1)..(247): Homolog of NCBI NO: 15241682 NR Description: expansin, putative; protein id: At5g39290.1
  misc_feature (1)..(247): Homolog of NCBI NO: 20137956 NR Description: Putative alpha-expansin 26 precursor (At-EXP26)
  misc_feature (1)..(247): Homolog of NCBI NO: 15241684 NR Description: expansin, putative; protein id: At5g39300.1
  misc_feature (1)..(247): Homolog of NCBI NO: 20137955 NR Description: Putative alpha-expansin 25 precursor (At-EXP25)
  misc_feature (1)..(247): Homolog of NCBI NO: 9758859 NR Description: expansin-like protein [Arabidopsis thaliana]
  misc_feature (1)..(247): Homolog of NCBI NO: 15241680 NR Description: expansin, putative; protein id: At5g39280.1
  misc_feature (1)..(247): Homolog of NCBI NO: 20137957 NR Description: Putative alpha-expansin 23 precursor (At-EXP23)
MIGNAVEAPDVAEAPGINDPSKALDTNWYDARATFYGDIHGGDTQPCGYGNLFRQGYGLATAALSTALFNDGYTCGACYEIMCTRDPQWCLPGSVKITATNFCPANYSKTTDLWCNPPQKHFDLSLAMFLKIAKYKAGVVPVRYRRIPCSKTGGVKFETKGNPYFLMVLIYNVGGAGDIKYVQVKGNKTGWITMKKNWGQNWTTITVLTGQGLSFRVTTSDGITKDFWNVMPKNWGFGQTFDGRINF

SEQ ID NO: 72832 - DNA, 680 bp, Arabidopsis thaliana
  misc_feature (1)..(680): Ceres Seq. ID no. 4949237
  misc_feature: MA Experiment ID: 108434 Result: Down-regulated in Transcription
  misc_feature: MA Experiment 108434 PARAMETER Experiment Name: At_Root_Tips_cDNA_P Parameter: Tissue Value: Root Tips
  misc_feature: MA Experiment ID: 108461 Result: Up-regulated in Transcription
  misc_feature: MA Experiment 108461 PARAMETER Experiment Name: At_Germinating_Seeds_cDNA_P Parameter: Age (day) Value: 1 vs. 0
  misc_feature: MA Experiment 108461 PARAMETER Experiment Name: At_Germinating_Seeds_cDNA_P Parameter: Tissue Value: Germinating Seeds
  misc_feature: MA Experiment ID: 108462 Result: Up-regulated in Transcription
  misc_feature: MA Experiment 108462 PARAMETER Experiment Name: At_Germinating_Seeds_cDNA_P Parameter: Age (day) Value: 2 vs. 0
  misc_feature: MA Experiment 108462 PARAMETER Experiment Name: At_Germinating_Seeds_cDNA_P Parameter: Tissue Value: Germinating Seeds
  misc_feature: MA Experiment ID: 108463 Result: Up-regulated in Transcription
  misc_feature: MA Experiment 108463 PARAMETER Experiment Name: At_Germinating_Seeds_cDNA_P Parameter: Age (day) Value: 3 vs. 0
  misc_feature: MA Experiment 108463 PARAMETER Experiment Name: At_Germinating_Seeds_cDNA_P Parameter: Tissue Value: Germinating Seeds
  misc_feature: MA Experiment ID: 108464 Result: Up-regulated in Transcription
  misc_feature: MA Experiment 108464 PARAMETER Experiment Name: At_Germinating_Seeds_cDNA_P Parameter: Age (day) Value: 4 vs. 0
  misc_feature: MA Experiment 108464 PARAMETER Experiment Name: At_Germinating_Seeds_cDNA_P Parameter: Tissue Value: Germinating Seeds
  misc_feature: MA Experiment ID: 108489 Result: Up-regulated in Transcription
  misc_feature: MA Experiment ID: 108573 Result: Up-regulated in Transcription
  misc_feature: MA Experiment 108573 PARAMETER Experiment Name: At_Drought_cDNA_P Parameter: Timepoint (hr) Value: 6
  misc_feature: MA Experiment 108573 PARAMETER Experiment Name: At_Drought_cDNA_P Parameter: Tissue Value: Aerial
  misc_feature: MA Experiment 108573 PARAMETER Experiment Name: At_Drought_cDNA_P Parameter: Treatment Value: Drought vs. No Drought
  misc_feature: MA Experiment ID: 108605 Result: Up-regulated in Transcription
  misc_feature: MA Experiment 108605 PARAMETER Experiment Name: At_100uM_ABA_cDNA_P Parameter: Timepoint (hr) Value: 6
  misc_feature: MA Experiment 108605 PARAMETER Experiment Name: At_100uM_ABA_cDNA_P Parameter: Tissue Value: Aerial
  misc_feature: MA Experiment 108605 PARAMETER Experiment Name: At_100uM_ABA_cDNA_P Parameter: Treatment Value: 100uM ABA vs. No Treatment
  misc_feature: MA Experiment ID: 108607 Result: Up-regulated in Transcription
  misc_feature: MA Experiment 108607 PARAMETER Experiment Name: At_100uM_ABA_cDNA_P Parameter: Timepoint (hr) Value: 4
  misc_feature: MA Experiment 108607 PARAMETER Experiment Name: At_100uM_ABA_cDNA_P Parameter: Tissue Value: Aerial
  misc_feature: MA Experiment 108607 PARAMETER Experiment Name: At_100uM_ABA_cDNA_P Parameter: Treatment Value: 100uM ABA vs. No Treatment
  misc_feature: MA Experiment ID: 108668 Result: Up-regulated in Transcription
  misc_feature: MA Experiment 108668 PARAMETER Experiment Name: At_2mM_SA_cDNA_P Parameter: Plant Line Value: WS
  misc_feature: MA Experiment 108668 PARAMETER Experiment Name: At_2mM_SA_cDNA_P Parameter: Timepoint (hr) Value: 6
  misc_feature: MA Experiment 108668 PARAMETER Experiment Name: At_2mM_SA_cDNA_P Parameter: Treatment Value: 2mM SA vs. No Treatment
  misc_feature: MA Experiment ID: 20000069 Result: Up-regulated in Transcription
  misc_feature: MA Experiment 20000069 PARAMETER Experiment Name: At_100uM_ABA_Mutants_cDNA_P Parameter: Plant Line Value: CS23
  misc_feature: MA Experiment 20000069 PARAMETER Experiment Name: At_100uM_ABA_Mutants_cDNA_P Parameter: Timepoint (hr) Value: 6
  misc_feature: MA Experiment 20000069 PARAMETER Experiment Name: At_100uM_ABA_Mutants_cDNA_P Parameter: Tissue Value: Aerial
  misc_feature: MA Experiment 20000069 PARAMETER Experiment Name: At_100uM_ABA_Mutants_cDNA_P Parameter: Treatment Value: 100uM ABA vs. No Treatment
  misc_feature: MA Experiment ID: 20000070 Result: Up-regulated in Transcription
  misc_feature: MA Experiment 20000070 PARAMETER Experiment Name: At_100uM_ABA_Mutants_cDNA_P Parameter: Plant Line Value: CS24
  misc_feature: MA Experiment 20000070 PARAMETER Experiment Name: At_100uM_ABA_Mutants_cDNA_P Parameter: Timepoint (hr) Value: 6
  misc_feature: MA Experiment 20000070 PARAMETER Experiment Name: At_100uM_ABA_Mutants_cDNA_P Parameter: Tissue Value: Aerial
  misc_feature: MA Experiment 20000070 PARAMETER Experiment Name: At_100uM_ABA_Mutants_cDNA_P Parameter: Treatment Value: 100uM ABA vs. No Treatment
  misc_feature: MA Experiment ID: 20000072 Result: Up-regulated in Transcription
  misc_feature: MA Experiment 20000072 PARAMETER Experiment Name: At_100uM_ABA_Mutants_cDNA_P Parameter: Plant Line Value: CS8105
  misc_feature: MA Experiment 20000072 PARAMETER Experiment Name: At_100uM_ABA_Mutants_cDNA_P Parameter: Timepoint (hr) Value: 6
  misc_feature: MA Experiment 20000072 PARAMETER Experiment Name: At_100uM_ABA_Mutants_cDNA_P Parameter: Tissue Value: Aerial
  misc_feature: MA Experiment 20000072 PARAMETER Experiment Name: At_100uM_ABA_Mutants_cDNA_P Parameter: Treatment Value: 100uM ABA vs. No Treatment
  misc_feature: MA Experiment ID: 20000086 Result: Up-regulated in Transcription
  misc_feature: MA Experiment 20000086 PARAMETER Experiment Name: At_100uM_ABA_Mutants_cDNA_P Parameter: Plant Line Value: CS22
  misc_feature: MA Experiment 20000086 PARAMETER Experiment Name: At_100uM_ABA_Mutants_cDNA_P Parameter: Timepoint (hr) Value: 6
  misc_feature: MA Experiment 20000086 PARAMETER Experiment Name: At_100uM_ABA_Mutants_cDNA_P Parameter: Tissue Value: Aerial
  misc_feature: MA Experiment 20000086 PARAMETER Experiment Name: At_100uM_ABA_Mutants_cDNA_P Parameter: Treatment Value: 100uM ABA vs. No Treatment
  misc_feature: MA Experiment ID: 20000087 Result: Up-regulated in Transcription
  misc_feature: MA Experiment 20000087 PARAMETER Experiment Name: At_100uM_ABA_Mutants_cDNA_P Parameter: Plant Line Value: WS
  misc_feature: MA Experiment 20000087 PARAMETER Experiment Name: At_100uM_ABA_Mutants_cDNA_P Parameter: Timepoint (hr) Value: 6
  misc_feature: MA Experiment 20000087 PARAMETER Experiment Name: At_100uM_ABA_Mutants_cDNA_P Parameter: Tissue Value: Aerial
  misc_feature: MA Experiment 20000087 PARAMETER Experiment Name: At_100uM_ABA_Mutants_cDNA_P Parameter: Treatment Value: 100uM ABA vs. No Treatment
  misc_feature: MA Experiment ID: 20000088 Result: Up-regulated in Transcription
  misc_feature: MA Experiment 20000088 PARAMETER Experiment Name: At_100uM_ABA_Mutants_cDNA_P Parameter: Plant Line Value: Landsberg
  misc_feature: MA Experiment 20000088 PARAMETER Experiment Name: At_100uM_ABA_Mutants_cDNA_P Parameter: Timepoint (hr) Value: 6
  misc_feature: MA Experiment 20000088 PARAMETER Experiment Name: At_100uM_ABA_Mutants_cDNA_P Parameter: Tissue Value: Aerial
  misc_feature: MA Experiment 20000088 PARAMETER Experiment Name: At_100uM_ABA_Mutants_cDNA_P Parameter: Treatment Value: 100uM ABA vs. No Treatment
  misc_feature: MA Experiment ID: 20000117 Result: Up-regulated in Transcription
  misc_feature: MA Experiment 20000117 PARAMETER Experiment Name: At_100uM_ABA_Mutants_cDNA_P Parameter: Plant Line Value: Columbia
  misc_feature: MA Experiment 20000117 PARAMETER Experiment Name: At_100uM_ABA_Mutants_cDNA_P Parameter: Timepoint (hr) Value: 6
  misc_feature: MA Experiment 20000117 PARAMETER Experiment Name: At_100uM_ABA_Mutants_cDNA_P Parameter: Tissue Value: Aerial
  misc_feature: MA Experiment 20000117 PARAMETER Experiment Name: At_100uM_ABA_Mutants_cDNA_P Parameter: Treatment Value: 100uM ABA vs. No Treatment
  misc_feature: MA Experiment ID: 20000169 Result: Up-regulated in Transcription
  misc_feature: MA Experiment 20000169 PARAMETER Experiment Name: At_100uM_ABA_P Parameter: Age (day) Value: 14
  misc_feature: MA Experiment 20000169 PARAMETER Experiment Name: At_100uM_ABA_P Parameter: Organism Value: A. thaliana
  misc_feature: MA Experiment 20000169 PARAMETER Experiment Name: At_100uM_ABA_P Parameter: Plant Line Value: WS
  misc_feature: MA Experiment 20000169 PARAMETER Experiment Name: At_100uM_ABA_P Parameter: Timepoint (hr) Value: 6
  misc_feature: MA Experiment 20000169 PARAMETER Experiment Name: At_100uM_ABA_P Parameter: Tissue Value: Aerial
  misc_feature: MA Experiment 20000169 PARAMETER Experiment Name: At_100uM_ABA_P Parameter: Treatment Value: 100uM ABA vs. No Treatment
  misc_feature: MA Experiment ID: 20000180 Result: Up-regulated in Transcription
  misc_feature: MA Experiment 20000180 PARAMETER Experiment Name: At_Germinating_Seeds_P Parameter: Age (hr) Value: 24 vs. 0
  misc_feature: MA Experiment 20000180 PARAMETER Experiment Name: At_Germinating_Seeds_P Parameter: Tissue Value: Germinating Seeds
  misc_feature: MA Experiment ID: 20000184 Result: Up-regulated in Transcription
  misc_feature: MA Experiment 20000184 PARAMETER Experiment Name: At_Shoots__P Parameter: Age (day) Value: 7
  misc_feature: MA Experiment 20000184 PARAMETER Experiment Name: At_Shoots__P Parameter: Tissue Value: Shoots vs. Whole Plant
  misc_feature: MA Experiment ID: 20000185 Result: Up-regulated in Transcription
  misc_feature: MA Experiment 20000185 PARAMETER Experiment Name: At_Roots__P Parameter: Age (day) Value: 7 vs. 21
  misc_feature: MA Experiment 20000185 PARAMETER Experiment Name: At_Roots__P Parameter: Organism Value: A. thaliana
  misc_feature: MA Experiment 20000185 PARAMETER Experiment Name: At_Roots__P Parameter: Tissue Value: Roots vs. Whole Plant
  misc_feature: MA Experiment ID: 20000227 Result: Up-regulated in Transcription
  misc_feature: MA Experiment 20000227 PARAMETER Experiment Name: At_Root-Tips-vs-Tops_P Parameter: Tissue Value: Root Tips vs. Root Tops
  misc_feature: MA Experiment ID: 20000269 Result: Up-regulated in Transcription
  misc_feature: MA Experiment 20000269 PARAMETER Experiment Name: At_1mM_KNO3_L-vs-H_Roots_P Parameter: Age (day) Value: 7,10,12
  misc_feature: MA Experiment 20000269 PARAMETER Experiment Name: At_1mM_KNO3_L-vs-H_Roots_P Parameter: Organism Value: A. thaliana
  misc_feature: MA Experiment 20000269 PARAMETER Experiment Name: At_1mM_KNO3_L-vs-H_Roots_P Parameter: Plant Line Value: WS
  misc_feature: MA Experiment 20000269 PARAMETER Experiment Name: At_1mM_KNO3_L-vs-H_Roots_P Parameter: Timepoint (day) Value: 7,10,12
  misc_feature: MA Experiment 20000269 PARAMETER Experiment Name: At_1mM_KNO3_L-vs-H_Roots_P Parameter: Tissue Value: Roots
  misc_feature: MA Experiment 20000269 PARAMETER Experiment Name: At_1mM_KNO3_L-vs-H_Roots_P Parameter: Treatment Value: 1mM KNO3 vs. 50mM KNO3
  misc_feature: MA Experiment ID: 20000436 Result: Up-regulated in Transcription
  misc_feature: MA Experiment 20000436 PARAMETER Experiment Name: At_Drought_P Parameter: Age (day) Value: 7
  misc_feature: MA Experiment 20000436 PARAMETER Experiment Name: At_Drought_P Parameter: Organism Value: A. thaliana
  misc_feature: MA Experiment 20000436 PARAMETER Experiment Name: At_Drought_P Parameter: Plant Line Value: WS
  misc_feature: MA Experiment 20000436 PARAMETER Experiment Name: At_Drought_P Parameter: Timepoint (hr) Value: 12
  misc_feature: MA Experiment 20000436 PARAMETER Experiment Name: At_Drought_P Parameter: Tissue Value: Whole Plant
  misc_feature: MA Experiment 20000436 PARAMETER Experiment Name: At_Drought_P Parameter: Treatment Value: Drought vs. No Drought
  misc_feature: MA Experiment ID: 20001457 Result: Down-regulated in Transcription
  misc_feature: MA Experiment 20001457 PARAMETER Experiment Name: At_50mM_NH4NO3_L-to-H_P Parameter: Age (day) Value: Undefined
  misc_feature: MA Experiment 20001457 PARAMETER Experiment Name: At_50mM_NH4NO3_L-to-H_P Parameter: Organism Value: Undefined
  misc_feature: MA Experiment 20001457 PARAMETER Experiment Name: At_50mM_NH4NO3_L-to-H_P Parameter: Plant Line Value: Undefined
  misc_feature: MA Experiment 20001457 PARAMETER Experiment Name: At_50mM_NH4NO3_L-to-H_P Parameter: Timepoint (hr) Value: 0.5
  misc_feature: MA Experiment 20001457 PARAMETER Experiment Name: At_50mM_NH4NO3_L-to-H_P Parameter: Tissue Value: Siliques
  misc_feature: MA Experiment 20001457 PARAMETER Experiment Name: At_50mM_NH4NO3_L-to-H_P Parameter: Treatment Value: 50mM NH4NO3 vs. 100mM Manitol
  misc_feature: MA Experiment ID: 20001556 Result: Up-regulated in Transcription
  misc_feature: MA Experiment 20001556 PARAMETER Experiment Name: At_Drought_Soil_Dry_P Parameter: Age (day) Value: 26
  misc_feature: MA Experiment 20001556 PARAMETER Experiment Name: At_Drought_Soil_Dry_P Parameter: Organism Value: A. thaliana
  misc_feature: MA Experiment 20001556 PARAMETER Experiment Name: At_Drought_Soil_Dry_P Parameter: Plant Line Value: WS
  misc_feature: MA Experiment 20001556 PARAMETER Experiment Name: At_Drought_Soil_Dry_P Parameter: Post Timepoint (hr) Value: None
  misc_feature: MA Experiment 20001556 PARAMETER Experiment Name: At_Drought_Soil_Dry_P Parameter: Post-Treatment Value: None
  misc_feature: MA Experiment 20001556 PARAMETER Experiment Name: At_Drought_Soil_Dry_P Parameter: Timepoint (day) Value: 12
  misc_feature: MA Experiment 20001556 PARAMETER Experiment Name: At_Drought_Soil_Dry_P Parameter: Treatment Value: Drought vs. No Drought
  misc_feature: MA Experiment ID: 20001904 Result: Up-regulated in Transcription
  misc_feature: MA Experiment 20001904 PARAMETER Experiment Name: At_Drought_Reproduction_P Parameter: Age (day) Value: 37
  misc_feature: MA Experiment 20001904 PARAMETER Experiment Name: At_Drought_Reproduction_P Parameter: Organism Value: A. thaliana
  misc_feature: MA Experiment 20001904 PARAMETER Experiment Name: At_Drought_Reproduction_P Parameter: Plant Line Value: WS
  misc_feature: MA Experiment 20001904 PARAMETER Experiment Name: At_Drought_Reproduction_P Parameter: Timepoint (day) Value: 7
  misc_feature: MA Experiment 20001904 PARAMETER Experiment Name: At_Drought_Reproduction_P Parameter: Tissue Value: Rosettes
  misc_feature: MA Experiment 20001904 PARAMETER Experiment Name: At_Drought_Reproduction_P Parameter: Treatment Value: Drought vs. No Drought
acaaacaacgaacatggctaaacgttttctgcttcttcttcctcttttgtcatctattcttcttcttgccgtgtccgtcacagcttactccacaacaacgccgtatcaaggctacaagccggagaaattcacccacctccacttctacttccatgacgtcatctccggtgacaaacctaccgccgtcaaagttgccgaagcccgcccaacaaccaccctcaacgtcaagtttggcgtgattatgatcgctgatgatccgttgaccgaaggaccagacccgagctcaaaggaagtgggaagagctcaggggatgtacgcatcaacagccatgaaggacatagtcttcacaatggtctttaactatgttttcacggcaggagagtttaatggaagcaccatcgcggtgtatggacggaatgatatattttcgaaggtgagagagttgccgattattggaggaactggtgctttcaggtttgctagaggctatgcactgcccaagacttataagattgttggtctagatgccgtggtcgagtataatgtcttcatttggcattaatcatttgcatattgtctaatgtctttccgaaacaaattgtttcactttggttttcttatattgtttttggttcttttatatatatatatatatatatatatataacaattgttctgtt

SEQ ID NO: 72833 - protein, 186 aa, Arabidopsis thaliana
  peptide (1)..(186): Ceres Seq. ID no. 4949238
  misc_feature (19)..(186): Pfam Name: Dirigent-like protein Pfam Description: Dirigent-like protein
  misc_feature (5)..(186): Homolog of NCBI NO: 15238982 NR Description: disease resistance response protein-related; id: At5g42510.1 [Arabidopsis thaliana] contains similarity to disease resistance response
  misc_feature (5)..(186): Homolog of NCBI NO: 15238980 NR Description: disease resistance response protein-related; id: At5g42500.1, supported by cDNA: gi_20260391 [Arabidopsis
  misc_feature (5)..(186): Homolog of NCBI NO: 15219966 NR Description: disease resistance response protein-related; id: At1g22900.1 [Arabidopsis thaliana] >gi|25347090|pir||A86363
  misc_feature (5)..(186): Homolog of NCBI NO: 15218836 NR Description: disease resistance response protein-related/
  misc_feature (15)..(186): Homolog of NCBI NO: 15217886 NR Description: disease resistance response protein-related/
  misc_feature (11)..(186): Homolog of NCBI NO: 30681257 NR Description: disease resistance response protein-related/
  misc_feature (11)..(181): Homolog of NCBI NO: 25412014 NR Description: probable disease resistance response protein - Arabidopsis thaliana >gi|4803933|gb|AAD29806.1| putative
  misc_feature (79)..(186): Homolog of NCBI NO: 26450265 NR Description: unknown protein [Arabidopsis thaliana]
  misc_feature (79)..(186): Homolog of NCBI NO: 15230941 NR Description: disease resistance response protein-related; id: At3g58090.1 [Arabidopsis thaliana] >gi|11357961|pir||T46031
  misc_feature (5)..(186): Homolog of NCBI NO: 15231302 NR Description: disease resistance response protein-related/
QTTNMAKRFLLLLPLLSSILLLAVSVTAYSTTTPYQGYKPEKFTHLHFYFHDVISGDKPTAVKVAEARPTTTLNVKFGVIMIADDPLTEGPDPSSKEVGRAQGMYASTAMKDIVFTMVFNYVFTAGEFNGSTIAVYGRNDIFSKVRELPIIGGTGAFRFARGYALPKTYKIVGLDAVVEYNVFIWH

SEQ ID NO: 72834 - protein, 182 aa, Arabidopsis thaliana
  peptide (1)..(182): Ceres Seq. ID no. 4949239
  misc_feature (15)..(182): Pfam Name: Dirigent-like protein Pfam Description: Dirigent-like protein
  misc_feature (1)..(182): Homolog of NCBI NO: 15238982 NR Description: disease resistance response protein-related; id: At5g42510.1 [Arabidopsis thaliana] contains similarity to disease resistance response
  misc_feature (1)..(182): Homolog of NCBI NO: 15238980 NR Description: disease resistance response protein-related; id: At5g42500.1, supported by cDNA: gi_20260391 [Arabidopsis
  misc_feature (1)..(182): Homolog of NCBI NO: 15219966 NR Description: disease resistance response protein-related; id: At1g22900.1 [Arabidopsis thaliana] >gi|25347090|pir||A86363
  misc_feature (1)..(182): Homolog of NCBI NO: 15218836 NR Description: disease resistance response protein-related/
  misc_feature (11)..(182): Homolog of NCBI NO: 15217886 NR Description: disease resistance response protein-related/
  misc_feature (7)..(182): Homolog of NCBI NO: 30681257 NR Description: disease resistance response protein-related/
  misc_feature (7)..(177): Homolog of NCBI NO: 25412014 NR Description: probable disease resistance response protein - Arabidopsis thaliana >gi|4803933|gb|AAD29806.1| putative
  misc_feature (75)..(182): Homolog of NCBI NO: 26450265 NR Description: unknown protein [Arabidopsis thaliana]
  misc_feature (75)..(182): Homolog of NCBI NO: 15230941 NR Description: disease resistance response protein-related; id: At3g58090.1 [Arabidopsis thaliana] >gi|11357961|pir||T46031
  misc_feature (1)..(182): Homolog of NCBI NO: 15231302 NR Description: disease resistance response protein-related/
MAKRFLLLLPLLSSILLLAVSVTAYSTTTPYQGYKPEKFTHLHFYFHDVISGDKPTAVKVAEARPTTTLNVKFGVIMIADDPLTEGPDPSSKEVGRAQGMYASTAMKDIVFTMVFNYVFTAGEFNGSTIAVYGRNDIFSKVRELPIIGGTGAFRFARGYALPKTYKIVGLDAVVEYNVFIWH

SEQ ID NO: 72835 - protein, 106 aa, Arabidopsis thaliana
  peptide (1)..(106): Ceres Seq. ID no. 4949240
  misc_feature (1)..(106): Pfam Name: Dirigent-like protein Pfam Description: Dirigent-like protein
  misc_feature (1)..(106): Homolog of NCBI NO: 15238982 NR Description: disease resistance response protein-related; id: At5g42510.1 [Arabidopsis thaliana] contains similarity to disease resistance response
  misc_feature (1)..(106): Homolog of NCBI NO: 15238980 NR Description: disease resistance response protein-related; id: At5g42500.1, supported by cDNA: gi_20260391 [Arabidopsis
  misc_feature (1)..(106): Homolog of NCBI NO: 15219966 NR Description: disease resistance response protein-related; id: At1g22900.1 [Arabidopsis thaliana] >gi|25347090|pir||A86363
  misc_feature (1)..(106): Homolog of NCBI NO: 15218836 NR Description: disease resistance response protein-related/
  misc_feature (1)..(106): Homolog of NCBI NO: 15217886 NR Description: disease resistance response protein-related/
  misc_feature (1)..(106): Homolog of NCBI NO: 30681257 NR Description: disease resistance response protein-related/
  misc_feature (1)..(101): Homolog of NCBI NO: 25412014 NR Description: probable disease resistance response protein - Arabidopsis thaliana >gi|4803933|gb|AAD29806.1| putative
  misc_feature (1)..(106): Homolog of NCBI NO: 26450265 NR Description: unknown protein [Arabidopsis thaliana]
  misc_feature (1)..(106): Homolog of NCBI NO: 15230941 NR Description: disease resistance response protein-related; id: At3g58090.1 [Arabidopsis thaliana] >gi|11357961|pir||T46031
  misc_feature (1)..(106): Homolog of NCBI NO: 15231302 NR Description: disease resistance response protein-related/
MIADDPLTEGPDPSSKEVGRAQGMYASTAMKDIVFTMVFNYVFTAGEFNGSTIAVYGRNDIFSKVRELPIIGGTGAFRFARGYALPKTYKIVGLDAVVEYNVFIWH

SEQ ID NO: 72836 - DNA, 1389 bp, Arabidopsis thaliana
  misc_feature (1)..(1389): Ceres Seq. ID no. 4949241
  misc_feature: MA Experiment ID: 20000171 Result: Down-regulated in Transcription
  misc_feature: MA Experiment 20000171 PARAMETER Experiment Name: At_42deg_Heat_P Parameter: Age (day) Value: 14
  misc_feature: MA Experiment 20000171 PARAMETER Experiment Name: At_42deg_Heat_P Parameter: Organism Value: A. thaliana
  misc_feature: MA Experiment 20000171 PARAMETER Experiment Name: At_42deg_Heat_P Parameter: Plant Line Value: WS
  misc_feature: MA Experiment 20000171 PARAMETER Experiment Name: At_42deg_Heat_P Parameter: Temperature (deg C) Value: 42 vs. 22
  misc_feature: MA Experiment 20000171 PARAMETER Experiment Name: At_42deg_Heat_P Parameter: Timepoint (hr) Value: 1
  misc_feature: MA Experiment 20000171 PARAMETER Experiment Name: At_42deg_Heat_P Parameter: Tissue Value: Aerial
  misc_feature: MA Experiment ID: 20000184 Result: Down-regulated in Transcription
  misc_feature: MA Experiment 20000184 PARAMETER Experiment Name: At_Shoots__P Parameter: Age (day) Value: 7
  misc_feature: MA Experiment 20000184 PARAMETER Experiment Name: At_Shoots__P Parameter: Tissue Value: Shoots vs. Whole Plant
  misc_feature: MA Experiment ID: 20000224 Result: Up-regulated in Transcription
  misc_feature: MA Experiment ID: 20001248 Result: Up-regulated in Transcription
  misc_feature: MA Experiment 20001248 PARAMETER Experiment Name: At_Far-red-induction_P Parameter: Age (day) Value: 7
  misc_feature: MA Experiment 20001248 PARAMETER Experiment Name: At_Far-red-induction_P Parameter: Light Value: Far-red vs. White
  misc_feature: MA Experiment 20001248 PARAMETER Experiment Name: At_Far-red-induction_P Parameter: Organism Value: A. thaliana
  misc_feature: MA Experiment 20001248 PARAMETER Experiment Name: At_Far-red-induction_P Parameter: Plant Line Value: Columbia
  misc_feature: MA Experiment 20001248 PARAMETER Experiment Name: At_Far-red-induction_P Parameter: Timepoint (hr) Value: 4
  misc_feature: MA Experiment 20001248 PARAMETER Experiment Name: At_Far-red-induction_P Parameter: Tissue Value: Whole Plant
  misc_feature: MA Experiment ID: 20001450 Result: Up-regulated in Transcription
  misc_feature: MA Experiment 20001450 PARAMETER Experiment Name: At_Far-red-induction_P Parameter: Age (day) Value: 7
  misc_feature: MA Experiment 20001450 PARAMETER Experiment Name: At_Far-red-induction_P Parameter: Light Value: Far-red vs. White
  misc_feature: MA Experiment 20001450 PARAMETER Experiment Name: At_Far-red-induction_P Parameter: Organism Value: A. thaliana
  misc_feature: MA Experiment 20001450 PARAMETER Experiment Name: At_Far-red-induction_P Parameter: Plant Line Value: Columbia
  misc_feature: MA Experiment 20001450 PARAMETER Experiment Name: At_Far-red-induction_P Parameter: Timepoint (hr) Value: 8
  misc_feature: MA Experiment 20001450 PARAMETER Experiment Name: At_Far-red-induction_P Parameter: Tissue Value: Whole Plant
  misc_feature: Pfam Name: DUF1004 Pfam Description: GAGA binding protein-like family
ccacaaagatatttttctttattctctcgcagttcaattagggtttcaatctctctgctctgcttgtcatcaccaccaccaccaccaccgtcgtcgtctctctgtatctctccggcgggttctctctctacttcccccggaggattaaaagatggaccagtcttttattttgatattccgttagcttgttcagttattgtagaagctgtaccgtcaagacttttaatatctcaaatggatgatggtgggcatcgtgagaatggtcggcataaagcagcagttcagggccagcatcagccgtcgatgaaacaagtgatgtcgataatagcagagcgcgatgcagcgattcaggagagaaatctggcgatatcagagaaaaaagcagcagtagctgaaagggacatggcgtttcttcagagggacaccgccattgctgagcgcaacaatgcgataatggagagagacagtgctcttacagcactccaataccgtgagaactctatggttactgctcctgctgccaatatgtcagcatgtccaccaggatgtcaaatatcacgtggtgtaaaacacttgcaccatccgcacatgcatcatcatcatcaacaacatcacatacctcagttgactgaaaatgcatatgaaaccagagagatggagccaaatgatggtctcccaacatcaccacctgccggatccaccttggaatctgccaaaccaaaacgtggtaaaagagtgaacccaaaggcgacaacacaaactgctgctaataagagagggccaaaaaatcagaggaaggttaagaaagagagcgaggacgacttaaacaagataatgtttgtaaagacgacccatgactacacagacgaagattcaagtaagcatatcttaataggatcaaaatctgactggaaaagtcaagaaatggtggggctgaaccaagtggtttacgacgagacaacgatgccaccacctgtatgttcatgtacaggagttctcagacagtgctacaaatggggaaatggaggttggcaatcatcgtgttgcacaactacactatcaatgtatcctttacctgcactgcccaacaaaaggcatgctcgagttggtggacggaaaatgagcggaagcgcgttcaacaagcttctaagccggcttgctgcagaagggcatcatgatctttcaaacccggtcgatctgaaggaccattgggcaaagcacggtacaaaccgctacattacgattaaatgatatgtgcatttaggtgtgagttgttcttacgacattatctgattttaaatcatgtgtactaaattcaaataaactcgagaggaaaagaattgtatgtggagccaatgttatgttgtattatataattcgaaaattttt

SEQ ID NO: 72837 - protein, 416 aa, Arabidopsis thaliana
  peptide (1)..(416): Ceres Seq. ID no. 4949242
  misc_feature: Pfam Name: DUF1004 Pfam Description: GAGA binding protein-like family
  misc_feature (79)..(416): Homolog of NCBI NO: 18422219 NR Description: putative protein; protein id: At5g42520.1, by cDNA: 7878. [Arabidopsis thaliana] >gi|21618292|gb|AAM67342.1|
  misc_feature (139)..(416): Homolog of NCBI NO: 9759488 NR Description: gb|AAF18661.1~gene_id:MDH9.22~similar to unknown
  misc_feature (78)..(168): Homolog of NCBI NO: 15234867 NR Description: putative protein; protein id: At4g38910.1
  misc_feature (300)..(387): Homolog of NCBI NO: 15234867 NR Description: putative protein; protein id: At4g38910.1
  misc_feature (246)..(416): Homolog of NCBI NO: 18399638 NR Description: expressed protein; protein id: At2g21240.1, by cDNA: 111536. [Arabidopsis thaliana] >gi|25412022|pir||H84598
  misc_feature (79)..(180): Homolog of NCBI NO: 9759488 NR Description: gb|AAF18661.1~gene_id:MDH9.22~similar to unknown
  misc_feature (353)..(416): Homolog of NCBI NO: 6006362 NR Description: Similar to Arabidopsis thaliana chromosome II BAC
  misc_feature (111)..(162): Homolog of NCBI NO: 6006362 NR Description: Similar to Arabidopsis thaliana chromosome II BAC
  misc_feature (191)..(416): Homolog of NCBI NO: 26190436 NR Description: barley B recombinant [Hordeum vulgare]
PQRYFSLFSRSSIRVSISLLCLSSPPPPPPSSSLCISPAGSLSTSPGGLKDGPVFYFDIPLACSVIVEAVPSRLLISQMDDGGHRENGRHKAAVQGQHQPSMKQVMSIIAERDAAIQERNLAISEKKAAVAERDMAFLQRDTAIAERNNAIMERDSALTALQYRENSMVTAPAANMSACPPGCQISRGVKHLHHPHMHHHHQQHHIPQLTENAYETREMEPNDGLPTSPPAGSTLESAKPKRGKRVNPKATTQTAANKRGPKNQRKVKKESEDDLNKIMFVKTTHDYTDEDSSKHILIGSKSDWKSQEMVGLNQVVYDETTMPPPVCSCTGVLRQCYKWGNGGWQSSCCTTTLSMYPLPALPNKRHARVGGRKMSGSAFNKLLSRLAAEGHHDLSNPVDLKDHWAKHGTNRYITIK

SEQ ID NO: 72838 - protein, 338 aa, Arabidopsis thaliana
  peptide (1)..(338): Ceres Seq. ID no. 4949243
  misc_feature: Pfam Name: DUF1004 Pfam Description: GAGA binding protein-like family
  misc_feature (1)..(338): Homolog of NCBI NO: 18422219 NR Description: putative protein; protein id: At5g42520.1, by cDNA: 7878. [Arabidopsis thaliana] >gi|21618292|gb|AAM67342.1|
  misc_feature (61)..(338): Homolog of NCBI NO: 9759488 NR Description: gb|AAF18661.1~gene_id:MDH9.22~similar to unknown
  misc_feature (1)..(90): Homolog of NCBI NO: 15234867 NR Description: putative protein; protein id: At4g38910.1
  misc_feature (222)..(309): Homolog of NCBI NO: 15234867 NR Description: putative protein; protein id: At4g38910.1
  misc_feature (168)..(338): Homolog of NCBI NO: 18399638 NR Description: expressed protein; protein id: At2g21240.1, by cDNA: 111536. [Arabidopsis thaliana] >gi|25412022|pir||H84598
  misc_feature (1)..(102): Homolog of NCBI NO: 9759488 NR Description: gb|AAF18661.1~gene_id:MDH9.22~similar to unknown
  misc_feature (275)..(338): Homolog of NCBI NO: 6006362 NR Description: Similar to Arabidopsis thaliana chromosome II BAC
  misc_feature (33)..(84): Homolog of NCBI NO: 6006362 NR Description: Similar to Arabidopsis thaliana chromosome II BAC
  misc_feature (113)..(338): Homolog of NCBI NO: 26190436 NR Description: barley B recombinant [Hordeum vulgare]
MDDGGHRENGRHKAAVQGQHQPSMKQVMSIIAERDAAIQERNLAISEKKAAVAERDMAFLQRDTAIAERNNAIMERDSALTALQYRENSMVTAPAANMSACPPGCQISRGVKHLHHPHMHHHHQQHHIPQLTENAYETREMEPNDGLPTSPPAGSTLESAKPKRGKRVNPKATTQTAANKRGPKNQRKVKKESEDDLNKIMFVKTTHDYTDEDSSKHILIGSKSDWKSQEMVGLNQVVYDETTMPPPVCSCTGVLRQCYKWGNGGWQSSCCTTTLSMYPLPALPNKRHARVGGRKMSGSAFNKLLSRLAAEGHHDLSNPVDLKDHWAKHGTNRYITIK

SEQ ID NO: 72839 - protein, 315 aa, Arabidopsis thaliana
  peptide (1)..(315): Ceres Seq. ID no. 4949244
  misc_feature: Pfam Name: DUF1004 Pfam Description: GAGA binding protein-like family
  misc_feature (1)..(315): Homolog of NCBI NO: 18422219 NR Description: putative protein; protein id: At5g42520.1, by cDNA: 7878. [Arabidopsis thaliana] >gi|21618292|gb|AAM67342.1|
  misc_feature (38)..(315): Homolog of NCBI NO: 9759488 NR Description: gb|AAF18661.1~gene_id:MDH9.22~similar to unknown
  misc_feature (1)..(67): Homolog of NCBI NO: 15234867 NR Description: putative protein; protein id: At4g38910.1
  misc_feature (199)..(286): Homolog of NCBI NO: 15234867 NR Description: putative protein; protein id: At4g38910.1
  misc_feature (145)..(315): Homolog of NCBI NO: 18399638 NR Description: expressed protein; protein id: At2g21240.1, by cDNA: 111536. [Arabidopsis thaliana] >gi|25412022|pir||H84598
  misc_feature (1)..(79): Homolog of NCBI NO: 9759488 NR Description: gb|AAF18661.1~gene_id:MDH9.22~similar to unknown
  misc_feature (252)..(315): Homolog of NCBI NO: 6006362 NR Description: Similar to Arabidopsis thaliana chromosome II BAC
  misc_feature (10)..(61): Homolog of NCBI NO: 6006362 NR Description: Similar to Arabidopsis thaliana chromosome II BAC
  misc_feature (90)..(315): Homolog of NCBI NO: 26190436 NR Description: barley B recombinant [Hordeum vulgare]
MKQVMSIIAERDAAIQERNLAISEKKAAVAERDMAFLQRDTAIAERNNAIMERDSALTALQYRENSMVTAPAANMSACPPGCQISRGVKHLHHPHMHHHHQQHHIPQLTENAYETREMEPNDGLPTSPPAGSTLESAKPKRGKRVNPKATTQTAANKRGPKNQRKVKKESEDDLNKIMFVKTTHDYTDEDSSKHILIGSKSDWKSQEMVGLNQVVYDETTMPPPVCSCTGVLRQCYKWGNGGWQSSCCTTTLSMYPLPALPNKRHARVGGRKMSGSAFNKLLSRLAAEGHHDLSNPVDLKDHWAKHGTNRYITIK

SEQ ID NO: 72840 - DNA, 1539 bp, Arabidopsis thaliana
  misc_feature (1)..(1539): Ceres Seq. ID no. 4949411
  misc_feature: MA Experiment ID: 20000185 Result: Up-regulated in Transcription
  misc_feature: MA Experiment 20000185 PARAMETER Experiment Name: At_Roots__P Parameter: Age (day) Value: 7 vs. 21
  misc_feature: MA Experiment 20000185 PARAMETER Experiment Name: At_Roots__P Parameter: Organism Value: A. thaliana
  misc_feature: MA Experiment 20000185 PARAMETER Experiment Name: At_Roots__P Parameter: Tissue Value: Roots vs. Whole Plant
  misc_feature: MA Experiment ID: 20000439 Result: Up-regulated in Transcription
  misc_feature: MA Experiment 20000439 PARAMETER Experiment Name: At_Roots__P Parameter: Age (day) Value: 14 vs. 21
  misc_feature: MA Experiment 20000439 PARAMETER Experiment Name: At_Roots__P Parameter: Organism Value: A. thaliana
  misc_feature: MA Experiment 20000439 PARAMETER Experiment Name: At_Roots__P Parameter: Tissue Value: Roots vs. Whole Plant
atgatgcaggggaagaaactgaaaggttgtgaaaatggtgttgtaaatcgaaaggcgttaaatcgagagaagataattactctgcaagaagatgttgaaaagttgagaaagaagctgagacttgaagaaaacattcaccgagcaatggaaagagcatttagtaggcctcttggagcacttccccgtcttcctccgtttctacctccatcggttttggagttacttgcggaagtggctgttttggaagaggaattggttcggttagaagaacatattgtgcattgtagacaagaattgtatcaagaagcagtttttacatcttcatcgatagagaatttaaaatgctctcctgcatttcctaagcattggcagaccaaatccaagtcagcttccactagtgctagagaatcagaatcacctctttcacgggcaccttgttctgtttcagtgtgtaggaagggtaaagaaaacaagttgagtgctacttctatcaaaacaccgatgaagaaaacgactattgctcatacacaactgaataagagtttagaagctcaaaaactaaaggatagtcatagatgtcgcaaaacaaatgcagagcggagctctcatggtggcggtgatgaaccaaataaaatttccgaggatttggttaaatgtctgtctaacattttcatgagaatgagctcaataaagagatccatggttacaaaatctcaagaaaacgataaagatacggcattcagggatccttatggaatttgctctagttttagaagaagggatattggtcgatataagaatttcagtgatgttgaagaagcctcacttaaccaaaacagaacgtcaagttcctctttgtttctcatccgccaactgaaacgattgcttggaagactttctttagtcaacatgcagaaacttaatcaacaagagaagttagctttctggataaacatttataacagctgcatgatgaatggtttccttgaacatggaataccggagagccctgatatggtgacattaatgcaaaaggcgactataaatgtaggaggccactttctcaatgcaatcacgatcgaacacttcatcctccgcttaccgcatcactcaaaatatatttctccaaagggttcaaagaaaaatgaaatggcagtgagaagtaaatttggattggaattgtcagagccacttgtaacatttgctctctcatgtggtagctggtcctcacccgcggtacgggtgtacactgcgagtaaagtagaggaggagttggaggtggcgaaaagagagtacctagaagcatcggtggggatatcggtggtgaaaatagggataccaaagctgatggattggtatagtcatgactttgcaaaggacattgaatcattgcttgattggattttccttcagttgcctactgagttgggtaaagatgctctcaactgtgttgaacaagggatgtctcagtccccttcttctactcttgtccatattatcccttatgacttcacttttagatatcttttttccatctga

SEQ ID NO: 72841 - protein, 512 aa, Arabidopsis thaliana
  peptide (1)..(512): Ceres Seq. ID no. 4949412
  misc_feature (293)..(433): Pfam Name: Protein of unknown function, DUF547 Pfam Description: Protein of unknown function, DUF547
  misc_feature (1)..(512): Homolog of NCBI NO: 15239037 NR Description: putative protein; protein id: At5g42690.1 thaliana] >gi|10177272|dbj|BAB10625.1|
  misc_feature (125)..(509): Homolog of NCBI NO: 25407787 NR Description: hypothetical protein AT4g37080 [imported] - thaliana >gi|4006868|emb|CAB16786.1| putative protein thaliana] >gi|7270657|emb|CAB80374.1| putative protein
  misc_feature (125)..(509): Homolog of NCBI NO: 30690854 NR Description: expressed protein [Arabidopsis thaliana] AT4g37080/C7A10_280 [Arabidopsis thaliana]
  misc_feature (228)..(512): Homolog of NCBI NO: 15983811 NR Description: AT5g60720/mup24_130 [Arabidopsis thaliana]
  misc_feature (228)..(512): Homolog of NCBI NO: 30697420 NR Description: expressed protein [Arabidopsis thaliana]
  misc_feature (12)..(244): Homolog of NCBI NO: 15983811 NR Description: AT5g60720/mup24_130 [Arabidopsis thaliana]
  misc_feature (12)..(244): Homolog of NCBI NO: 30697420 NR Description: expressed protein [Arabidopsis thaliana]
  misc_feature (230)..(509): Homolog of NCBI NO: 31193902 NR Description: unknown protein [Oryza sativa (japonica
  misc_feature (28)..(92): Homolog of NCBI NO: 31193902 NR Description: unknown protein [Oryza sativa (japonica
  misc_feature (249)..(512): Homolog of NCBI NO: 15225527 NR Description: hypothetical protein; protein id: At2g39690.1
MMQGKKLKGCENGVVNRKALNREKIITLQEDVEKLRKKLRLEENIHRAMERAFSRPLGALPRLPPFLPPSVLELLAEVAVLEEELVRLEEHIVHCRQELYQEAVFTSSSIENLKCSPAFPKHWQTKSKSASTSARESESPLSRAPCSVSVCRKGKENKLSATSIKTPMKKTTIAHTQLNKSLEAQKLKDSHRCRKTNAERSSHGGGDEPNKISEDLVKCLSNIFMRMSSIKRSMVTKSQENDKDTAFRDPYGICSSFRRRDIGRYKNFSDVEEASLNQNRTSSSSLFLIRQLKRLLGRLSLVNMQKLNQQEKLAFWINIYNSCMMNGFLEHGIPESPDMVTLMQKATINVGGHFLNAITIEHFILRLPHHSKYISPKGSKKNEMAVRSKFGLELSEPLVTFALSCGSWSSPAVRVYTASKVEEELEVAKREYLEASVGISVVKIGIPKLMDWYSHDFAKDIESLLDWIFLQLPTELGKDALNCVEQGMSQSPSSTLVHIIPYDFTFRYLFSI

SEQ ID NO: 72842 - protein, 511 aa, Arabidopsis thaliana
  peptide (1)..(511): Ceres Seq. ID no. 4949413
  misc_feature (292)..(432): Pfam Name: Protein of unknown function, DUF547 Pfam Description: Protein of unknown function, DUF547
  misc_feature (1)..(511): Homolog of NCBI NO: 15239037 NR Description: putative protein; protein id: At5g42690.1 thaliana] >gi|10177272|dbj|BAB10625.1|
  misc_feature (124)..(508): Homolog of NCBI NO: 25407787 NR Description: hypothetical protein AT4g37080 [imported] - thaliana >gi|4006868|emb|CAB16786.1| putative protein thaliana] >gi|7270657|emb|CAB80374.1| putative protein
  misc_feature (124)..(508): Homolog of NCBI NO: 30690854 NR Description: expressed protein [Arabidopsis thaliana] AT4g37080/C7A10_280 [Arabidopsis thaliana]
  misc_feature (227)..(511): Homolog of NCBI NO: 15983811 NR Description: AT5g60720/mup24_130 [Arabidopsis thaliana]
  misc_feature (227)..(511): Homolog of NCBI NO: 30697420 NR Description: expressed protein [Arabidopsis thaliana]
  misc_feature (11)..(243): Homolog of NCBI NO: 15983811 NR Description: AT5g60720/mup24_130 [Arabidopsis thaliana]
  misc_feature (11)..(243): Homolog of NCBI NO: 30697420 NR Description: expressed protein [Arabidopsis thaliana]
  misc_feature (229)..(508): Homolog of NCBI NO: 31193902 NR Description: unknown protein [Oryza sativa (japonica
  misc_feature (27)..(91): Homolog of NCBI NO: 31193902 NR Description: unknown protein [Oryza sativa (japonica
  misc_feature (248)..(511): Homolog of NCBI NO: 15225527 NR Description: hypothetical protein; protein id: At2g39690.1
MQGKKLKGCENGVVNRKALNREKIITLQEDVEKLRKKLRLEENIHRAMERAFSRPLGALPRLPPFLPPSVLELLAEVAVLEEELVRLEEHIVHCRQELYQEAVFTSSSIENLKCSPAFPKHWQTKSKSASTSARESESPLSRAPCSVSVCRKGKENKLSATSIKTPMKKTTIAHTQLNKSLEAQKLKDSHRCRKTNAERSSHGGGDEPNKISEDLVKCLSNIFMRMSSIKRSMVTKSQENDKDTAFRDPYGICSSFRRRDIGRYKNFSDVEEASLNQNRTSSSSLFLIRQLKRLLGRLSLVNMQKLNQQEKLAFWINIYNSCMMNGFLEHGIPESPDMVTLMQKATINVGGHFLNAITIEHFILRLPHHSKYISPKGSKKNEMAVRSKFGLELSEPLVTFALSCGSWSSPAVRVYTASKVEEELEVAKREYLEASVGISVVKIGIPKLMDWYSHDFAKDIESLLDWIFLQLPTELGKDALNCVEQGMSQSPSSTLVHIIPYDFTFRYLFSI

SEQ ID NO: 72843 - protein, 464 aa, Arabidopsis thaliana
  peptide (1)..(464): Ceres Seq. ID no. 4949414
  misc_feature (245)..(385): Pfam Name: Protein of unknown function, DUF547 Pfam Description: Protein of unknown function, DUF547
  misc_feature (1)..(464): Homolog of NCBI NO: 15239037 NR Description: putative protein; protein id: At5g42690.1 thaliana] >gi|10177272|dbj|BAB10625.1|
  misc_feature (77)..(461): Homolog of NCBI NO: 25407787 NR Description: hypothetical protein AT4g37080 [imported] - thaliana >gi|4006868|emb|CAB16786.1| putative protein thaliana] >gi|7270657|emb|CAB80374.1| putative protein
  misc_feature (77)..(461): Homolog of NCBI NO: 30690854 NR Description: expressed protein [Arabidopsis thaliana] AT4g37080/C7A10_280 [Arabidopsis thaliana]
  misc_feature (180)..(464): Homolog of NCBI NO: 15983811 NR Description: AT5g60720/mup24_130 [Arabidopsis thaliana]
  misc_feature (180)..(464): Homolog of NCBI NO: 30697420 NR Description: expressed protein [Arabidopsis thaliana]
  misc_feature (1)..(196): Homolog of NCBI NO: 15983811 NR Description: AT5g60720/mup24_130 [Arabidopsis thaliana]
  misc_feature (1)..(196): Homolog of NCBI NO: 30697420 NR Description: expressed protein [Arabidopsis thaliana]
  misc_feature (182)..(461): Homolog of NCBI NO: 31193902 NR Description: unknown protein [Oryza sativa (japonica
  misc_feature (1)..(44): Homolog of NCBI NO: 31193902 NR Description: unknown protein [Oryza sativa (japonica
  misc_feature (201)..(464): Homolog of NCBI NO: 15225527 NR Description: hypothetical protein; protein id: At2g39690.1
MERAFSRPLGALPRLPPFLPPSVLELLAEVAVLEEELVRLEEHIVHCRQELYQEAVFTSSSIENLKCSPAFPKHWQTKSKSASTSARESESPLSRAPCSVSVCRKGKENKLSATSIKTPMKKTTIAHTQLNKSLEAQKLKDSHRCRKTNAERSSHGGGDEPNKISEDLVKCLSNIFMRMSSIKRSMVTKSQENDKDTAFRDPYGICSSFRRRDIGRYKNFSDVEEASLNQNRTSSSSLFLIRQLKRLLGRLSLVNMQKLNQQEKLAFWINIYNSCMMNGFLEHGIPESPDMVTLMQKATINVGGHFLNAITIEHFILRLPHHSKYISPKGSKKNEMAVRSKFGLELSEPLVTFALSCGSWSSPAVRVYTASKVEEELEVAKREYLEASVGISVVKIGIPKLMDWYSHDFAKDIESLLDWIFLQLPTELGKDALNCVEQGMSQSPSSTLVHIIPYDFTFRYLFSI

SEQ ID NO: 72844 - DNA, 1086 bp, Arabidopsis thaliana
  misc_feature (1)..(1086): Ceres Seq. ID no. 4949646
atggctatcccgaggctgagtcttcttcctaacaacgagcacaattctgataactacgaagatctggaacttgaatttagctcttccgtattaagatccctagagaggtacttaccgccggaaatactcacggcgaatagagaagagaaggccaaattcatgtcagacattttgcacaagtacatttcccgcgaagaatgtgccaaagctatacggttcaagaactatagggagtggataatgtccaattatcagccacgtttcagggagttgtataaacttgatcccgaatcgttattgcttccgtgtttccgcaaggcggtcagagaaaacaccgaggaaagcttcagacgtataatgtttgaaccgtttcctggtgtttacgtctttaaaatgtttcagcctgacttctttcagaaattgcttgttgaggtagagaatatgagaaagtggcttcatgaggcaaaattgatgatcaggaaaccaaacaataagagtaaatatggtgttgtgcttgacgactttggcatggatatcatgcttaagccactcgtggaggattttatctttcctatttgcaaagtattcttccctcaagtgtgtggaacaatgtttgacactcaacatggattcgttattgaaaattgtgaagatagggatgctgaattaggctttcatgtggaaaattcagacattacattgaatgtttgtttgagtaaacaaagtgagggaggggaaatattattcacaggcacacgatgcaataaacatttgaaagcaggtccaaagccagaggaaatttttgagtactgtcatgaaccgggtcaagctatacttcaccttggctgccacagccatggtgcaaaagccgccataacatcttgtagtcgggccaatatgattctttggtgcataaactctttgttcagagagatgcaaacttatgacaacgaattccgagactggtgcggtcaatgcgcccgtgaaaagaaagaaaagaaaagccagagtcttgcttccaaaagaaaggttaagaaaagaaaaaaggacatgattttgctcaagtttataagatgttttgtttga

SEQ ID NO: 72845 - protein, 361 aa, Arabidopsis thaliana
  peptide (1)..(361): Ceres Seq. ID no. 4949647
  misc_feature (206)..(304): Pfam Name: 2OG-Fe(II) oxygenase superfamily Pfam Description: 2OG-Fe(II) oxygenase superfamily
  misc_feature (1)..(361): Homolog of NCBI NO: 15239932 NR Description: putative protein; protein id: At5g43660.1
  misc_feature (2)..(343): Homolog of NCBI NO: 15221946 NR Description: unknown protein; protein id: At1g48740.1 thaliana] >gi|12597814|gb|AAG60125.1|AC073555_9 unknown protein
  misc_feature (195)..(343): Homolog of NCBI NO: 15221938 NR Description: unknown protein; protein id: At1g48700.1 thaliana] >gi|12597823|gb|AAG60134.1|AC073555_18 unknown protein
  misc_feature (42)..(168): Homolog of NCBI NO: 15221938 NR Description: unknown protein; protein id: At1g48700.1 thaliana] >gi|12597823|gb|AAG60134.1|AC073555_18 unknown protein
  misc_feature (5)..(343): Homolog of NCBI NO: 18401806 NR Description: expressed protein; protein id: At3g18210.1, by cDNA: gi_14423467 [Arabidopsis thaliana] gb|AAB72163.1~gene_id:MRC8.21~strong similarity to unknown
  misc_feature (5)..(205): Homolog of NCBI NO: 15219973 NR Description: unknown protein; protein id: At1g22950.1
  misc_feature (192)..(348): Homolog of NCBI NO: 15219973 NR Description: unknown protein; protein id: At1g22950.1
  misc_feature (5)..(205): Homolog of NCBI NO: 25518648 NR Description: hypothetical protein F19G10.9 [imported] - thaliana >gi|2462828|gb|AAB72163.1| hypothetical protein
  misc_feature (192)..(348): Homolog of NCBI NO: 25518648 NR Description: hypothetical protein F19G10.9 [imported] - thaliana >gi|2462828|gb|AAB72163.1| hypothetical protein
  misc_feature (5)..(341): Homolog of NCBI NO: 34914494 NR Description: B1080D07.28 [Oryza sativa (japonica
MAIPRLSLLPNNEHNSDNYEDLELEFSSSVLRSLERYLPPEILTANREEKAKFMSDILHKYISREECAKAIRFKNYREWIMSNYQPRFRELYKLDPESLLLPCFRKAVRENTEESFRRIMFEPFPGVYVFKMFQPDFFQKLLVEVENMRKWLHEAKLMIRKPNNKSKYGVVLDDFGMDIMLKPLVEDFIFPICKVFFPQVCGTMFDTQHGFVIENCEDRDAELGFHVENSDITLNVCLSKQSEGGEILFTGTRCNKHLKAGPKPEEIFEYCHEPGQAILHLGCHSHGAKAAITSCSRANMILWCINSLFREMQTYDNEFRDWCGQCAREKKEKKSQSLASKRKVKKRKKDMILLKFIRCFV

SEQ ID NO: 72846 - protein, 308 aa, Arabidopsis thaliana
  peptide (1)..(308): Ceres Seq. ID no. 4949648
  misc_feature (153)..(251): Pfam Name: 2OG-Fe(II) oxygenase superfamily Pfam Description: 2OG-Fe(II) oxygenase superfamily
  misc_feature (1)..(308): Homolog of NCBI NO: 15239932 NR Description: putative protein; protein id: At5g43660.1
  misc_feature (1)..(290): Homolog of NCBI NO: 15221946 NR Description: unknown protein; protein id: At1g48740.1 thaliana] >gi|12597814|gb|AAG60125.1|AC073555_9 unknown protein
  misc_feature (142)..(290): Homolog of NCBI NO: 15221938 NR Description: unknown protein; protein id: At1g48700.1 thaliana] >gi|12597823|gb|AAG60134.1|AC073555_18 unknown protein
  misc_feature (1)..(115): Homolog of NCBI NO: 15221938 NR Description: unknown protein; protein id: At1g48700.1 thaliana] >gi|12597823|gb|AAG60134.1|AC073555_18 unknown protein
  misc_feature (1)..(290): Homolog of NCBI NO: 18401806 NR Description: expressed protein; protein id: At3g18210.1, by cDNA: gi_14423467 [Arabidopsis thaliana] gb|AAB72163.1~gene_id:MRC8.21~strong similarity to unknown
  misc_feature (1)..(152): Homolog of NCBI NO: 15219973 NR Description: unknown protein; protein id: At1g22950.1
  misc_feature (139)..(295): Homolog of NCBI NO: 15219973 NR Description: unknown protein; protein id: At1g22950.1
  misc_feature (1)..(152): Homolog of NCBI NO: 25518648 NR Description: hypothetical protein F19G10.9 [imported] - thaliana >gi|2462828|gb|AAB72163.1| hypothetical protein
  misc_feature (139)..(295): Homolog of NCBI NO: 25518648 NR Description: hypothetical protein F19G10.9 [imported] - thaliana >gi|2462828|gb|AAB72163.1| hypothetical protein
  misc_feature (1)..(288): Homolog of NCBI NO: 34914494 NR Description: B1080D07.28 [Oryza sativa (japonica
MSDILHKYISREECAKAIRFKNYREWIMSNYQPRFRELYKLDPESLLLPCFRKAVRENTEESFRRIMFEPFPGVYVFKMFQPDFFQKLLVEVENMRKWLHEAKLMIRKPNNKSKYGVVLDDFGMDIMLKPLVEDFIFPICKVFFPQVCGTMFDTQHGFVIENCEDRDAELGFHVENSDITLNVCLSKQSEGGEILFTGTRCNKHLKAGPKPEEIFEYCHEPGQAILHLGCHSHGAKAAITSCSRANMILWCINSLFREMQTYDNEFRDWCGQCAREKKEKKSQSLASKRKVKKRKKDMILLKFIRCFV

SEQ ID NO: 72847 - protein, 281 aa, Arabidopsis thaliana
  peptide (1)..(281): Ceres Seq. ID no. 4949649
  misc_feature (126)..(224): Pfam Name: 2OG-Fe(II) oxygenase superfamily Pfam Description: 2OG-Fe(II) oxygenase superfamily
  misc_feature (1)..(281): Homolog of NCBI NO: 15239932 NR Description: putative protein; protein id: At5g43660.1
  misc_feature (1)..(263): Homolog of NCBI NO: 15221946 NR Description: unknown protein; protein id: At1g48740.1 thaliana] >gi|12597814|gb|AAG60125.1|AC073555_9 unknown protein
  misc_feature (115)..(263): Homolog of NCBI NO: 15221938 NR Description: unknown protein; protein id: At1g48700.1 thaliana] >gi|12597823|gb|AAG60134.1|AC073555_18 unknown protein
  misc_feature (1)..(88): Homolog of NCBI NO: 15221938 NR Description: unknown protein; protein id: At1g48700.1 thaliana] >gi|12597823|gb|AAG60134.1|AC073555_18 unknown protein
  misc_feature (1)..(263): Homolog of NCBI NO: 18401806 NR Description: expressed protein; protein id: At3g18210.1, by cDNA: gi_14423467 [Arabidopsis thaliana] gb|AAB72163.1~gene_id:MRC8.21~strong similarity to unknown
  misc_feature (1)..(125): Homolog of NCBI NO: 15219973 NR Description: unknown protein; protein id: At1g22950.1
  misc_feature (112)..(268): Homolog of NCBI NO: 15219973 NR Description: unknown protein; protein id: At1g22950.1
  misc_feature (1)..(125): Homolog of NCBI NO: 25518648 NR Description: hypothetical protein F19G10.9 [imported] - thaliana >gi|2462828|gb|AAB72163.1| hypothetical protein
  misc_feature (112)..(268): Homolog of NCBI NO: 25518648 NR Description: hypothetical protein F19G10.9 [imported] - thaliana >gi|2462828|gb|AAB72163.1| hypothetical protein
  misc_feature (1)..(261): Homolog of NCBI NO: 34914494 NR Description: B1080D07.28 [Oryza sativa (japonica
MSNYQPRFRELYKLDPESLLLPCFRKAVRENTEESFRRIMFEPFPGVYVFKMFQPDFFQKLLVEVENMRKWLHEAKLMIRKPNNKSKYGVVLDDFGMDIMLKPLVEDFIFPICKVFFPQVCGTMFDTQHGFVIENCEDRDAELGFHVENSDITLNVCLSKQSEGGEILFTGTRCNKHLKAGPKPEEIFEYCHEPGQAILHLGCHSHGAKAAITSCSRANMILWCINSLFREMQTYDNEFRDWCGQCAREKKEKKSQSLASKRKVKKRKKDMILLKFIRCFV

SEQ ID NO: 72848 - DNA, 783 bp, Arabidopsis thaliana
  misc_feature (1)..(783): Ceres Seq. ID no. 4949753
  misc_feature: MA Experiment ID: 20000180 Result: Down-regulated in Transcription
  misc_feature: MA Experiment 20000180 PARAMETER Experiment Name: At_Germinating_Seeds_P Parameter: Age (hr) Value: 24 vs. 0
  misc_feature: MA Experiment 20000180 PARAMETER Experiment Name: At_Germinating_Seeds_P Parameter: Tissue Value: Germinating Seeds
  misc_feature: MA Experiment ID: 20000182 Result: Up-regulated in Transcription
  misc_feature: MA Experiment 20000182 PARAMETER Experiment Name: At_2mM_SA_P Parameter: Age (day) Value: 14
  misc_feature: MA Experiment 20000182 PARAMETER Experiment Name: At_2mM_SA_P Parameter: Organism Value: A. thaliana
  misc_feature: MA Experiment 20000182 PARAMETER Experiment Name: At_2mM_SA_P Parameter: Plant Line Value: WS
  misc_feature: MA Experiment 20000182 PARAMETER Experiment Name: At_2mM_SA_P Parameter: Timepoint (hr) Value: 6
  misc_feature: MA Experiment 20000182 PARAMETER Experiment Name: At_2mM_SA_P Parameter: Tissue Value: Aerial
  misc_feature: MA Experiment 20000182 PARAMETER Experiment Name: At_2mM_SA_P Parameter: Treatment Value: 2mM SA vs. No Treatment
  misc_feature: MA Experiment ID: 20000495 Result: Up-regulated in Transcription
  misc_feature: MA Experiment 20000495 PARAMETER Experiment Name: At_Guard_Cells_P Parameter: Harvest Date Value: 8/2/2002
  misc_feature: MA Experiment 20000495 PARAMETER Experiment Name: At_Guard_Cells_P Parameter: Organism Value: A. thaliana
  misc_feature: MA Experiment 20000495 PARAMETER Experiment Name: At_Guard_Cells_P Parameter: Tissue Value: Guard Cells vs. Leaves
atgaaactcacctatcaattcttcatcttctggttctttttaccattctttgcaatctccggtgatgatgattataaaaatctgatctttaaaggttgtgcaaatcagaaatctccagacccaactggtgttttctctcagaatctcaaaaacttattcacttctttagtttctcaatcatcacaaagctctttcgcttccgtaacctccggaactgataacaccaccgccgtgatcggtgtttttcagtgccgtggcgatctccaaaacgctcagtgttacgattgcgtctccaaaatccctaaactcgtttctaaactctgcggtggcggcagagatgacggtaatgtggtggcggctcgtgttcacctcgctggatgttatatccggtatgagagttcaggattccggcaaacttccggtacggagatgttgttccgtgtctgtgggaaaaaagattctaacgatcctgggtttgtcgggaaaagggagacggcgtttggtatggcggagaacggcgtgaaaactggatcatccggtggtggtggtggcggaggaggtttttacgcggggcagtatgagtcggtgtatgtgttgggacagtgtgagggtagtttgggaaattcagattgtggggaatgtgtgaaagatggatttgagaaagcaaagagtgagtgtggagagtcgaactcgggacaagtttaccttcagaagtgcttcgttagctatagttactactctcatggtgttcccaacatagagccattatcaggtatacactaa

SEQ ID NO: 72849 - protein, 260 aa, Arabidopsis thaliana
  peptide (1)..(260): Ceres Seq. ID no. 4949754
  misc_feature (78)..(138): Pfam Name: Domain of unknown function DUF26 Pfam Description: Domain of unknown function DUF26
  misc_feature (1)..(260): Homolog of NCBI NO: 9758557 NR Description: gb|AAB80651.1~gene_id:MRH10.9~similar to unknown
  misc_feature (1)..(258): Homolog of NCBI NO: 26451089 NR Description: unknown protein [Arabidopsis thaliana]
  misc_feature (1)..(258): Homolog of NCBI NO: 30694417 NR Description: expressed protein [Arabidopsis thaliana]
  misc_feature (20)..(251): Homolog of NCBI NO: 15219740 NR Description: unknown protein; protein id: At1g04520.1
  misc_feature (20)..(251): Homolog of NCBI NO: 38566686 NR Description: At1g04520 [Arabidopsis thaliana]
  misc_feature (18)..(251): Homolog of NCBI NO: 18403243 NR Description: expressed protein; protein id: At2g33330.1, by cDNA: 35273., supported by cDNA: gi_14596050, supported by gi_20148722 [Arabidopsis thaliana] >gi|14596051|gb|AAK68753.1|
  misc_feature (18)..(251): Homolog of NCBI NO: 25408259 NR Description: hypothetical protein At2g33330 [imported] -
  misc_feature (3)..(252): Homolog of NCBI NO: 6721149 NR Description: hypothetical protein, 3' partial [Arabidopsis
  misc_feature (3)..(252): Homolog of NCBI NO: 15229281 NR Description: hypothetical protein; protein id: At3g04370.1 thaliana] >gi|7547096|gb|AAF63768.1| hypothetical protein
  misc_feature (29)..(243): Homolog of NCBI NO: 38567870 NR Description: OSJNBa0091D06.12 [Oryza sativa (japonica
MKLTYQFFIFWFFLPFFAISGDDDYKNLIFKGCANQKSPDPTGVFSQNLKNLFTSLVSQSSQSSFASVTSGTDNTTAVIGVFQCRGDLQNAQCYDCVSKIPKLVSKLCGGGRDDGNVVAARVHLAGCYIRYESSGFRQTSGTEMLFRVCGKKDSNDPGFVGKRETAFGMAENGVKTGSSGGGGGGGGFYAGQYESVYVLGQCEGSLGNSDCGECVKDGFEKAKSECGESNSGQVYLQKCFVSYSYYSHGVPNIEPLSGIH

SEQ ID NO: 72850 - DNA, 927 bp, Arabidopsis thaliana
  misc_feature (1)..(927): Ceres Seq. ID no. 4950117
  misc_feature: MA Experiment ID: 20000180 Result: Up-regulated in Transcription
  misc_feature: MA Experiment 20000180 PARAMETER Experiment Name: At_Germinating_Seeds_P Parameter: Age (hr) Value: 24 vs. 0
  misc_feature: MA Experiment 20000180 PARAMETER Experiment Name: At_Germinating_Seeds_P Parameter: Tissue Value: Germinating Seeds
  misc_feature: MA Experiment ID: 20000185 Result: Up-regulated in Transcription
  misc_feature: MA Experiment 20000185 PARAMETER Experiment Name: At_Roots__P Parameter: Age (day) Value: 7 vs. 21
  misc_feature: MA Experiment 20000185 PARAMETER Experiment Name: At_Roots__P Parameter: Organism Value: A. thaliana
  misc_feature: MA Experiment 20000185 PARAMETER Experiment Name: At_Roots__P Parameter: Tissue Value: Roots vs. Whole Plant
  misc_feature: MA Experiment ID: 20000227 Result: Up-regulated in Transcription
  misc_feature: MA Experiment 20000227 PARAMETER Experiment Name: At_Root-Tips-vs-Tops_P Parameter: Tissue Value: Root Tips vs. Root Tops
  misc_feature: MA Experiment ID: 20000439 Result: Up-regulated in Transcription
  misc_feature: MA Experiment 20000439 PARAMETER Experiment Name: At_Roots__P Parameter: Age (day) Value: 14 vs. 21
  misc_feature: MA Experiment 20000439 PARAMETER Experiment Name: At_Roots__P Parameter: Organism Value: A. thaliana
  misc_feature: MA Experiment 20000439 PARAMETER Experiment Name: At_Roots__P Parameter: Tissue Value: Roots vs. Whole Plant
atggaaagagtgaatctcggaggtttaggttacgataatggcggagttatgatgactagagatcccaaacctaggctcagatggacagccgatcttcatgatcgcttcgtcgacgccgtcgctaagctcggtggcgctgacaaagcaactcctaaatcggttctgaagctgatgggattaaaaggtttaacactgtaccatctcaagagccatttacagaagtatagacttggtcaacaacaaggcaaaaaacaaaatagaacagaacaaaacaaagaaaatgctggaagttcatatgtgcatttcgacaattgttctcaaggaggaatctccaatgattcaagatttgataaccatcaaaggtatattatatatgaatttgccttctctcgacataatggatttgtaaagcttgagtttgacataatgttaatgaacacacgtagacaaagcgggaatgtaccttttgctgaggcaatgagacatcaggtcgatgcgcaacaacggtttcaagaacaactcgaggtgcagaaaaaactgcagatgagaatggaggcacaaggaaaatatttgttgacattactagagaaagcacagaagagcttaccttgtggtaatgcaggggaaacagacaagggtcaattctcggatttcaatctcgcactttcgggacttgtaggaagtgatcgtaagaacgagaaggcgggtttggttactgatatctcacaccttaatggtggtgattcctctcaagagtttcggttatgtggagaacaagagaaaatagaaaccggagatgcatgtgttaaaccagaatccgggtttgtgcattttgatttgaactccaaaagtgggtatgatctcttgaattgtgggaaatatgggattgaagtgaagccaaatgtgattggagatagacttcaatag

SEQ ID NO: 72851 - protein, 308 aa, Arabidopsis thaliana
  peptide (1)..(308): Ceres Seq. ID no. 4950118
  misc_feature (25)..(76): Pfam Name: Myb-like DNA-binding domain Pfam Description: Myb-like DNA-binding domain
  misc_feature (1)..(308): Homolog of NCBI NO: 15242435 NR Description: putative protein; protein id: At5g45580.1 thaliana] >gi|10177932|dbj|BAB11197.1| contains similarity to
  misc_feature (152)..(299): Homolog of NCBI NO: 32470629 NR Description: putative phosphate starvation response regulator
  misc_feature (8)..(120): Homolog of NCBI NO: 32470629 NR Description: putative phosphate starvation response regulator
  misc_feature (158)..(298): Homolog of NCBI NO: 38345771 NR Description: OSJNBa0083N12.9 [Oryza sativa (japonica
  misc_feature (7)..(83): Homolog of NCBI NO: 38345771 NR Description: OSJNBa0083N12.9 [Oryza sativa (japonica
  misc_feature (158)..(250): Homolog of NCBI NO: 29647444 NR Description: P0410E11.32 [Oryza sativa (japonica
  misc_feature (7)..(100): Homolog of NCBI NO: 29647444 NR Description: P0410E11.32 [Oryza sativa (japonica
  misc_feature (16)..(98): Homolog of NCBI NO: 18404044 NR Description: transfactor, putative; protein id: At3g24120.1, by cDNA: 6626., supported by cDNA: gi_15215653, supported by gi_20334891 [Arabidopsis thaliana] >gi|15215654|gb|AAK91372.1|
  misc_feature (143)..(201): Homolog of NCBI NO: 18404044 NR Description: transfactor, putative; protein id: At3g24120.1, by cDNA: 6626., supported by cDNA: gi_15215653, supported by gi_20334891 [Arabidopsis thaliana] >gi|15215654|gb|AAK91372.1|
  misc_feature (6)..(92): Homolog of NCBI NO: 14596181 NR Description: transfactor-like protein [Arabidopsis thaliana]
MERVNLGGLGYDNGGVMMTRDPKPRLRWTADLHDRFVDAVAKLGGADKATPKSVLKLMGLKGLTLYHLKSHLQKYRLGQQQGKKQNRTEQNKENAGSSYVHFDNCSQGGISNDSRFDNHQRYIIYEFAFSRHNGFVKLEFDIMLMNTRRQSGNVPFAEAMRHQVDAQQRFQEQLEVQKKLQMRMEAQGKYLLTLLEKAQKSLPCGNAGETDKGQFSDFNLALSGLVGSDRKNEKAGLVTDISHLNGGDSSQEFRLCGEQEKIETGDACVKPESGFVHFDLNSKSGYDLLNCGKYGIEVKPNVIGDRLQ

SEQ ID NO: 72852 - protein, 292 aa, Arabidopsis thaliana
  peptide (1)..(292): Ceres Seq. ID no. 4950119
  misc_feature (9)..(60): Pfam Name: Myb-like DNA-binding domain Pfam Description: Myb-like DNA-binding domain
  misc_feature (1)..(292): Homolog of NCBI NO: 15242435 NR Description: putative protein; protein id: At5g45580.1 thaliana] >gi|10177932|dbj|BAB11197.1| contains similarity to
  misc_feature (136)..(283): Homolog of NCBI NO: 32470629 NR Description: putative phosphate starvation response regulator
  misc_feature (1)..(104): Homolog of NCBI NO: 32470629 NR Description: putative phosphate starvation response regulator
  misc_feature (142)..(282): Homolog of NCBI NO: 38345771 NR Description: OSJNBa0083N12.9 [Oryza sativa (japonica
  misc_feature (1)..(67): Homolog of NCBI NO: 38345771 NR Description: OSJNBa0083N12.9 [Oryza sativa (japonica
  misc_feature (142)..(234): Homolog of NCBI NO: 29647444 NR Description: P0410E11.32 [Oryza sativa (japonica
  misc_feature (1)..(84): Homolog of NCBI NO: 29647444 NR Description: P0410E11.32 [Oryza sativa (japonica
  misc_feature (1)..(82): Homolog of NCBI NO: 18404044 NR Description: transfactor, putative; protein id: At3g24120.1, by cDNA: 6626., supported by cDNA: gi_15215653, supported by gi_20334891 [Arabidopsis thaliana] >gi|15215654|gb|AAK91372.1|
  misc_feature (127)..(185): Homolog of NCBI NO: 18404044 NR Description: transfactor, putative; protein id: At3g24120.1, by cDNA: 6626., supported by cDNA: gi_15215653, supported by gi_20334891 [Arabidopsis thaliana] >gi|15215654|gb|AAK91372.1|
  misc_feature (1)..(76): Homolog of NCBI NO: 14596181 NR Description: transfactor-like protein [Arabidopsis thaliana]
MMTRDPKPRLRWTADLHDRFVDAVAKLGGADKATPKSVLKLMGLKGLTLYHLKSHLQKYRLGQQQGKKQNRTEQNKENAGSSYVHFDNCSQGGISNDSRFDNHQRYIIYEFAFSRHNGFVKLEFDIMLMNTRRQSGNVPFAEAMRHQVDAQQRFQEQLEVQKKLQMRMEAQGKYLLTLLEKAQKSLPCGNAGETDKGQFSDFNLALSGLVGSDRKNEKAGLVTDISHLNGGDSSQEFRLCGEQEKIETGDACVKPESGFVHFDLNSKSGYDLLNCGKYGIEVKPNVIGDRLQ

SEQ ID NO: 72853 - protein, 291 aa, Arabidopsis thaliana
  peptide (1)..(291): Ceres Seq. ID no. 4950120
  misc_feature (8)..(59): Pfam Name: Myb-like DNA-binding domain Pfam Description: Myb-like DNA-binding domain
  misc_feature (1)..(291): Homolog of NCBI NO: 15242435 NR Description: putative protein; protein id: At5g45580.1 thaliana] >gi|10177932|dbj|BAB11197.1| contains similarity to
  misc_feature (135)..(282): Homolog of NCBI NO: 32470629 NR Description: putative phosphate starvation response regulator
  misc_feature (1)..(103): Homolog of NCBI NO: 32470629 NR Description: putative phosphate starvation response regulator
  misc_feature (141)..(281): Homolog of NCBI NO: 38345771 NR Description: OSJNBa0083N12.9 [Oryza sativa (japonica
  misc_feature (1)..(66): Homolog of NCBI NO: 38345771 NR Description: OSJNBa0083N12.9 [Oryza sativa (japonica
  misc_feature (141)..(233): Homolog of NCBI NO: 29647444 NR Description: P0410E11.32 [Oryza sativa (japonica
  misc_feature (1)..(83): Homolog of NCBI NO: 29647444 NR Description: P0410E11.32 [Oryza sativa (japonica
  misc_feature (1)..(81): Homolog of NCBI NO: 18404044 NR Description: transfactor, putative; protein id: At3g24120.1, by cDNA: 6626., supported by cDNA: gi_15215653, supported by gi_20334891 [Arabidopsis thaliana] >gi|15215654|gb|AAK91372.1|
  misc_feature (126)..(184): Homolog of NCBI NO: 18404044 NR Description: transfactor, putative; protein id: At3g24120.1, by cDNA: 6626., supported by cDNA: gi_15215653, supported by gi_20334891 [Arabidopsis thaliana] >gi|15215654|gb|AAK91372.1|
  misc_feature (1)..(75): Homolog of NCBI NO: 14596181 NR Description: transfactor-like protein [Arabidopsis thaliana]
MTRDPKPRLRWTADLHDRFVDAVAKLGGADKATPKSVLKLMGLKGLTLYHLKSHLQKYRLGQQQGKKQNRTEQNKENAGSSYVHFDNCSQGGISNDSRFDNHQRYIIYEFAFSRHNGFVKLEFDIMLMNTRRQSGNVPFAEAMRHQVDAQQRFQEQLEVQKKLQMRMEAQGKYLLTLLEKAQKSLPCGNAGETDKGQFSDFNLALSGLVGSDRKNEKAGLVTDISHLNGGDSSQEFRLCGEQEKIETGDACVKPESGFVHFDLNSKSGYDLLNCGKYGIEVKPNVIGDRLQ

SEQ ID NO: 72854 - DNA, 891 bp, Arabidopsis thaliana
  misc_feature (1)..(891): Ceres Seq. ID no. 4950275
  misc_feature: MA Experiment ID: 20000451 Result: Down-regulated in Transcription
  misc_feature: MA Experiment 20000451 PARAMETER Experiment Name: At_CS6879_Shoots-Roots_P Parameter: Age (day) Value: 14
  misc_feature: MA Experiment 20000451 PARAMETER Experiment Name: At_CS6879_Shoots-Roots_P Parameter: Organism Value: A. thaliana
  misc_feature: MA Experiment 20000451 PARAMETER Experiment Name: At_CS6879_Shoots-Roots_P Parameter: Plant Line Value: CS6879 vs. WS
  misc_feature: MA Experiment 20000451 PARAMETER Experiment Name: At_CS6879_Shoots-Roots_P Parameter: Tissue Value: Roots
  misc_feature: MA Experiment ID: 20000452 Result: Down-regulated in Transcription
  misc_feature: MA Experiment 20000452 PARAMETER Experiment Name: At_CS6879_Shoots-Roots_P Parameter: Age (day) Value: 14
  misc_feature: MA Experiment 20000452 PARAMETER Experiment Name: At_CS6879_Shoots-Roots_P Parameter: Organism Value: A. thaliana
  misc_feature: MA Experiment 20000452 PARAMETER Experiment Name: At_CS6879_Shoots-Roots_P Parameter: Plant Line Value: CS6879 vs. WS
  misc_feature: MA Experiment 20000452 PARAMETER Experiment Name: At_CS6879_Shoots-Roots_P Parameter: Tissue Value: Shoots
  misc_feature: MA Experiment ID: 20000495 Result: Up-regulated in Transcription
  misc_feature: MA Experiment 20000495 PARAMETER Experiment Name: At_Guard_Cells_P Parameter: Harvest Date Value: 8/2/2002
  misc_feature: MA Experiment 20000495 PARAMETER Experiment Name: At_Guard_Cells_P Parameter: Organism Value: A. thaliana
  misc_feature: MA Experiment 20000495 PARAMETER Experiment Name: At_Guard_Cells_P Parameter: Tissue Value: Guard Cells vs. Leaves
  misc_feature: MA Experiment ID: 20001451 Result: Up-regulated in Transcription
  misc_feature: MA Experiment 20001451 PARAMETER Experiment Name: At_Far-red-induction_P Parameter: Age (day) Value: 7
  misc_feature: MA Experiment 20001451 PARAMETER Experiment Name: At_Far-red-induction_P Parameter: Light Value: Far-red vs. White
  misc_feature: MA Experiment 20001451 PARAMETER Experiment Name: At_Far-red-induction_P Parameter: Organism Value: A. thaliana
  misc_feature: MA Experiment 20001451 PARAMETER Experiment Name: At_Far-red-induction_P Parameter: Plant Line Value: Columbia
  misc_feature: MA Experiment 20001451 PARAMETER Experiment Name: At_Far-red-induction_P Parameter: Timepoint (hr) Value: 24
  misc_feature: MA Experiment 20001451 PARAMETER Experiment Name: At_Far-red-induction_P Parameter: Tissue Value: Whole Plant
  misc_feature: Pfam Name: PIG-X Pfam Description: PIG-X / PBN1
atgggcttctttcgtgctgcaactcatccagatgatctccggcgacgagtaccttcgccggcaataatggttggaacaaattatagagattctcatgaatttttcgattccgatacaatctgtatctctgatcaatacattatggagtcttatttcactacatacacttccttagacgactcagagtttcgaaacttcttgcttcttcaacaatgttctgacaaagttcctactcaagattcaaacattgttcctgcaacttcatttatacaacatagaaacattactggtgaaggttcacatcgtaatctcatcacatccatcaagcttcttcttcatcactcagagtctcagtttcgtgagctcgtgatcgttgaacggttgcctttgggtgtttttgctgatccttttgagcttcagagtcttcaacaacgcagagctttcagtgacgtatctgtgtttggtgacacaaatcttgagctgccttcgtttagatcgaacagatccgtcgttgagattcatgttgaaatcagctctagaaattatgaaaatggtgaaataagctttaagcttcctttacatgctcggtatcagcctctggacgacagtggatactctagagtggagtttggcgagccagacttgttcttgtgctcgagccatgtacaaaaccagcgacgtgaacggaggagatgtttggttttgtcgattggcagatcgaagactgaaaccaggtctgttttctgggatatccctgccggaatcaggggtcatacagagtatgtttccgccttgacattcgccgctgcggttttttctgcattttcaatactcgtggcatcggttttgagctcaaagggtgaatcttgtaaaaacttgaagcagtcatga

SEQ ID NO: 72855 - protein, 296 aa, Arabidopsis thaliana
  peptide (1)..(296): Ceres Seq. ID no. 4950276
  misc_feature: Pfam Name: PIG-X Pfam Description: PIG-X / PBN1
  misc_feature (1)..(296): Homolog of NCBI NO: 15237961 NR Description: unknown protein; protein id: At5g46850.1 thaliana] >gi|8809668|dbj|BAA97219.1| gene_id:MSD23.3~unknown
  misc_feature (87)..(280): Homolog of NCBI NO: 23680885 NR Description: hypothetical protein FLJ20522 [Homo sapiens]
  misc_feature (80)..(280): Homolog of NCBI NO: 34869402 NR Description: similar to hypothetical protein FLJ20522 [Rattus
  misc_feature (87)..(231): Homolog of NCBI NO: 7020686 NR Description: unnamed protein product [Homo sapiens]
MGFFRAATHPDDLRRRVPSPAIMVGTNYRDSHEFFDSDTICISDQYIMESYFTTYTSLDDSEFRNFLLLQQCSDKVPTQDSNIVPATSFIQHRNITGEGSHRNLITSIKLLLHHSESQFRELVIVERLPLGVFADPFELQSLQQRRAFSDVSVFGDTNLELPSFRSNRSVVEIHVEISSRNYENGEISFKLPLHARYQPLDDSGYSRVEFGEPDLFLCSSHVQNQRRERRRCLVLSIGRSKTETRSVFWDIPAGIRGHTEYVSALTFAAAVFSAFSILVASVLSSKGESCKNLKQS

SEQ ID NO: 72856 - protein, 274 aa, Arabidopsis thaliana
  peptide (1)..(274): Ceres Seq. ID no. 4950277
  misc_feature: Pfam Name: PIG-X Pfam Description: PIG-X / PBN1
  misc_feature (1)..(274): Homolog of NCBI NO: 15237961 NR Description: unknown protein; protein id: At5g46850.1 thaliana] >gi|8809668|dbj|BAA97219.1| gene_id:MSD23.3~unknown
  misc_feature (65)..(258): Homolog of NCBI NO: 23680885 NR Description: hypothetical protein FLJ20522 [Homo sapiens]
  misc_feature (58)..(258): Homolog of NCBI NO: 34869402 NR Description: similar to hypothetical protein FLJ20522 [Rattus
  misc_feature (65)..(209): Homolog of NCBI NO: 7020686 NR Description: unnamed protein product [Homo sapiens]
MVGTNYRDSHEFFDSDTICISDQYIMESYFTTYTSLDDSEFRNFLLLQQCSDKVPTQDSNIVPATSFIQHRNITGEGSHRNLITSIKLLLHHSESQFRELVIVERLPLGVFADPFELQSLQQRRAFSDVSVFGDTNLELPSFRSNRSVVEIHVEISSRNYENGEISFKLPLHARYQPLDDSGYSRVEFGEPDLFLCSSHVQNQRRERRRCLVLSIGRSKTETRSVFWDIPAGIRGHTEYVSALTFAAAVFSAFSILVASVLSSKGESCKNLKQS

SEQ ID NO: 72857 - protein, 249 aa, Arabidopsis thaliana
  peptide (1)..(249): Ceres Seq. ID no. 4950278
  misc_feature: Pfam Name: PIG-X Pfam Description: PIG-X / PBN1
  misc_feature (1)..(249): Homolog of NCBI NO: 15237961 NR Description: unknown protein; protein id: At5g46850.1 thaliana] >gi|8809668|dbj|BAA97219.1| gene_id:MSD23.3~unknown
  misc_feature (40)..(233): Homolog of NCBI NO: 23680885 NR Description: hypothetical protein FLJ20522 [Homo sapiens]
  misc_feature (33)..(233): Homolog of NCBI NO: 34869402 NR Description: similar to hypothetical protein FLJ20522 [Rattus
  misc_feature (40)..(184): Homolog of NCBI NO: 7020686 NR Description: unnamed protein product [Homo sapiens]
MESYFTTYTSLDDSEFRNFLLLQQCSDKVPTQDSNIVPATSFIQHRNITGEGSHRNLITSIKLLLHHSESQFRELVIVERLPLGVFADPFELQSLQQRRAFSDVSVFGDTNLELPSFRSNRSVVEIHVEISSRNYENGEISFKLPLHARYQPLDDSGYSRVEFGEPDLFLCSSHVQNQRRERRRCLVLSIGRSKTETRSVFWDIPAGIRGHTEYVSALTFAAAVFSAFSILVASVLSSKGESCKNLKQS

SEQ ID NO: 72858 - DNA, 1161 bp, Arabidopsis thaliana
  misc_feature (1)..(1161): Ceres Seq. ID no. 4950305
  misc_feature: MA Experiment ID: 20000179 Result: Up-regulated in Transcription
  misc_feature: MA Experiment 20000179 PARAMETER Experiment Name: At_Germinating_Seeds_P Parameter: Age (hr) Value: 6 vs. 0
  misc_feature: MA Experiment 20000179 PARAMETER Experiment Name: At_Germinating_Seeds_P Parameter: Tissue Value: Germinating Seeds
  misc_feature: MA Experiment ID: 20000438 Result: Up-regulated in Transcription
  misc_feature: MA Experiment 20000438 PARAMETER Experiment Name: At_Shoots__P Parameter: Age (day) Value: 14
  misc_feature: MA Experiment 20000438 PARAMETER Experiment Name: At_Shoots__P Parameter: Tissue Value: Shoots vs. Whole Plant
  misc_feature: Pfam Name: DUF296 Pfam Description: Domain of unknown function (DUF296)
atggattccagagacatcccaccgtcacataaccagcttcaaccaccaccgggaatgttaatgtctcattaccgtaaccctaacgccgccgcttcaccattaatggttcccacttccacatctcaaccgattcaacaccctcgtcttccttttggcaatcaacaacaatctcaaacgtttcatcagcagcaacaacaacaaatggatcagaagactcttgaatctcttggatttggtgatggatcaccttcttctcaaccgatgcgattcgggatcgatgatcagaatcagcaactgcaagtgaagaagaagcgaggaaggccgagaaagtatactcctgatggtagcattgctttaggtttagctcctacgtctcctcttctctctgcagcttctaattcttacggtgagggtggtgttggagatagtggtggaaatggaaactctgttgatccacctgttaaacgtaacagaggaaggcctcctggttctagtaagaaacagcttgatgctttaggaggaacttcaggagttgggtttacacctcatgtcattgaagtgaacacaggagaggacatagcgtcaaaggtgatggctttttcggatcaagggtcaagaacaatttgtattctctctgcaagtggtgcagtttctagagtgatgcttcgtcaagcttctcattctagtggaatcgttacttatgagggacgatttgagatcattactctctcaggctcagtcttgaattatgaggtaaatggttccaccaacagaagtggtaacttgagtgtggctttggctggacctgatggcggcatcgtaggtggcagtgtagttggtaatctagtagctgcaacacaagtccaggtgatagtgggaagctttgttgcagaagcaaagaaaccgaaacaaagtagtgttaacattgctcgggggcagaatcctgaaccggcttcagcgccggctaacatgttgaactttggatcagtctctcaaggaccatcgagcgagtcatcagaagagaatgagagcggttctcctgcaatgcaccgtgacaataataatgggatatatggagctcaacaacaacaacaacaacaacctcttcatcctcatcagatgcaaatgtaccaacatctttggtctaatcatggtcaataa

SEQ ID NO: 72859 - protein, 386 aa, Arabidopsis thaliana
  peptide (1)..(386): Ceres Seq. ID no. 4950306
  misc_feature: Pfam Name: DUF296 Pfam Description: Domain of unknown function (DUF296)
  misc_feature (1)..(386): Homolog of NCBI NO: 15237481 NR Description: putative protein; protein id: At5g46640.1
  misc_feature (10)..(381): Homolog of NCBI NO: 18414996 NR Description: putative protein; protein id: At4g17950.1, by cDNA: gi_15451059, supported by cDNA: gi_20148332 [Arabidopsis >gi|15451060|gb|AAK96801.1| putative protein [Arabidopsis
  misc_feature (10)..(381): Homolog of NCBI NO: 25456045 NR Description: probable DNA-binding protein AT-hook 2 [imported]
  misc_feature (12)..(346): Homolog of NCBI NO: 7487767 NR Description: hypothetical protein T6K21.130 - Arabidopsis >gi|2894604|emb|CAA17138.1| putative protein [Arabidopsis >gi|7268547|emb|CAB78797.1| putative protein [Arabidopsis
  misc_feature (7)..(377): Homolog of NCBI NO: 37537056 NR Description: putative AT-Hook DNA-binding protein [Oryza
  misc_feature (1)..(386): Homolog of NCBI NO: 38346715 NR Description: OSJNBa0086O06.13 [Oryza sativa (japonica
  misc_feature (1)..(347): Homolog of NCBI NO: 32352210 NR Description: hypothetical protein [Oryza sativa (japonica
  misc_feature (39)..(358): Homolog of NCBI NO: 2598227 NR Description: AT-hook protein 1 [Arabidopsis thaliana]
  misc_feature (39)..(358): Homolog of NCBI NO: 18403332 NR Description: AT-hook DNA-binding protein (AHP1); protein id: supported by cDNA: gi_14326503, supported by cDNA: gi_19548036 thaliana] >gi|19548037|gb|AAL87382.1| At2g33620/F4P9.39
  misc_feature (39)..(358): Homolog of NCBI NO: 14326504 NR Description: At2g33620/F4P9.39 [Arabidopsis thaliana]
MDSRDIPPSHNQLQPPPGMLMSHYRNPNAAASPLMVPTSTSQPIQHPRLPFGNQQQSQTFHQQQQQQMDQKTLESLGFGDGSPSSQPMRFGIDDQNQQLQVKKKRGRPRKYTPDGSIALGLAPTSPLLSAASNSYGEGGVGDSGGNGNSVDPPVKRNRGRPPGSSKKQLDALGGTSGVGFTPHVIEVNTGEDIASKVMAFSDQGSRTICILSASGAVSRVMLRQASHSSGIVTYEGRFEIITLSGSVLNYEVNGSTNRSGNLSVALAGPDGGIVGGSVVGNLVAATQVQVIVGSFVAEAKKPKQSSVNIARGQNPEPASAPANMLNFGSVSQGPSSESSEENESGSPAMHRDNNNGIYGAQQQQQQQPLHPHQMQMYQHLWSNHGQ

SEQ ID NO: 72860 - protein, 368 aa, Arabidopsis thaliana
  peptide (1)..(368): Ceres Seq. ID no. 4950307
  misc_feature: Pfam Name: DUF296 Pfam Description: Domain of unknown function (DUF296)
  misc_feature (1)..(368): Homolog of NCBI NO: 15237481 NR Description: putative protein; protein id: At5g46640.1
  misc_feature (1)..(363): Homolog of NCBI NO: 18414996 NR Description: putative protein; protein id: At4g17950.1, by cDNA: gi_15451059, supported by cDNA: gi_20148332 [Arabidopsis >gi|15451060|gb|AAK96801.1| putative protein [Arabidopsis
  misc_feature (1)..(363): Homolog of NCBI NO: 25456045 NR Description: probable DNA-binding protein AT-hook 2 [imported]
  misc_feature (1)..(328): Homolog of NCBI NO: 7487767 NR Description: hypothetical protein T6K21.130 - Arabidopsis >gi|2894604|emb|CAA17138.1| putative protein [Arabidopsis >gi|7268547|emb|CAB78797.1| putative protein [Arabidopsis
  misc_feature (1)..(359): Homolog of NCBI NO: 37537056 NR Description: putative AT-Hook DNA-binding protein [Oryza
  misc_feature (1)..(368): Homolog of NCBI NO: 38346715 NR Description: OSJNBa0086O06.13 [Oryza sativa (japonica
  misc_feature (1)..(329): Homolog of NCBI NO: 32352210 NR Description: hypothetical protein [Oryza sativa (japonica
  misc_feature (21)..(340): Homolog of NCBI NO: 2598227 NR Description: AT-hook protein 1 [Arabidopsis thaliana]
  misc_feature (21)..(340): Homolog of NCBI NO: 18403332 NR Description: AT-hook DNA-binding protein (AHP1); protein id: supported by cDNA: gi_14326503, supported by cDNA: gi_19548036 thaliana] >gi|19548037|gb|AAL87382.1| At2g33620/F4P9.39
  misc_feature (21)..(340): Homolog of NCBI NO: 14326504 NR Description: At2g33620/F4P9.39 [Arabidopsis thaliana]
MLMSHYRNPNAAASPLMVPTSTSQPIQHPRLPFGNQQQSQTFHQQQQQQMDQKTLESLGFGDGSPSSQPMRFGIDDQNQQLQVKKKRGRPRKYTPDGSIALGLAPTSPLLSAASNSYGEGGVGDSGGNGNSVDPPVKRNRGRPPGSSKKQLDALGGTSGVGFTPHVIEVNTGEDIASKVMAFSDQGSRTICILSASGAVSRVMLRQASHSSGIVTYEGRFEIITLSGSVLNYEVNGSTNRSGNLSVALAGPDGGIVGGSVVGNLVAATQVQVIVGSFVAEAKKPKQSSVNIARGQNPEPASAPANMLNFGSVSQGPSSESSEENESGSPAMHRDNNNGIYGAQQQQQQQPLHPHQMQMYQHLWSNHGQ

SEQ ID NO: 72861 - protein, 366 aa, Arabidopsis thaliana
  peptide (1)..(366): Ceres Seq. ID no. 4950308
  misc_feature: Pfam Name: DUF296 Pfam Description: Domain of unknown function (DUF296)
  misc_feature (1)..(366): Homolog of NCBI NO: 15237481 NR Description: putative protein; protein id: At5g46640.1
  misc_feature (1)..(361): Homolog of NCBI NO: 18414996 NR Description: putative protein; protein id: At4g17950.1, by cDNA: gi_15451059, supported by cDNA: gi_20148332 [Arabidopsis >gi|15451060|gb|AAK96801.1| putative protein [Arabidopsis
  misc_feature (1)..(361): Homolog of NCBI NO: 25456045 NR Description: probable DNA-binding protein AT-hook 2 [imported]
  misc_feature (1)..(326): Homolog of NCBI NO: 7487767 NR Description: hypothetical protein T6K21.130 - Arabidopsis >gi|2894604|emb|CAA17138.1| putative protein [Arabidopsis >gi|7268547|emb|CAB78797.1| putative protein [Arabidopsis
  misc_feature (1)..(357): Homolog of NCBI NO: 37537056 NR Description: putative AT-Hook DNA-binding protein [Oryza
  misc_feature (1)..(366): Homolog of NCBI NO: 38346715 NR Description: OSJNBa0086O06.13 [Oryza sativa (japonica
  misc_feature (1)..(327): Homolog of NCBI NO: 32352210 NR Description: hypothetical protein [Oryza sativa (japonica
  misc_feature (19)..(338): Homolog of NCBI NO: 2598227 NR Description: AT-hook protein 1 [Arabidopsis thaliana]
  misc_feature (19)..(338): Homolog of NCBI NO: 18403332 NR Description: AT-hook DNA-binding protein (AHP1); protein id: supported by cDNA: gi_14326503, supported by cDNA: gi_19548036 thaliana] >gi|19548037|gb|AAL87382.1| At2g33620/F4P9.39
  misc_feature (19)..(338): Homolog of NCBI NO: 14326504 NR Description: At2g33620/F4P9.39 [Arabidopsis thaliana]
MSHYRNPNAAASPLMVPTSTSQPIQHPRLPFGNQQQSQTFHQQQQQQMDQKTLESLGFGDGSPSSQPMRFGIDDQNQQLQVKKKRGRPRKYTPDGSIALGLAPTSPLLSAASNSYGEGGVGDSGGNGNSVDPPVKRNRGRPPGSSKKQLDALGGTSGVGFTPHVIEVNTGEDIASKVMAFSDQGSRTICILSASGAVSRVMLRQASHSSGIVTYEGRFEIITLSGSVLNYEVNGSTNRSGNLSVALAGPDGGIVGGSVVGNLVAATQVQVIVGSFVAEAKKPKQSSVNIARGQNPEPASAPANMLNFGSVSQGPSSESSEENESGSPAMHRDNNNGIYGAQQQQQQQPLHPHQMQMYQHLWSNHGQ

SEQ ID NO: 72862 - DNA, 1059 bp, Arabidopsis thaliana
  misc_feature (1)..(1059): Ceres Seq. ID no. 4950335
  misc_feature: MA Experiment ID: 20000355 Result: Up-regulated in Transcription
  misc_feature: MA Experiment 20000355 PARAMETER Experiment Name: At_Siliques_Sub_P Parameter: Age (day) Value: 21
  misc_feature: MA Experiment 20000355 PARAMETER Experiment Name: At_Siliques_Sub_P Parameter: Organism Value: A. thaliana
  misc_feature: MA Experiment 20000355 PARAMETER Experiment Name: At_Siliques_Sub_P Parameter: Plant Line Value: WS
  misc_feature: MA Experiment 20000355 PARAMETER Experiment Name: At_Siliques_Sub_P Parameter: Tissue Value: Less Than 5mm Siliques vs. Whole Plant
atgccaaccgccagatatccaatggaaaggcctcaagaacctgagtacgaatgcgttgatatctacaaacaaccttcgctacaacaccctaaactccaaaatcaccaaatccaaatgagaccgagcgacgaagttctagccatgctatcaggagatacatcagcaaacgatgaaatggttgctgagtttgatataccagaagaaggatgtcctcaaggacaagtaccaatccataaaccaagaaatctcaaccacaccgagaaacctttaagcctattaatggatatggaactgttggctgcagtaatgaagaaaatcgatgccaccccatggcgtggagcatctgcatggtttagtatttaccaacctaaattgacaaataaagaccaatttagcatgagttttatgtggctcaatactgagtataatggcgaacgcaccaatgcccagtttggttgggctgtgattcctgcattatatggcgatgaccgtacaagacttacggcatactggagtccggataaaatcgaaaacggatgttacaatatacaatgtaaaggcttcgttcaaactgaccatagagtcgctcttggtaccggtttttcgaacacctctgtggtgggaggcaaccaatataaagctttctttgcaatcagtcaggatccaaaaacaaagaatttgtggctgacagtccagaagattaacatagggtattggccagaggaacttctaccttttttcaatgatggagcggagtcagttatatatggtggattcacgaatgctccatctgataacattcaactctttgaaatagttagcccacctatgggtaacgggaacaaaccgctggatgaggaagtggatctaaaacatacttgttatatgcactctcttaagtatgtgacaccagattacaagagtgtcgatgttgattccaacaaggtcgccgaagttgcggacgcaggtatatgttacgacgcgatttattttgataaacttgggcggtatggacaaacgtttaccttcggtggaccaggtggttattgtgatgtttga

SEQ ID NO: 72863 - protein, 352 aa, Arabidopsis thaliana
  peptide (1)..(352): Ceres Seq. ID no. 4950336
  misc_feature (111)..(310): Pfam Name: Arabidopsis proteins of unknown function Pfam Description: Arabidopsis proteins of unknown function
  misc_feature (1)..(352): Homolog of NCBI NO: 15237511 NR Description: putative protein; protein id: At5g46820.1
  misc_feature (10)..(352): Homolog of NCBI NO: 15237510 NR Description: putative protein; protein id: At5g46810.1
  misc_feature (72)..(350): Homolog of NCBI NO: 15237394 NR Description: putative protein; protein id: At5g46200.1
  misc_feature (12)..(86): Homolog of NCBI NO: 15237394 NR Description: putative protein; protein id: At5g46200.1
  misc_feature (159)..(352): Homolog of NCBI NO: 15236686 NR Description: putative protein; protein id: At4g17860.1
  misc_feature (12)..(119): Homolog of NCBI NO: 15236686 NR Description: putative protein; protein id: At4g17860.1
  misc_feature (15)..(350): Homolog of NCBI NO: 15226935 NR Description: hypothetical protein; protein id: At2g35250.1
  misc_feature (15)..(352): Homolog of NCBI NO: 30687450 NR Description: expressed protein [Arabidopsis thaliana]
  misc_feature (70)..(347): Homolog of NCBI NO: 15236547 NR Description: putative protein; protein id: At4g17505.1
  misc_feature (16)..(42): Homolog of NCBI NO: 15236547 NR Description: putative protein; protein id: At4g17505.1
MPTARYPMERPQEPEYECVDIYKQPSLQHPKLQNHQIQMRPSDEVLAMLSGDTSANDEMVAEFDIPEEGCPQGQVPIHKPRNLNHTEKPLSLLMDMELLAAVMKKIDATPWRGASAWFSIYQPKLTNKDQFSMSFMWLNTEYNGERTNAQFGWAVIPALYGDDRTRLTAYWSPDKIENGCYNIQCKGFVQTDHRVALGTGFSNTSVVGGNQYKAFFAISQDPKTKNLWLTVQKINIGYWPEELLPFFNDGAESVIYGGFTNAPSDNIQLFEIVSPPMGNGNKPLDEEVDLKHTCYMHSLKYVTPDYKSVDVDSNKVAEVADAGICYDAIYFDKLGRYGQTFTFGGPGGYCDV

SEQ ID NO: 72864 - protein, 345 aa, Arabidopsis thaliana
  peptide (1)..(345): Ceres Seq. ID no. 4950337
  misc_feature (104)..(303): Pfam Name: Arabidopsis proteins of unknown function Pfam Description: Arabidopsis proteins of unknown function
  misc_feature (1)..(345): Homolog of NCBI NO: 15237511 NR Description: putative protein; protein id: At5g46820.1
  misc_feature (3)..(345): Homolog of NCBI NO: 15237510 NR Description: putative protein; protein id: At5g46810.1
  misc_feature (65)..(343): Homolog of NCBI NO: 15237394 NR Description: putative protein; protein id: At5g46200.1
  misc_feature (5)..(79): Homolog of NCBI NO: 15237394 NR Description: putative protein; protein id: At5g46200.1
  misc_feature (152)..(345): Homolog of NCBI NO: 15236686 NR Description: putative protein; protein id: At4g17860.1
  misc_feature (5)..(112): Homolog of NCBI NO: 15236686 NR Description: putative protein; protein id: At4g17860.1
  misc_feature (8)..(343): Homolog of NCBI NO: 15226935 NR Description: hypothetical protein; protein id: At2g35250.1
  misc_feature (8)..(345): Homolog of NCBI NO: 30687450 NR Description: expressed protein [Arabidopsis thaliana]
  misc_feature (63)..(340): Homolog of NCBI NO: 15236547 NR Description: putative protein; protein id: At4g17505.1
  misc_feature (9)..(35): Homolog of NCBI NO: 15236547 NR Description: putative protein; protein id: At4g17505.1
MERPQEPEYECVDIYKQPSLQHPKLQNHQIQMRPSDEVLAMLSGDTSANDEMVAEFDIPEEGCPQGQVPIHKPRNLNHTEKPLSLLMDMELLAAVMKKIDATPWRGASAWFSIYQPKLTNKDQFSMSFMWLNTEYNGERTNAQFGWAVIPALYGDDRTRLTAYWSPDKIENGCYNIQCKGFVQTDHRVALGTGFSNTSVVGGNQYKAFFAISQDPKTKNLWLTVQKINIGYWPEELLPFFNDGAESVIYGGFTNAPSDNIQLFEIVSPPMGNGNKPLDEEVDLKHTCYMHSLKYVTPDYKSVDVDSNKVAEVADAGICYDAIYFDKLGRYGQTFTFGGPGGYCDV

SEQ ID NO: 72865 - protein, 314 aa, Arabidopsis thaliana
  peptide (1)..(314): Ceres Seq. ID no. 4950338
  misc_feature (73)..(272): Pfam Name: Arabidopsis proteins of unknown function Pfam Description: Arabidopsis proteins of unknown function
  misc_feature (1)..(314): Homolog of NCBI NO: 15237511 NR Description: putative protein; protein id: At5g46820.1
  misc_feature (1)..(314): Homolog of NCBI NO: 15237510 NR Description: putative protein; protein id: At5g46810.1
  misc_feature (34)..(312): Homolog of NCBI NO: 15237394 NR Description: putative protein; protein id: At5g46200.1
  misc_feature (1)..(48): Homolog of NCBI NO: 15237394 NR Description: putative protein; protein id: At5g46200.1
  misc_feature (121)..(314): Homolog of NCBI NO: 15236686 NR Description: putative protein; protein id: At4g17860.1
  misc_feature (1)..(81): Homolog of NCBI NO: 15236686 NR Description: putative protein; protein id: At4g17860.1
  misc_feature (1)..(312): Homolog of NCBI NO: 15226935 NR Description: hypothetical protein; protein id: At2g35250.1
  misc_feature (1)..(314): Homolog of NCBI NO: 30687450 NR Description: expressed protein [Arabidopsis thaliana]
  misc_feature (32)..(309): Homolog of NCBI NO: 15236547 NR Description: putative protein; protein id: At4g17505.1
  misc_feature (75)..(309): Homolog of NCBI NO: 15238835 NR Description: putative protein; protein id: At5g18460.1, by cDNA: 119256. [Arabidopsis thaliana]
MRPSDEVLAMLSGDTSANDEMVAEFDIPEEGCPQGQVPIHKPRNLNHTEKPLSLLMDMELLAAVMKKIDATPWRGASAWFSIYQPKLTNKDQFSMSFMWLNTEYNGERTNAQFGWAVIPALYGDDRTRLTAYWSPDKIENGCYNIQCKGFVQTDHRVALGTGFSNTSVVGGNQYKAFFAISQDPKTKNLWLTVQKINIGYWPEELLPFFNDGAESVIYGGFTNAPSDNIQLFEIVSPPMGNGNKPLDEEVDLKHTCYMHSLKYVTPDYKSVDVDSNKVAEVADAGICYDAIYFDKLGRYGQTFTFGGPGGYCDV

SEQ ID NO: 72866 - DNA, 1065 bp, Arabidopsis thaliana
  misc_feature (1)..(1065): Ceres Seq. ID no. 4950339
  misc_feature: MA Experiment ID: 20000355 Result: Up-regulated in Transcription
  misc_feature: MA Experiment 20000355 PARAMETER Experiment Name: At_Siliques_Sub_P Parameter: Age (day) Value: 21
  misc_feature: MA Experiment 20000355 PARAMETER Experiment Name: At_Siliques_Sub_P Parameter: Organism Value: A. thaliana
  misc_feature: MA Experiment 20000355 PARAMETER Experiment Name: At_Siliques_Sub_P Parameter: Plant Line Value: WS
  misc_feature: MA Experiment 20000355 PARAMETER Experiment Name: At_Siliques_Sub_P Parameter: Tissue Value: Less Than 5mm Siliques vs. Whole Plant
atggggtcaaagcctcaagaacctgaatacgaatgcgttgatatctacaaacaaccttcgctacaacaccctaaactccaaaatcaccgaatccaaatgagaccgagcgatgaagccttagccatgctctcaggagatacatcatcagaaaacttatcaaacgatgaaatggttgctgagtttgatataccagaagaaggatgtcctcaaggacaagtaccaatccataaaccaagaaataatttcaaccacaccgagaaacattttcagcctattaatggatttggaactgttggtcaacatgctgcggtaatgaagaaaatcgatgccaccccgtggcgtggagcatcagcatggataagtatttaccaacctaaattgacaaataaagagcaattcagcatggctttcatttggctcaatactgagtatgaaggcgaacgcaccagtgcccactttggttgggctgtgattcctgcactatatggcgatagccgtacacgacttactgcatactggagtcaagatacattcgaaagcggatgttacaatataaaatgtaagggtttcgttcaaattgataggagactctttcttggagccggttttgcgaacacctctgtggtgggaggccaaaattttaaagctttttttgcaatcaatcaggatccaaaaacaaacaatttgctgctgacagtggggaagatttacttagggtattggccagaggaacttctaccttttttcactgaaggagcggagtcagttatatatggtggattgacgaatgctccatctgatggcattcaaccctttaatatagttagcccaccgatgggtaacgggaacaaaccgctggatgaggaagttgatctaaagcatacttgttatatgcactctcttaaatatgtgacacaagattacaagagtgtcgatgttgataccaacaaggtcgccgaagttgcggacgcaggtatatgttacgacgcgatttattttgataaacttggggggtatggacaaacgtttaccttcggtggaccaggtggtcattgtgatgtgtga

SEQ ID NO: 72867 - protein, 354 aa, Arabidopsis thaliana
  peptide (1)..(354): Ceres Seq. ID no. 4950340
  misc_feature (113)..(312): Pfam Name: Arabidopsis proteins of unknown function Pfam Description: Arabidopsis proteins of unknown function
  misc_feature (1)..(354): Homolog of NCBI NO: 15237510 NR Description: putative protein; protein id: At5g46810.1
  misc_feature (4)..(354): Homolog of NCBI NO: 15237511 NR Description: putative protein; protein id: At5g46820.1
  misc_feature (88)..(352): Homolog of NCBI NO: 15237394 NR Description: putative protein; protein id: At5g46200.1
  misc_feature (3)..(107): Homolog of NCBI NO: 15237394 NR Description: putative protein; protein id: At5g46200.1
  misc_feature (68)..(354): Homolog of NCBI NO: 30687450 NR Description: expressed protein [Arabidopsis thaliana]
  misc_feature (9)..(98): Homolog of NCBI NO: 30687450 NR Description: expressed protein [Arabidopsis thaliana]
  misc_feature (65)..(352): Homolog of NCBI NO: 15226935 NR Description: hypothetical protein; protein id: At2g35250.1
  misc_feature (2)..(80): Homolog of NCBI NO: 15226935 NR Description: hypothetical protein; protein id: At2g35250.1
  misc_feature (161)..(354): Homolog of NCBI NO: 15236686 NR Description: putative protein; protein id: At4g17860.1
  misc_feature (6)..(121): Homolog of NCBI NO: 15236686 NR Description: putative protein; protein id: At4g17860.1
MGSKPQEPEYECVDIYKQPSLQHPKLQNHRIQMRPSDEALAMLSGDTSSENLSNDEMVAEFDIPEEGCPQGQVPIHKPRNNFNHTEKHFQPINGFGTVGQHAAVMKKIDATPWRGASAWISIYQPKLTNKEQFSMAFIWLNTEYEGERTSAHFGWAVIPALYGDSRTRLTAYWSQDTFESGCYNIKCKGFVQIDRRLFLGAGFANTSVVGGQNFKAFFAINQDPKTNNLLLTVGKIYLGYWPEELLPFFTEGAESVIYGGLTNAPSDGIQPFNIVSPPMGNGNKPLDEEVDLKHTCYMHSLKYVTQDYKSVDVDTNKVAEVADAGICYDAIYFDKLGGYGQTFTFGGPGGHCDV

SEQ ID NO: 72868 - protein, 322 aa, Arabidopsis thaliana
  peptide (1)..(322): Ceres Seq. ID no. 4950341
  misc_feature (81)..(280): Pfam Name: Arabidopsis proteins of unknown function Pfam Description: Arabidopsis proteins of unknown function
  misc_feature (1)..(322): Homolog of NCBI NO: 15237510 NR Description: putative protein; protein id: At5g46810.1
  misc_feature (1)..(322): Homolog of NCBI NO: 15237511 NR Description: putative protein; protein id: At5g46820.1
  misc_feature (56)..(320): Homolog of NCBI NO: 15237394 NR Description: putative protein; protein id: At5g46200.1
  misc_feature (1)..(75): Homolog of NCBI NO: 15237394 NR Description: putative protein; protein id: At5g46200.1
  misc_feature (36)..(322): Homolog of NCBI NO: 30687450 NR Description: expressed protein [Arabidopsis thaliana]
  misc_feature (1)..(66): Homolog of NCBI NO: 30687450 NR Description: expressed protein [Arabidopsis thaliana]
  misc_feature (33)..(320): Homolog of NCBI NO: 15226935 NR Description: hypothetical protein; protein id: At2g35250.1
  misc_feature (1)..(48): Homolog of NCBI NO: 15226935 NR Description: hypothetical protein; protein id: At2g35250.1
  misc_feature (129)..(322): Homolog of NCBI NO: 15236686 NR Description: putative protein; protein id: At4g17860.1
  misc_feature (1)..(89): Homolog of NCBI NO: 15236686 NR Description: putative protein; protein id: At4g17860.1
MRPSDEALAMLSGDTSSENLSNDEMVAEFDIPEEGCPQGQVPIHKPRNNFNHTEKHFQPINGFGTVGQHAAVMKKIDATPWRGASAWISIYQPKLTNKEQFSMAFIWLNTEYEGERTSAHFGWAVIPALYGDSRTRLTAYWSQDTFESGCYNIKCKGFVQIDRRLFLGAGFANTSVVGGQNFKAFFAINQDPKTNNLLLTVGKIYLGYWPEELLPFFTEGAESVIYGGLTNAPSDGIQPFNIVSPPMGNGNKPLDEEVDLKHTCYMHSLKYVTQDYKSVDVDTNKVAEVADAGICYDAIYFDKLGGYGQTFTFGGPGGHCDV

SEQ ID NO: 72869 - protein, 313 aa, Arabidopsis thaliana
  peptide (1)..(313): Ceres Seq. ID no. 4950342
  misc_feature (72)..(271): Pfam Name: Arabidopsis proteins of unknown function Pfam Description: Arabidopsis proteins of unknown function
  misc_feature (1)..(313): Homolog of NCBI NO: 15237510 NR Description: putative protein; protein id: At5g46810.1
  misc_feature (1)..(313): Homolog of NCBI NO: 15237511 NR Description: putative protein; protein id: At5g46820.1
  misc_feature (47)..(311): Homolog of NCBI NO: 15237394 NR Description: putative protein; protein id: At5g46200.1
  misc_feature (1)..(66): Homolog of NCBI NO: 15237394 NR Description: putative protein; protein id: At5g46200.1
  misc_feature (27)..(313): Homolog of NCBI NO: 30687450 NR Description: expressed protein [Arabidopsis thaliana]
  misc_feature (1)..(57): Homolog of NCBI NO: 30687450 NR Description: expressed protein [Arabidopsis thaliana]
  misc_feature (24)..(311): Homolog of NCBI NO: 15226935 NR Description: hypothetical protein; protein id: At2g35250.1
  misc_feature (1)..(39): Homolog of NCBI NO: 15226935 NR Description: hypothetical protein; protein id: At2g35250.1
  misc_feature (120)..(313): Homolog of NCBI NO: 15236686 NR Description: putative protein; protein id: At4g17860.1
  misc_feature (1)..(80): Homolog of NCBI NO: 15236686 NR Description: putative protein; protein id: At4g17860.1
MLSGDTSSENLSNDEMVAEFDIPEEGCPQGQVPIHKPRNNFNHTEKHFQPINGFGTVGQHAAVMKKIDATPWRGASAWISIYQPKLTNKEQFSMAFIWLNTEYEGERTSAHFGWAVIPALYGDSRTRLTAYWSQDTFESGCYNIKCKGFVQIDRRLFLGAGFANTSVVGGQNFKAFFAINQDPKTNNLLLTVGKIYLGYWPEELLPFFTEGAESVIYGGLTNAPSDGIQPFNIVSPPMGNGNKPLDEEVDLKHTCYMHSLKYVTQDYKSVDVDTNKVAEVADAGICYDAIYFDKLGGYGQTFTFGGPGGHCDV

SEQ ID NO: 72870 - DNA, 1444 bp, Arabidopsis thaliana
  misc_feature (1)..(1444): Ceres Seq. ID no. 4950454
  misc_feature: MA Experiment ID: 108434 Result: Down-regulated in Transcription
  misc_feature: MA Experiment 108434 PARAMETER Experiment Name: At_Root_Tips_cDNA_P Parameter: Tissue Value: Root Tips
  misc_feature: MA Experiment ID: 108463 Result: Up-regulated in Transcription
  misc_feature: MA Experiment 108463 PARAMETER Experiment Name: At_Germinating_Seeds_cDNA_P Parameter: Age (day) Value: 3 vs. 0
  misc_feature: MA Experiment 108463 PARAMETER Experiment Name: At_Germinating_Seeds_cDNA_P Parameter: Tissue Value: Germinating Seeds
  misc_feature: MA Experiment ID: 108464 Result: Up-regulated in Transcription
  misc_feature: MA Experiment 108464 PARAMETER Experiment Name: At_Germinating_Seeds_cDNA_P Parameter: Age (day) Value: 4 vs. 0
  misc_feature: MA Experiment 108464 PARAMETER Experiment Name: At_Germinating_Seeds_cDNA_P Parameter: Tissue Value: Germinating Seeds
  misc_feature: MA Experiment ID: 108579 Result: Down-regulated in Transcription
  misc_feature: MA Experiment 108579 PARAMETER Experiment Name: At_4deg_Cold_cDNA_P Parameter: Temperature (deg C) Value: 4 vs. 22
  misc_feature: MA Experiment 108579 PARAMETER Experiment Name: At_4deg_Cold_cDNA_P Parameter: Timepoint (hr) Value: 6
  misc_feature: MA Experiment 108579 PARAMETER Experiment Name: At_4deg_Cold_cDNA_P Parameter: Tissue Value: Aerial
  misc_feature: MA Experiment ID: 20000171 Result: Up-regulated in Transcription
  misc_feature: MA Experiment 20000171 PARAMETER Experiment Name: At_42deg_Heat_P Parameter: Age (day) Value: 14
  misc_feature: MA Experiment 20000171 PARAMETER Experiment Name: At_42deg_Heat_P Parameter: Organism Value: A. thaliana
  misc_feature: MA Experiment 20000171 PARAMETER Experiment Name: At_42deg_Heat_P Parameter: Plant Line Value: WS
  misc_feature: MA Experiment 20000171 PARAMETER Experiment Name: At_42deg_Heat_P Parameter: Temperature (deg C) Value: 42 vs. 22
  misc_feature: MA Experiment 20000171 PARAMETER Experiment Name: At_42deg_Heat_P Parameter: Timepoint (hr) Value: 1
  misc_feature: MA Experiment 20000171 PARAMETER Experiment Name: At_42deg_Heat_P Parameter: Tissue Value: Aerial
  misc_feature: MA Experiment ID: 20000179 Result: Up-regulated in Transcription
  misc_feature: MA Experiment 20000179 PARAMETER Experiment Name: At_Germinating_Seeds_P Parameter: Age (hr) Value: 6 vs. 0
  misc_feature: MA Experiment 20000179 PARAMETER Experiment Name: At_Germinating_Seeds_P Parameter: Tissue Value: Germinating Seeds
  misc_feature: MA Experiment ID: 20000495 Result: Up-regulated in Transcription
  misc_feature: MA Experiment 20000495 PARAMETER Experiment Name: At_Guard_Cells_P Parameter: Harvest Date Value: 8/2/2002
  misc_feature: MA Experiment 20000495 PARAMETER Experiment Name: At_Guard_Cells_P Parameter: Organism Value: A. thaliana
  misc_feature: MA Experiment 20000495 PARAMETER Experiment Name: At_Guard_Cells_P Parameter: Tissue Value: Guard Cells vs. Leaves
  misc_feature: MA Experiment ID: 20001450 Result: Up-regulated in Transcription
  misc_feature: MA Experiment 20001450 PARAMETER Experiment Name: At_Far-red-induction_P Parameter: Age (day) Value: 7
  misc_feature: MA Experiment 20001450 PARAMETER Experiment Name: At_Far-red-induction_P Parameter: Light Value: Far-red vs. White
  misc_feature: MA Experiment 20001450 PARAMETER Experiment Name: At_Far-red-induction_P Parameter: Organism Value: A. thaliana
  misc_feature: MA Experiment 20001450 PARAMETER Experiment Name: At_Far-red-induction_P Parameter: Plant Line Value: Columbia
  misc_feature: MA Experiment 20001450 PARAMETER Experiment Name: At_Far-red-induction_P Parameter: Timepoint (hr) Value: 8
  misc_feature: MA Experiment 20001450 PARAMETER Experiment Name: At_Far-red-induction_P Parameter: Tissue Value: Whole Plant
  misc_feature: MA Experiment ID: 20001451 Result: Up-regulated in Transcription
  misc_feature: MA Experiment 20001451 PARAMETER Experiment Name: At_Far-red-induction_P Parameter: Age (day) Value: 7
  misc_feature: MA Experiment 20001451 PARAMETER Experiment Name: At_Far-red-induction_P Parameter: Light Value: Far-red vs. White
  misc_feature: MA Experiment 20001451 PARAMETER Experiment Name: At_Far-red-induction_P Parameter: Organism Value: A. thaliana
  misc_feature: MA Experiment 20001451 PARAMETER Experiment Name: At_Far-red-induction_P Parameter: Plant Line Value: Columbia
  misc_feature: MA Experiment 20001451 PARAMETER Experiment Name: At_Far-red-induction_P Parameter: Timepoint (hr) Value: 24
  misc_feature: MA Experiment 20001451 PARAMETER Experiment Name: At_Far-red-induction_P Parameter: Tissue Value: Whole Plant
aatcttaacacaagcttgatcgtcctcatctgccaccaaaccaaagacataatttcttcggtgacttccatggctccgcctgtctctgatgattccctacagcctcgagatgtttgtgttgtgggagtggcgcgaacgcctataggggacttccttggctccctctcgtctttgactgctacaagacttgggtccatagccatccaagccgcacttaagagagcacatgttgatccggcccttgtggaagaggtcttctttggcaatgtcttaactgccaatcttgggcaagcaccagcaagacaggctgcacttggtgctgggattccctattctgtgatctgcaccactatcaacaaagtttgtgctgcaggaatgaaatctgtaatgctagcgtctcaaagtatccagctcggcttgaatgatattgttgttgctggtgggatggagagcatgtcaaacgtacctaagtacctcccggacgcaagaaggggttctcgattaggtcatgatactgttgttgatggtatgatgaaagatggactttgggatgtctataatgactttggaatgggagtttgtggagaaatatgcgctgaccagtaccgtattacaagagaagaacaggatgcttatgctatccagagctttgagcgtggtattgctgcgcaaaacactcagttgttcgcttgggaaattgttccggtcgaagtttccactggaagagggaggccttcagttgttattgacaaggatgaaggattggggaagtttgatgcagccaagttaaaaaagcttagaccaagtttcaaggaggatgggggatcagtcactgctggaaatgcatcaagcataagtgatggtgcggcagcgttagtgctagtgagtggagagaaggctcttgagcttggactgcatgttatcgctaagattagaggatacgctgatgctgctcaggcaccagagttattcacaaccacgccagctcttgctattcctaaagctataaagcgggctggtttggatgcatctcaagtggattattatgaaataaacgaagcattttctgtggtagctctagccaatcagaaactactgggattagatcctgaacggctcaatgcgcatggaggggctgtttcactgggacatccattgggctgtagcggtgctcgtatcttggtcacattattgggggtgttgagagcaaagaagggaaagtatggagtggcatcaatatgcaacggaggaggaggagcatcagcacttgtccttgagttcatgtcggagaagacaatcggatattcggcactctgaagctaagagctgttgttttataacgcaaagcttatgtatatggttcatgtgtgtgtcacaagactgtaactttgtacttgagagagatgcaataaaagtgtgttagaaaatgagcggtagatttccc

SEQ ID NO: 72871 - protein, 438 aa, Arabidopsis thaliana; identical to SEQ ID NO: 38066
  peptide (1)..(438): Ceres Seq. ID no. 4950455
  misc_feature (35)..(298): Pfam Name: Thiolase, N-terminal domain Pfam Description: Thiolase, N-terminal domain
  misc_feature (24)..(438): Homolog of NCBI NO: 15238793 NR Description: acetoacyl-CoA-thiolase; protein id: At5g47720.1,
  misc_feature (24)..(428): Homolog of NCBI NO: 30695277 NR Description: acetyl-CoA C-acetyltransferase
  misc_feature (24)..(438): Homolog of NCBI NO: 16417944 NR Description: acetyl Co-A acetyltransferase [Hevea brasiliensis]
  misc_feature (29)..(428): Homolog of NCBI NO: 8777413 NR Description: acetyl-CoA C-acetyltransferase [Arabidopsis
  misc_feature (29)..(428): Homolog of NCBI NO: 30695411 NR Description: acetyl-CoA C-acetyltransferase A thiolase), putative [Arabidopsis thaliana]
  misc_feature (37)..(428): Homolog of NCBI NO: 30695409 NR Description: acetyl-CoA C-acetyltransferase A thiolase), putative [Arabidopsis thaliana]
  misc_feature (24)..(438): Homolog of NCBI NO: 34894172 NR Description: putative acetoacyl-CoA-thiolase [Oryza sativa
  misc_feature (29)..(426): Homolog of NCBI NO: 7433657 NR Description: acetyl-CoA C-acetyltransferase (EC 2.3.1.9),
  misc_feature (37)..(426): Homolog of NCBI NO: 19113478 NR Description: acetyl-coa acetyltransferase (EC 2.3.1.9)
  misc_feature (37)..(426): Homolog of NCBI NO: 11257345 NR Description: probable acetyl-CoA C-acetyltransferase (EC - fission yeast (Schizosaccharomyces pombe)

SEQ ID NO: 72872 - protein, 415 aa, Arabidopsis thaliana; identical to SEQ ID NO: 38067
  peptide (1)..(415): Ceres Seq. ID no. 4950456
  misc_feature (12)..(275): Pfam Name: Thiolase, N-terminal domain Pfam Description: Thiolase, N-terminal domain
  misc_feature (1)..(415): Homolog of NCBI NO: 15238793 NR Description: acetoacyl-CoA-thiolase; protein id: At5g47720.1,
  misc_feature (1)..(405): Homolog of NCBI NO: 30695277 NR Description: acetyl-CoA C-acetyltransferase
  misc_feature (1)..(415): Homolog of NCBI NO: 16417944 NR Description: acetyl Co-A acetyltransferase [Hevea brasiliensis]
  misc_feature (6)..(405): Homolog of NCBI NO: 8777413 NR Description: acetyl-CoA C-acetyltransferase [Arabidopsis
  misc_feature (6)..(405): Homolog of NCBI NO: 30695411 NR Description: acetyl-CoA C-acetyltransferase A thiolase), putative [Arabidopsis thaliana]
  misc_feature (14)..(405): Homolog of NCBI NO: 30695409 NR Description: acetyl-CoA C-acetyltransferase A thiolase), putative [Arabidopsis thaliana]
  misc_feature (1)..(415): Homolog of NCBI NO: 34894172 NR Description: putative acetoacyl-CoA-thiolase [Oryza sativa
  misc_feature (6)..(403): Homolog of NCBI NO: 7433657 NR Description: acetyl-CoA C-acetyltransferase (EC 2.3.1.9),
  misc_feature (14)..(403): Homolog of NCBI NO: 19113478 NR Description: acetyl-coa acetyltransferase (EC 2.3.1.9)
  misc_feature (14)..(403): Homolog of NCBI NO: 11257345 NR Description: probable acetyl-CoA C-acetyltransferase (EC - fission yeast (Schizosaccharomyces pombe)

SEQ ID NO: 72873 - protein, 313 aa, Arabidopsis thaliana; identical to SEQ ID NO: 38068
  peptide (1)..(313): Ceres Seq. ID no. 4950457
  misc_feature (1)..(173): Pfam Name: Thiolase, N-terminal domain Pfam Description: Thiolase, N-terminal domain
  misc_feature (1)..(313): Homolog of NCBI NO: 15238793 NR Description: acetoacyl-CoA-thiolase; protein id: At5g47720.1,
  misc_feature (1)..(303): Homolog of NCBI NO: 30695277 NR Description: acetyl-CoA C-acetyltransferase
  misc_feature (1)..(313): Homolog of NCBI NO: 16417944 NR Description: acetyl Co-A acetyltransferase [Hevea brasiliensis]
  misc_feature (1)..(303): Homolog of NCBI NO: 8777413 NR Description: acetyl-CoA C-acetyltransferase [Arabidopsis
  misc_feature (1)..(303): Homolog of NCBI NO: 30695411 NR Description: acetyl-CoA C-acetyltransferase A thiolase), putative [Arabidopsis thaliana]
  misc_feature (1)..(303): Homolog of NCBI NO: 30695409 NR Description: acetyl-CoA C-acetyltransferase A thiolase), putative [Arabidopsis thaliana]
  misc_feature (1)..(313): Homolog of NCBI NO: 34894172 NR Description: putative acetoacyl-CoA-thiolase [Oryza sativa
  misc_feature (1)..(301): Homolog of NCBI NO: 7433657 NR Description: acetyl-CoA C-acetyltransferase (EC 2.3.1.9),
  misc_feature (1)..(301): Homolog of NCBI NO: 19113478 NR Description: acetyl-coa acetyltransferase (EC 2.3.1.9)
  misc_feature (1)..(301): Homolog of NCBI NO: 11257345 NR Description: probable acetyl-CoA C-acetyltransferase (EC - fission yeast (Schizosaccharomyces pombe)

SEQ ID NO: 72874 - DNA, 853 bp, Arabidopsis thaliana
  misc_feature (1)..(853): Ceres Seq. ID no. 4950486
  misc_feature: MA Experiment ID: 108434 Result: Down-regulated in Transcription
  misc_feature: MA Experiment 108434 PARAMETER Experiment Name: At_Root_Tips_cDNA_P Parameter: Tissue Value: Root Tips
  misc_feature: MA Experiment ID: 108461 Result: Down-regulated in Transcription
  misc_feature: MA Experiment 108461 PARAMETER Experiment Name: At_Germinating_Seeds_cDNA_P Parameter: Age (day) Value: 1 vs. 0
  misc_feature: MA Experiment 108461 PARAMETER Experiment Name: At_Germinating_Seeds_cDNA_P Parameter: Tissue Value: Germinating Seeds
  misc_feature: MA Experiment ID: 108595 Result: Up-regulated in Transcription
  misc_feature: MA Experiment 108595 PARAMETER Experiment Name: At_Ler-pi_Ovule_cDNA_P Parameter: Plant Line Value: null
  misc_feature: MA Experiment ID: 20000113 Result: Down-regulated in Transcription
  misc_feature: MA Experiment 20000113 PARAMETER Experiment Name: At_42deg_Heat_cDNA_P Parameter: Temperature (deg C) Value: 42 vs. 22
  misc_feature: MA Experiment 20000113 PARAMETER Experiment Name: At_42deg_Heat_cDNA_P Parameter: Timepoint (hr) Value: 8
  misc_feature: MA Experiment 20000113 PARAMETER Experiment Name: At_42deg_Heat_cDNA_P Parameter: Tissue Value: Aerial
aaatttctcagtgaaacactgaaacttccttttcagttcgtaccgttcttcgctactttactcattctttagggtttcaaggttttctattggtcttgttgtagactcgagtagcttctgggttcaacccacaaagtttgagccttttttgatttgcagagtcctctgtgtttcttggtttgtctcttgatcaagaatctgagatgggcgagccactaggactgctccaggtgactgttattcaaggaaagaaactggtgatccgagatttcaagtcaagtgatccttatgtgattgtcaaattaggaaatgagtcagcgaagaccaaagtgatcaacaattgcctgaatccagtgtggaatgaggaactgaactttactctgaaagatcctgcagcagttctcgcattggaagtgtttgataaagataggttcaaggcagatgacaagatgggccatgcctctctcagccttcaaccgcttatctcagttgccagactaagacacgtagtccgcgtgtcctctggtgagacaacgcttaggaaagtattaccggatccagagaactgcgtatctcgagagagcacaatcagttgcatagacggagaggtggtgcagagtgtgtggctgaggctgtgtgctgttgaatcgggtgagattgagttgaagataaagttgattgatcctcctggaacaaacaagtagcaatagggtattttatgttagtttgtaacacgagacccgtttgtgactagtataattgcaacatcagtatggtcttgtcttgtttccaagtgtgcctttgtgactactcaccaatttattaggaatctttgagatacattgttctgctc

SEQ ID NO: 72875 - protein, 166 aa, Arabidopsis thaliana; identical to SEQ ID NO: 26630
  peptide (1)..(166): Ceres Seq. ID no. 4950487
  misc_feature (8)..(87): Pfam Name: C2 domain Pfam Description: C2 domain
  misc_feature (1)..(166): Homolog of NCBI NO: 15238792 NR Description: putative protein; protein id: At5g47710.1, by cDNA: 3226. [Arabidopsis thaliana] contains similarity to GTPase activating protein~gene_id:MCA23.3
  misc_feature (3)..(163): Homolog of NCBI NO: 18409675 NR Description: zinc finger and C2 domain protein, putative; id: At1g70790.1, supported by cDNA: 148076. [Arabidopsis
  misc_feature (1)..(164): Homolog of NCBI NO: 30684739 NR Description: C2 domain-containing protein [Arabidopsis
  misc_feature (1)..(159): Homolog of NCBI NO: 19386828 NR Description: putative zinc finger and C2 domain protein [Oryza
  misc_feature (1)..(164): Homolog of NCBI NO: 15219500 NR Description: hypothetical protein; protein id: At1g73580.1
  misc_feature (1)..(163): Homolog of NCBI NO: 15221907 NR Description: unknown protein; protein id: At1g48590.1
  misc_feature (1)..(163): Homolog of NCBI NO: 25405940 NR Description: protein T1N15.21 [imported] - Arabidopsis >gi|8778695|gb|AAF79703.1|AC020889_11 T1N15.21 [Arabidopsis
  misc_feature (3)..(157): Homolog of NCBI NO: 15226306 NR Description: hypothetical protein; protein id: At2g01540.1, by cDNA: gi_17065055, supported by cDNA: gi_20260029 [Arabidopsis >gi|25410912|pir||A84426 hypothetical protein At2g01540
  misc_feature (1)..(163): Homolog of NCBI NO: 18408493 NR Description: expressed protein; protein id: At1g66360.1, by cDNA: 19307. [Arabidopsis thaliana] >gi|25404615|pir||H96688
  misc_feature (1)..(163): Homolog of NCBI NO: 15223248 NR Description: unknown protein; protein id: At1g70800.1

SEQ ID NO: 72876 - protein, 84 aa, Arabidopsis thaliana; identical to SEQ ID NO: 26631
  peptide (1)..(84): Ceres Seq. ID no. 4950488
  misc_feature (1)..(84): Homolog of NCBI NO: 15238792 NR Description: putative protein; protein id: At5g47710.1, by cDNA: 3226. [Arabidopsis thaliana] contains similarity to GTPase activating protein~gene_id:MCA23.3
  misc_feature (1)..(81): Homolog of NCBI NO: 18409675 NR Description: zinc finger and C2 domain protein, putative; id: At1g70790.1, supported by cDNA: 148076. [Arabidopsis
  misc_feature (1)..(82): Homolog of NCBI NO: 30684739 NR Description: C2 domain-containing protein [Arabidopsis
  misc_feature (1)..(77): Homolog of NCBI NO: 19386828 NR Description: putative zinc finger and C2 domain protein [Oryza
  misc_feature (1)..(82): Homolog of NCBI NO: 15219500 NR Description: hypothetical protein; protein id: At1g73580.1
  misc_feature (1)..(81): Homolog of NCBI NO: 15221907 NR Description: unknown protein; protein id: At1g48590.1
  misc_feature (1)..(81): Homolog of NCBI NO: 25405940 NR Description: protein T1N15.21 [imported] - Arabidopsis >gi|8778695|gb|AAF79703.1|AC020889_11 T1N15.21 [Arabidopsis
  misc_feature (1)..(75): Homolog of NCBI NO: 15226306 NR Description: hypothetical protein; protein id: At2g01540.1, by cDNA: gi_17065055, supported by cDNA: gi_20260029 [Arabidopsis >gi|25410912|pir||A84426 hypothetical protein At2g01540
  misc_feature (1)..(81): Homolog of NCBI NO: 18408493 NR Description: expressed protein; protein id: At1g66360.1, by cDNA: 19307. [Arabidopsis thaliana] >gi|25404615|pir||H96688
  misc_feature (1)..(81): Homolog of NCBI NO: 15223248 NR Description: unknown protein; protein id: At1g70800.1

SEQ ID NO: 72877 - DNA, 618 bp, Arabidopsis thaliana
  misc_feature (1)..(618): Ceres Seq. ID no. 4950535
  misc_feature: MA Experiment ID: 20001906 Result: Up-regulated in Transcription
  misc_feature: MA Experiment 20001906 PARAMETER Experiment Name: At_Drought_Reproduction_P Parameter: Age (day) Value: 35
  misc_feature: MA Experiment 20001906 PARAMETER Experiment Name: At_Drought_Reproduction_P Parameter: Organism Value: A. thaliana
  misc_feature: MA Experiment 20001906 PARAMETER Experiment Name: At_Drought_Reproduction_P Parameter: Plant Line Value: WS
  misc_feature: MA Experiment 20001906 PARAMETER Experiment Name: At_Drought_Reproduction_P Parameter: Timepoint (day) Value: 5
  misc_feature: MA Experiment 20001906 PARAMETER Experiment Name: At_Drought_Reproduction_P Parameter: Tissue Value: Siliques
  misc_feature: MA Experiment 20001906 PARAMETER Experiment Name: At_Drought_Reproduction_P Parameter: Treatment Value: Drought vs. No Drought
  misc_feature: MA Experiment ID: 20001908 Result: Up-regulated in Transcription
  misc_feature: MA Experiment 20001908 PARAMETER Experiment Name: At_Drought_Reproduction_P Parameter: Age (day) Value: 40
  misc_feature: MA Experiment 20001908 PARAMETER Experiment Name: At_Drought_Reproduction_P Parameter: Organism Value: A. thaliana
  misc_feature: MA Experiment 20001908 PARAMETER Experiment Name: At_Drought_Reproduction_P Parameter: Plant Line Value: WS
  misc_feature: MA Experiment 20001908 PARAMETER Experiment Name: At_Drought_Reproduction_P Parameter: Timepoint (day) Value: 10
  misc_feature: MA Experiment 20001908 PARAMETER Experiment Name: At_Drought_Reproduction_P Parameter: Tissue Value: Siliques
  misc_feature: MA Experiment 20001908 PARAMETER Experiment Name: At_Drought_Reproduction_P Parameter: Treatment Value: Drought vs. No Drought
atggcagagggcagtatgcgtcctccagaattcaaccagcctaacaaaaccagtaatggtggtgaggaggagtgcacggtgagggagcaagacaggttcatgcctattgccaacgtgatacggatcatgcggaggatcttacctgctcacgccaagatctcagatgactccaaggagacgatccaagagtgtgtttcggagtacatcagcttcataacaggggaggctaatgagcggtgccagcgggaacagcgcaagaccatcactgctgaggacgtcttgtgggcaatgagcaagctcggttttgatgactacatcgaacccctcacgttgtacctccaccgctacagagagttggaaggtgaaagaggggttagctgcagtgctgggtccgttagtatgaccaacggcttggtggtcaagaggcctaatgggaccatgaccgagtatggagcctacgggcctgtgccagggattcacatggcgcagtaccattatcgtcatcagaacgggtttgttttcagtggtaacgaacctaattctaagatgagtggttcatcttcaggagcaagtggcgccagagttgaagtatttccgactcaacaacataagtactga

SEQ ID NO: 72878 - protein, 205 aa, Arabidopsis thaliana
  peptide (1)..(205): Ceres Seq. ID no. 4950536
  misc_feature (1)..(205): Homolog of NCBI NO: 9758795 NR Description: contains similarity to CCAAT-box-binding
  misc_feature (1)..(205): Homolog of NCBI NO: 30695265 NR Description: leafy cotyledon 1-related L1L protein
  misc_feature (1)..(205): Homolog of NCBI NO: 28393564 NR Description: unknown protein [Arabidopsis thaliana]
  misc_feature (15)..(182): Homolog of NCBI NO: 22536010 NR Description: LEC1-like protein [Phaseolus coccineus]
  misc_feature (18)..(170): Homolog of NCBI NO: 15321716 NR Description: leafy cotyledon1 [Zea mays]
  misc_feature (19)..(150): Homolog of NCBI NO: 30349365 NR Description: leafy cotyledon 1 [Oryza sativa (indica
  misc_feature (25)..(192): Homolog of NCBI NO: 3282674 NR Description: CCAAT-box binding factor HAP3 homolog
  misc_feature (25)..(192): Homolog of NCBI NO: 15219151 NR Description: CCAAT-box binding factor HAP3 homolog; protein At1g21970.1 [Arabidopsis thaliana] >gi|25402948|pir||G86352
MAEGSMRPPEFNQPNKTSNGGEEECTVREQDRFMPIANVIRIMRRILPAHAKISDDSKETIQECVSEYISFITGEANERCQREQRKTITAEDVLWAMSKLGFDDYIEPLTLYLHRYRELEGERGVSCSAGSVSMTNGLVVKRPNGTMTEYGAYGPVPGIHMAQYHYRHQNGFVFSGNEPNSKMSGSSSGASGARVEVFPTQQHKY

SEQ ID NO: 72879 - protein, 200 aa, Arabidopsis thaliana
  peptide (1)..(200): Ceres Seq. ID no. 4950537
  misc_feature (1)..(200): Homolog of NCBI NO: 9758795 NR Description: contains similarity to CCAAT-box-binding
  misc_feature (1)..(200): Homolog of NCBI NO: 30695265 NR Description: leafy cotyledon 1-related L1L protein
  misc_feature (1)..(200): Homolog of NCBI NO: 28393564 NR Description: unknown protein [Arabidopsis thaliana]
  misc_feature (10)..(177): Homolog of NCBI NO: 22536010 NR Description: LEC1-like protein [Phaseolus coccineus]
  misc_feature (13)..(165): Homolog of NCBI NO: 15321716 NR Description: leafy cotyledon1 [Zea mays]
  misc_feature (14)..(145): Homolog of NCBI NO: 30349365 NR Description: leafy cotyledon 1 [Oryza sativa (indica
  misc_feature (20)..(187): Homolog of NCBI NO: 3282674 NR Description: CCAAT-box binding factor HAP3 homolog
  misc_feature (20)..(187): Homolog of NCBI NO: 15219151 NR Description: CCAAT-box binding factor HAP3 homolog; protein At1g21970.1 [Arabidopsis thaliana] >gi|25402948|pir||G86352
MRPPEFNQPNKTSNGGEEECTVREQDRFMPIANVIRIMRRILPAHAKISDDSKETIQECVSEYISFITGEANERCQREQRKTITAEDVLWAMSKLGFDDYIEPLTLYLHRYRELEGERGVSCSAGSVSMTNGLVVKRPNGTMTEYGAYGPVPGIHMAQYHYRHQNGFVFSGNEPNSKMSGSSSGASGARVEVFPTQQHKY

SEQ ID NO: 72880 - protein, 172 aa, Arabidopsis thaliana
  peptide (1)..(172): Ceres Seq. ID no. 4950538
  misc_feature (1)..(172): Homolog of NCBI NO: 9758795 NR Description: contains similarity to CCAAT-box-binding
  misc_feature (1)..(172): Homolog of NCBI NO: 30695265 NR Description: leafy cotyledon 1-related L1L protein
  misc_feature (1)..(172): Homolog of NCBI NO: 28393564 NR Description: unknown protein [Arabidopsis thaliana]
  misc_feature (1)..(149): Homolog of NCBI NO: 22536010 NR Description: LEC1-like protein [Phaseolus coccineus]
  misc_feature (1)..(137): Homolog of NCBI NO: 15321716 NR Description: leafy cotyledon1 [Zea mays]
  misc_feature (1)..(117): Homolog of NCBI NO: 30349365 NR Description: leafy cotyledon 1 [Oryza sativa (indica
  misc_feature (1)..(159): Homolog of NCBI NO: 3282674 NR Description: CCAAT-box binding factor HAP3 homolog
  misc_feature (1)..(159): Homolog of NCBI NO: 15219151 NR Description: CCAAT-box binding factor HAP3 homolog; protein At1g21970.1 [Arabidopsis thaliana] >gi|25402948|pir||G86352
MPIANVIRIMRRILPAHAKISDDSKETIQECVSEYISFITGEANERCQREQRKTITAEDVLWAMSKLGFDDYIEPLTLYLHRYRELEGERGVSCSAGSVSMTNGLVVKRPNGTMTEYGAYGPVPGIHMAQYHYRHQNGFVFSGNEPNSKMSGSSSGASGARVEVFPTQQHKY

SEQ ID NO: 72881 - DNA, 1020 bp, Arabidopsis thaliana
  misc_feature (1)..(1020): Ceres Seq. ID no. 4950570
  misc_feature: MA Experiment ID: 20000180 Result: Down-regulated in Transcription
  misc_feature: MA Experiment 20000180 PARAMETER Experiment Name: At_Germinating_Seeds_P Parameter: Age (hr) Value: 24 vs. 0
  misc_feature: MA Experiment 20000180 PARAMETER Experiment Name: At_Germinating_Seeds_P Parameter: Tissue Value: Germinating Seeds
  misc_feature: MA Experiment ID: 20000184 Result: Down-regulated in Transcription
  misc_feature: MA Experiment 20000184 PARAMETER Experiment Name: At_Shoots__P Parameter: Age (day) Value: 7
  misc_feature: MA Experiment 20000184 PARAMETER Experiment Name: At_Shoots__P Parameter: Tissue Value: Shoots vs. Whole Plant
  misc_feature: MA Experiment ID: 20000227 Result: Up-regulated in Transcription
  misc_feature: MA Experiment 20000227 PARAMETER Experiment Name: At_Root-Tips-vs-Tops_P Parameter: Tissue Value: Root Tips vs. Root Tops
  misc_feature: MA Experiment ID: 20000438 Result: Down-regulated in Transcription
  misc_feature: MA Experiment 20000438 PARAMETER Experiment Name: At_Shoots__P Parameter: Age (day) Value: 14
  misc_feature: MA Experiment 20000438 PARAMETER Experiment Name: At_Shoots__P Parameter: Tissue Value: Shoots vs. Whole Plant
  misc_feature: MA Experiment ID: 20001458 Result: Up-regulated in Transcription
  misc_feature: MA Experiment 20001458 PARAMETER Experiment Name: At_50mM_NH4NO3_L-to-H_P Parameter: Age (day) Value: Undefined
  misc_feature: MA Experiment 20001458 PARAMETER Experiment Name: At_50mM_NH4NO3_L-to-H_P Parameter: Organism Value: Undefined
  misc_feature: MA Experiment 20001458 PARAMETER Experiment Name: At_50mM_NH4NO3_L-to-H_P Parameter: Plant Line Value: Undefined
  misc_feature: MA Experiment 20001458 PARAMETER Experiment Name: At_50mM_NH4NO3_L-to-H_P Parameter: Timepoint (hr) Value: 2
  misc_feature: MA Experiment 20001458 PARAMETER Experiment Name: At_50mM_NH4NO3_L-to-H_P Parameter: Tissue Value: Siliques
  misc_feature: MA Experiment 20001458 PARAMETER Experiment Name: At_50mM_NH4NO3_L-to-H_P Parameter: Treatment Value: 50mM NH4NO3 vs. 100mM Manitol
  misc_feature: MA Experiment ID: 20001555 Result: Up-regulated in Transcription
  misc_feature: MA Experiment 20001555 PARAMETER Experiment Name: At_Drought_Soil_Dry_P Parameter: Age (day) Value: 24
  misc_feature: MA Experiment 20001555 PARAMETER Experiment Name: At_Drought_Soil_Dry_P Parameter: Organism Value: A. thaliana
  misc_feature: MA Experiment 20001555 PARAMETER Experiment Name: At_Drought_Soil_Dry_P Parameter: Plant Line Value: WS
  misc_feature: MA Experiment 20001555 PARAMETER Experiment Name: At_Drought_Soil_Dry_P Parameter: Post Timepoint (hr) Value: None
  misc_feature: MA Experiment 20001555 PARAMETER Experiment Name: At_Drought_Soil_Dry_P Parameter: Post-Treatment Value: None
  misc_feature: MA Experiment 20001555 PARAMETER Experiment Name: At_Drought_Soil_Dry_P Parameter: Timepoint (day) Value: 10
  misc_feature: MA Experiment 20001555 PARAMETER Experiment Name: At_Drought_Soil_Dry_P Parameter: Treatment Value: Drought vs. No Drought
  misc_feature: MA Experiment ID: 20001556 Result: Up-regulated in Transcription
  misc_feature: MA Experiment 20001556 PARAMETER Experiment Name: At_Drought_Soil_Dry_P Parameter: Age (day) Value: 26
  misc_feature: MA Experiment 20001556 PARAMETER Experiment Name: At_Drought_Soil_Dry_P Parameter: Organism Value: A. thaliana
  misc_feature: MA Experiment 20001556 PARAMETER Experiment Name: At_Drought_Soil_Dry_P Parameter: Plant Line Value: WS
  misc_feature: MA Experiment 20001556 PARAMETER Experiment Name: At_Drought_Soil_Dry_P Parameter: Post Timepoint (hr) Value: None
  misc_feature: MA Experiment 20001556 PARAMETER Experiment Name: At_Drought_Soil_Dry_P Parameter: Post-Treatment Value: None
  misc_feature: MA Experiment 20001556 PARAMETER Experiment Name: At_Drought_Soil_Dry_P Parameter: Timepoint (day) Value: 12
  misc_feature: MA Experiment 20001556 PARAMETER Experiment Name: At_Drought_Soil_Dry_P Parameter: Treatment Value: Drought vs. No Drought
  misc_feature: MA Experiment ID: 20001557 Result: Up-regulated in Transcription
  misc_feature: MA Experiment 20001557 PARAMETER Experiment Name: At_Drought_Soil_Dry_P Parameter: Age (day) Value: 27
  misc_feature: MA Experiment 20001557 PARAMETER Experiment Name: At_Drought_Soil_Dry_P Parameter: Organism Value: A. thaliana
  misc_feature: MA Experiment 20001557 PARAMETER Experiment Name: At_Drought_Soil_Dry_P Parameter: Plant Line Value: WS
  misc_feature: MA Experiment 20001557 PARAMETER Experiment Name: At_Drought_Soil_Dry_P Parameter: Post Timepoint (hr) Value: 3
  misc_feature: MA Experiment 20001557 PARAMETER Experiment Name: At_Drought_Soil_Dry_P Parameter: Post-Treatment Value: Re-Water vs. No Drought
  misc_feature: MA Experiment 20001557 PARAMETER Experiment Name: At_Drought_Soil_Dry_P Parameter: Timepoint (day) Value: 13
  misc_feature: MA Experiment 20001557 PARAMETER Experiment Name: At_Drought_Soil_Dry_P Parameter: Treatment Value: Drought vs. No Drought
  misc_feature: MA Experiment ID: 20001558 Result: Up-regulated in Transcription
  misc_feature: MA Experiment 20001558 PARAMETER Experiment Name: At_Drought_Soil_Dry_P Parameter: Age (day) Value: 27
  misc_feature: MA Experiment 20001558 PARAMETER Experiment Name: At_Drought_Soil_Dry_P Parameter: Organism Value: A. thaliana
  misc_feature: MA Experiment 20001558 PARAMETER Experiment Name: At_Drought_Soil_Dry_P Parameter: Plant Line Value: WS
  misc_feature: MA Experiment 20001558 PARAMETER Experiment Name: At_Drought_Soil_Dry_P Parameter: Post Timepoint (hr) Value: 6
  misc_feature: MA Experiment 20001558 PARAMETER Experiment Name: At_Drought_Soil_Dry_P Parameter: Post-Treatment Value: Re-Water vs. No Drought
  misc_feature: MA Experiment 20001558 PARAMETER Experiment Name: At_Drought_Soil_Dry_P Parameter: Timepoint (day) Value: 13
  misc_feature: MA Experiment 20001558 PARAMETER Experiment Name: At_Drought_Soil_Dry_P Parameter: Treatment Value: Drought vs. No Drought
  misc_feature: MA Experiment ID: 20001560 Result: Up-regulated in Transcription
  misc_feature: MA Experiment 20001560 PARAMETER Experiment Name: At_Drought_Soil_Dry_P Parameter: Age (day) Value: 28
  misc_feature: MA Experiment 20001560 PARAMETER Experiment Name: At_Drought_Soil_Dry_P Parameter: Organism Value: A. thaliana
  misc_feature: MA Experiment 20001560 PARAMETER Experiment Name: At_Drought_Soil_Dry_P Parameter: Plant Line Value: WS
  misc_feature: MA Experiment 20001560 PARAMETER Experiment Name: At_Drought_Soil_Dry_P Parameter: Post Timepoint (hr) Value: None
  misc_feature: MA Experiment 20001560 PARAMETER Experiment Name: At_Drought_Soil_Dry_P Parameter: Post-Treatment Value: None
  misc_feature: MA Experiment 20001560 PARAMETER Experiment Name: At_Drought_Soil_Dry_P Parameter: Timepoint (day) Value: 14
  misc_feature: MA Experiment 20001560 PARAMETER Experiment Name: At_Drought_Soil_Dry_P Parameter: Treatment Value: Drought vs. No Drought
  misc_feature: Pfam Name: Rrp15p Pfam Description: Rrp15p
atgtctaccggagaagaaggtcacatggcgatggcagatagaggctctagaaagagaagagtcggcgttaagaaaggtactaaagcggcgaggaacaaaaagcaaaaatcaaaaccttctacttccgataggtttaaggttacaatgaagaatcaaaagctatttcagaagagagcacgagattacaattccgatgacgatgaagaagaagatgatgaatcgaagaaacaaccagaagtaacaattcgtgagaagatcttctctgatgctaacatgggaccaaattacgaagagattggagaagaagataatgatgagaattcagatggtgaagatcatggagagattgaatctggaatcactaagtttgctactgatggatgtaatgctttcaaaatcgcttttaaagctattatgaagaagactaaaggagatgatacattgggcccagttttatcagcacataagcatcttattggagagaagctagctgaagatgaagctgaaaagaaagctaaaggtcaagctagaaaggctaaacatttgattgctgagaagggacatgttaaacctggaagttatttggattctcatgaaaagattcttattggtgttgctactaaaggagtggtcaagcttttcaatgctgtcaacaaggctcaacatgctcagaagggtttgaatccttcaaggtctaaagacgctaaagtgctgaagaagcgaagaaaagaagcattcttgtctgagttagggaaaacaaaaacagacaccaagccttcaactttggatgaacatagaagcaagttagtattctgtcttgagctggcttctatagagaaaggatcaccttcagtagcgagagccgctcacaaatctgaagacgaagctcctgtttgggctcctctacgagataattacatgttagcaaacccaaaactgaaggactgggacaagaaacaggaaacaagcgagggagatgattttgccggtttgtcaggagatgaaagttatgaagactga

SEQ ID NO: 72882 - protein, 339 aa, Arabidopsis thaliana
  peptide (1)..(339): Ceres Seq. ID no. 4950571
  misc_feature: Pfam Name: Rrp15p Pfam Description: Rrp15p
  misc_feature (1)..(339): Homolog of NCBI NO: 15238917 NR Description: unknown protein; protein id: At5g48240.1 thaliana] >gi|8777414|dbj|BAA97004.1| gene_id:MIF21.13~unknown
  misc_feature (25)..(254): Homolog of NCBI NO: 28828202 NR Description: hypothetical protein [Dictyostelium discoideum]
MSTGEEGHMAMADRGSRKRRVGVKKGTKAARNKKQKSKPSTSDRFKVTMKNQKLFQKRARDYNSDDDEEEDDESKKQPEVTIREKIFSDANMGPNYEEIGEEDNDENSDGEDHGEIESGITKFATDGCNAFKIAFKAIMKKTKGDDTLGPVLSAHKHLIGEKLAEDEAEKKAKGQARKAKHLIAEKGHVKPGSYLDSHEKILIGVATKGVVKLFNAVNKAQHAQKGLNPSRSKDAKVLKKRRKEAFLSELGKTKTDTKPSTLDEHRSKLVFCLELASIEKGSPSVARAAHKSEDEAPVWAPLRDNYMLANPKLKDWDKKQETSEGDDFAGLSGDESYED

SEQ ID NO: 72883 - protein, 331 aa, Arabidopsis thaliana
  peptide (1)..(331): Ceres Seq. ID no. 4950572
  misc_feature: Pfam Name: Rrp15p Pfam Description: Rrp15p
  misc_feature (1)..(331): Homolog of NCBI NO: 15238917 NR Description: unknown protein; protein id: At5g48240.1 thaliana] >gi|8777414|dbj|BAA97004.1| gene_id:MIF21.13~unknown
  misc_feature (17)..(246): Homolog of NCBI NO: 28828202 NR Description: hypothetical protein [Dictyostelium discoideum]
MAMADRGSRKRRVGVKKGTKAARNKKQKSKPSTSDRFKVTMKNQKLFQKRARDYNSDDDEEEDDESKKQPEVTIREKIFSDANMGPNYEEIGEEDNDENSDGEDHGEIESGITKFATDGCNAFKIAFKAIMKKTKGDDTLGPVLSAHKHLIGEKLAEDEAEKKAKGQARKAKHLIAEKGHVKPGSYLDSHEKILIGVATKGVVKLFNAVNKAQHAQKGLNPSRSKDAKVLKKRRKEAFLSELGKTKTDTKPSTLDEHRSKLVFCLELASIEKGSPSVARAAHKSEDEAPVWAPLRDNYMLANPKLKDWDKKQETSEGDDFAGLSGDESYED

SEQ ID NO: 72884 - protein, 329 aa, Arabidopsis thaliana
  peptide (1)..(329): Ceres Seq. ID no. 4950573
  misc_feature: Pfam Name: Rrp15p Pfam Description: Rrp15p
  misc_feature (1)..(329): Homolog of NCBI NO: 15238917 NR Description: unknown protein; protein id: At5g48240.1 thaliana] >gi|8777414|dbj|BAA97004.1| gene_id:MIF21.13~unknown
  misc_feature (15)..(244): Homolog of NCBI NO: 28828202 NR Description: hypothetical protein [Dictyostelium discoideum]
MADRGSRKRRVGVKKGTKAARNKKQKSKPSTSDRFKVTMKNQKLFQKRARDYNSDDDEEEDDESKKQPEVTIREKIFSDANMGPNYEEIGEEDNDENSDGEDHGEIESGITKFATDGCNAFKIAFKAIMKKTKGDDTLGPVLSAHKHLIGEKLAEDEAEKKAKGQARKAKHLIAEKGHVKPGSYLDSHEKILIGVATKGVVKLFNAVNKAQHAQKGLNPSRSKDAKVLKKRRKEAFLSELGKTKTDTKPSTLDEHRSKLVFCLELASIEKGSPSVARAAHKSEDEAPVWAPLRDNYMLANPKLKDWDKKQETSEGDDFAGLSGDESYED

SEQ ID NO: 72885 - DNA, 969 bp, Arabidopsis thaliana
  misc_feature (1)..(969): Ceres Seq. ID no. 4950643
  misc_feature: MA Experiment ID: 20001910 Result: Up-regulated in Transcription
  misc_feature: MA Experiment 20001910 PARAMETER Experiment Name: At_Drought_Reproduction_P Parameter: Age (day) Value: 37
  misc_feature: MA Experiment 20001910 PARAMETER Experiment Name: At_Drought_Reproduction_P Parameter: Organism Value: A. thaliana
  misc_feature: MA Experiment 20001910 PARAMETER Experiment Name: At_Drought_Reproduction_P Parameter: Plant Line Value: WS
  misc_feature: MA Experiment 20001910 PARAMETER Experiment Name: At_Drought_Reproduction_P Parameter: Timepoint (day) Value: 7
  misc_feature: MA Experiment 20001910 PARAMETER Experiment Name: At_Drought_Reproduction_P Parameter: Tissue Value: Flowers
  misc_feature: MA Experiment 20001910 PARAMETER Experiment Name: At_Drought_Reproduction_P Parameter: Treatment Value: Drought vs. No Drought
atgttgtcatttcgaatgccgtctatcggaagccaacctacggcatttgctgcaaaaataacggacaatccaaagaccgtggcacaactcaagtcggctgcatcgccttcacctcatagtaccgtgacgtgcggttaccaagctcatgtggcagggttctttcgaaacgtcaccgttttatggtccaagaatctcatgaatcattccctcaccgtaatggtgtcgagtttagacaatgacatgaattattgttgtaagattgatctcgtgaagccatggcagttttggagcaaaagagggtcaaagtcattcgacgtagagggaaactttgtggaggtcttttgggatcttcgatcagcaaaattggctggaaacggtagccccgaacccgtgtcagactattacgtggcagtagtttctgatgaagaggttgttttattgttgggagatttaaagcaaaaggcttataagcggaccaagtcaagaccggcattggtggaagggttcatatactttaaaaaagaaagcatatttgggaagaaaacgttttcgactcgggcaaggtttgacgaacaaagaaaggaacatgaagtggtggtggagagctctaatggagcagcggagccagagatgtggataagcgttgatgggatcgtggttgtgaacgtgaagaatctacaatggaaatttaggggaaaccaaatggtgatggtggatagaacaccggtaatggtctactatgatgttcatgattggttgtttgcaagttcggagactgcagcgagttcagggttgtttttgtttaagcctgttccggttggagcgatggtagatgagagctttagcgatgcggaggaaggagatagcggaggagggagtagtcctttgagtcgttataattcagcatcaagtggttttggaccattgcatgacttttgtttgtttctttatgcttggaaacttgaatga

SEQ ID NO: 72886 - protein, 322 aa, Arabidopsis thaliana; identical to SEQ ID NO: 70129
  peptide (1)..(322): Ceres Seq. ID no. 4950644
  misc_feature (35)..(321): Pfam Name: Plant protein of unknown function (DUF868) Pfam Description: Plant protein of unknown function (DUF868)
  misc_feature (1)..(322): Homolog of NCBI NO: 15238927 NR Description: putative protein; protein id: At5g48270.1 thaliana] >gi|8777417|dbj|BAA97007.1|
  misc_feature (2)..(322): Homolog of NCBI NO: 15228105 NR Description: hypothetical protein; protein id: At2g04220.1 thaliana] >gi|20198211|gb|AAD27916.2| hypothetical protein thaliana] >gi|20198251|gb|AAM15482.1| hypothetical protein
  misc_feature (8)..(270): Homolog of NCBI NO: 15235452 NR Description: putative protein; protein id: At4g12690.1, by cDNA: 12923. [Arabidopsis thaliana] >gi|7459232|pir||T06627
  misc_feature (288)..(322): Homolog of NCBI NO: 15235452 NR Description: putative protein; protein id: At4g12690.1, by cDNA: 12923. [Arabidopsis thaliana] >gi|7459232|pir||T06627
  misc_feature (73)..(322): Homolog of NCBI NO: 25334990 NR Description: hypothetical protein At2g04220 [imported] -
  misc_feature (85)..(272): Homolog of NCBI NO: 20804936 NR Description: P0456E05.14 [Oryza sativa (japonica
  misc_feature (6)..(74): Homolog of NCBI NO: 20804936 NR Description: P0456E05.14 [Oryza sativa (japonica
  misc_feature (40)..(270): Homolog of NCBI NO: 22331055 NR Description: hypothetical protein; protein id: At3g13229.1 thaliana] >gi|9294527|dbj|BAB02790.1|
  misc_feature (38)..(271): Homolog of NCBI NO: 14719318 NR Description: hypothetical protein [Oryza sativa]
  misc_feature (13)..(269): Homolog of NCBI NO: 30102999 NR Description: hypothetical protein [Oryza sativa (japonica

SEQ ID NO: 72887 - protein, 317 aa, Arabidopsis thaliana
  peptide (1)..(317): Ceres Seq. ID no. 4950645
  misc_feature (30)..(316): Pfam Name: Plant protein of unknown function (DUF868) Pfam Description: Plant protein of unknown function (DUF868)
  misc_feature (1)..(317): Homolog of NCBI NO: 15238927 NR Description: putative protein; protein id: At5g48270.1 thaliana] >gi|8777417|dbj|BAA97007.1|
  misc_feature (1)..(317): Homolog of NCBI NO: 15228105 NR Description: hypothetical protein; protein id: At2g04220.1 thaliana] >gi|20198211|gb|AAD27916.2| hypothetical protein thaliana] >gi|20198251|gb|AAM15482.1| hypothetical protein
  misc_feature (3)..(265): Homolog of NCBI NO: 15235452 NR Description: putative protein; protein id: At4g12690.1, by cDNA: 12923. [Arabidopsis thaliana] >gi|7459232|pir||T06627
  misc_feature (283)..(317): Homolog of NCBI NO: 15235452 NR Description: putative protein; protein id: At4g12690.1, by cDNA: 12923. [Arabidopsis thaliana] >gi|7459232|pir||T06627
  misc_feature (68)..(317): Homolog of NCBI NO: 25334990 NR Description: hypothetical protein At2g04220 [imported] -
  misc_feature (80)..(267): Homolog of NCBI NO: 20804936 NR Description: P0456E05.14 [Oryza sativa (japonica
  misc_feature (1)..(69): Homolog of NCBI NO: 20804936 NR Description: P0456E05.14 [Oryza sativa (japonica
  misc_feature (35)..(265): Homolog of NCBI NO: 22331055 NR Description: hypothetical protein; protein id: At3g13229.1 thaliana] >gi|9294527|dbj|BAB02790.1|
  misc_feature (33)..(266): Homolog of NCBI NO: 14719318 NR Description: hypothetical protein [Oryza sativa]
  misc_feature (8)..(264): Homolog of NCBI NO: 30102999 NR Description: hypothetical protein [Oryza sativa (japonica
MPSIGSQPTAFAAKITDNPKTVAQLKSAASPSPHSTVTCGYQAHVAGFFRNVTVLWSKNLMNHSLTVMVSSLDNDMNYCCKIDLVKPWQFWSKRGSKSFDVEGNFVEVFWDLRSAKLAGNGSPEPVSDYYVAVVSDEEVVLLLGDLKQKAYKRTKSRPALVEGFIYFKKESIFGKKTFSTRARFDEQRKEHEVVVESSNGAAEPEMWISVDGIVVVNVKNLQWKFRGNQMVMVDRTPVMVYYDVHDWLFASSETAASSGLFLFKPVPVGAMVDESFSDAEEGDSGGGSSPLSRYNSASSGFGPLHDFCLFLYAWKLE

SEQ ID NO: 72888 - protein, 257 aa, Arabidopsis thaliana
  peptide (1)..(257): Ceres Seq. ID no. 4950646
  misc_feature (1)..(256): Pfam Name: Plant protein of unknown function (DUF868) Pfam Description: Plant protein of unknown function (DUF868)
  misc_feature (1)..(257): Homolog of NCBI NO: 15238927 NR Description: putative protein; protein id: At5g48270.1 thaliana] >gi|8777417|dbj|BAA97007.1|
  misc_feature (1)..(257): Homolog of NCBI NO: 15228105 NR Description: hypothetical protein; protein id: At2g04220.1 thaliana] >gi|20198211|gb|AAD27916.2| hypothetical protein thaliana] >gi|20198251|gb|AAM15482.1| hypothetical protein
  misc_feature (1)..(205): Homolog of NCBI NO: 15235452 NR Description: putative protein; protein id: At4g12690.1, by cDNA: 12923. [Arabidopsis thaliana] >gi|7459232|pir||T06627
  misc_feature (223)..(257): Homolog of NCBI NO: 15235452 NR Description: putative protein; protein id: At4g12690.1, by cDNA: 12923. [Arabidopsis thaliana] >gi|7459232|pir||T06627
  misc_feature (8)..(257): Homolog of NCBI NO: 25334990 NR Description: hypothetical protein At2g04220 [imported] -
  misc_feature (20)..(207): Homolog of NCBI NO: 20804936 NR Description: P0456E05.14 [Oryza sativa (japonica
  misc_feature (1)..(205): Homolog of NCBI NO: 22331055 NR Description: hypothetical protein; protein id: At3g13229.1 thaliana] >gi|9294527|dbj|BAB02790.1|
  misc_feature (1)..(206): Homolog of NCBI NO: 14719318 NR Description: hypothetical protein [Oryza sativa]
  misc_feature (1)..(204): Homolog of NCBI NO: 30102999 NR Description: hypothetical protein [Oryza sativa (japonica
  misc_feature (1)..(204): Homolog of NCBI NO: 18397034 NR Description: expressed protein; protein id: At3g04860.1, by cDNA: 5170., supported by cDNA: gi_16612260 [Arabidopsis
MNHSLTVMVSSLDNDMNYCCKIDLVKPWQFWSKRGSKSFDVEGNFVEVFWDLRSAKLAGNGSPEPVSDYYVAVVSDEEVVLLLGDLKQKAYKRTKSRPALVEGFIYFKKESIFGKKTFSTRARFDEQRKEHEVVVESSNGAAEPEMWISVDGIVVVNVKNLQWKFRGNQMVMVDRTPVMVYYDVHDWLFASSETAASSGLFLFKPVPVGAMVDESFSDAEEGDSGGGSSPLSRYNSASSGFGPLHDFCLFLYAWKLE

SEQ ID NO: 72889 - DNA, 1461 bp, Arabidopsis thaliana
  misc_feature (1)..(1461): Ceres Seq. ID no. 4950651
  misc_feature: MA Experiment ID: 108434 Result: Up-regulated in Transcription
  misc_feature: MA Experiment 108434 PARAMETER Experiment Name: At_Root_Tips_cDNA_P Parameter: Tissue Value: Root Tips
  misc_feature: MA Experiment ID: 108461 Result: Up-regulated in Transcription
  misc_feature: MA Experiment 108461 PARAMETER Experiment Name: At_Germinating_Seeds_cDNA_P Parameter: Age (day) Value: 1 vs. 0
  misc_feature: MA Experiment 108461 PARAMETER Experiment Name: At_Germinating_Seeds_cDNA_P Parameter: Tissue Value: Germinating Seeds
  misc_feature: MA Experiment ID: 108595 Result: Down-regulated in Transcription
  misc_feature: MA Experiment 108595 PARAMETER Experiment Name: At_Ler-pi_Ovule_cDNA_P Parameter: Plant Line Value: null
  misc_feature: MA Experiment ID: 20000113 Result: Down-regulated in Transcription
  misc_feature: MA Experiment 20000113 PARAMETER Experiment Name: At_42deg_Heat_cDNA_P Parameter: Temperature (deg C) Value: 42 vs. 22
  misc_feature: MA Experiment 20000113 PARAMETER Experiment Name: At_42deg_Heat_cDNA_P Parameter: Timepoint (hr) Value: 8
  misc_feature: MA Experiment 20000113 PARAMETER Experiment Name: At_42deg_Heat_cDNA_P Parameter: Tissue Value: Aerial
  misc_feature: MA Experiment ID: 20000224 Result: Down-regulated in Transcription
atgatgatttatgtagaagaaggggttgatacaacagatcatatagcagtcgtgttgctcttcatcgtagttatcgtcgctgattcaccaacaacaacaacatcacaagaaagcgtcctcttttataggaccctctgtccctgtttctctctccagttttattgtagaattcgctgtcattttcacaacgactcacttctttcagctctctccattcggcgctctcttctggaattgaagaatcaagcaatggcccatacatcagaatctgtgaatcctagagatgtttgcattgtgggtgttgcacgtactccaatgggtggctttctcggatctctttcatctttacctgccacaaagcttggatctttagctattgcagctgctttgaagagagcaaatgttgatccagctcttgttcaagaagttgtctttggcaatgttcttagtgctaatttgggtcaagctcctgctcgtcaagctgctttaggtgcaggaatccctaactctgttatctgtactacagttaacaaggtttgtgcatcaggcatgaaagcggtaatgattgctgctcaaagtatccagttagggatcaatgatgtagttgtggcgggtggtatggaaagcatgtctaatacaccaaaatatttggcagaagcaaggaagggatctcgttttggtcatgattctttagtagatggaatgttgaaggatggactatgggatgtctataacgactgtgggatgggaagctgtgcagaattatgcgctgagaagtttcagattacaagggagcagcaagatgactatgcagttcagagttttgagcgtggtattgctgcccaggaagctggcgccttcacatgggaaatcgtcccggttgaagtttctggaggaagaggtaggccatcaaccattgttgacaaggacgaaggtcttgggaagtttgatgctgcaaaattgaggaaactccgtcctagtttcaaagagaatggagggactgttacagctggaaatgcgtctagcataagtgatggtgcagctgcccttgtcctagtgagcggagagaaggctcttcagctaggacttctagtattagcaaaaattaaagggtatggtgacgcagctcaggaaccagagtttttcactactgctcctgctcttgctataccaaaagccattgcacatgctggtttggaatcttctcaagttgattactatgagatcaatgaagcatttgcagttgtagcacttgcaaatcaaaagctactcgggattgctccagagaaagtgaacgtaaatggaggagctgtctccttaggacaccctctaggctgcagtggcgcccgtattctaatcacgttgcttgggatactaaagaagagaaacggaaagtacggtgtgggaggagtgtgcaacggaggaggaggtgcttctgctctagttcttgagctcctttga

SEQ ID NO: 72890 - protein, 486 aa, Arabidopsis thaliana
  peptide (1)..(486): Ceres Seq. ID no. 4950652
  misc_feature (93)..(356): Pfam Name: Thiolase, N-terminal domain Pfam Description: Thiolase, N-terminal domain
  misc_feature (1)..(486): Homolog of NCBI NO: 8777413 NR Description: acetyl-CoA C-acetyltransferase [Arabidopsis
  misc_feature (84)..(486): Homolog of NCBI NO: 30695411 NR Description: acetyl-CoA C-acetyltransferase A thiolase), putative [Arabidopsis thaliana]
  misc_feature (90)..(486): Homolog of NCBI NO: 30695409 NR Description: acetyl-CoA C-acetyltransferase A thiolase), putative [Arabidopsis thaliana]
  misc_feature (84)..(486): Homolog of NCBI NO: 7433657 NR Description: acetyl-CoA C-acetyltransferase (EC 2.3.1.9),
  misc_feature (84)..(486): Homolog of NCBI NO: 16417944 NR Description: acetyl Co-A acetyltransferase [Hevea brasiliensis]
  misc_feature (87)..(486): Homolog of NCBI NO: 15238793 NR Description: acetoacyl-CoA-thiolase; protein id: At5g47720.1,
  misc_feature (87)..(486): Homolog of NCBI NO: 30695277 NR Description: acetyl-CoA C-acetyltransferase
  misc_feature (88)..(486): Homolog of NCBI NO: 34894172 NR Description: putative acetoacyl-CoA-thiolase [Oryza sativa
  misc_feature (95)..(484): Homolog of NCBI NO: 19113478 NR Description: acetyl-coa acetyltransferase (EC 2.3.1.9)
  misc_feature (95)..(484): Homolog of NCBI NO: 11257345 NR Description: probable acetyl-CoA C-acetyltransferase (EC - fission yeast (Schizosaccharomyces pombe)
MMIYVEEGVDTTDHIAVVLLFIVVIVADSPTTTTSQESVLFYRTLCPCFSLQFYCRIRCHFHNDSLLSALSIRRSLLELKNQAMAHTSESVNPRDVCIVGVARTPMGGFLGSLSSLPATKLGSLAIAAALKRANVDPALVQEVVFGNVLSANLGQAPARQAALGAGIPNSVICTTVNKVCASGMKAVMIAAQSIQLGINDVVVAGGMESMSNTPKYLAEARKGSRFGHDSLVDGMLKDGLWDVYNDCGMGSCAELCAEKFQITREQQDDYAVQSFERGIAAQEAGAFTWEIVPVEVSGGRGRPSTIVDKDEGLGKFDAAKLRKLRPSFKENGGTVTAGNASSISDGAAALVLVSGEKALQLGLLVLAKIKGYGDAAQEPEFFTTAPALAIPKAIAHAGLESSQVDYYEINEAFAVVALANQKLLGIAPEKVNVNGGAVSLGHPLGCSGARILITLLGILKKRNGKYGVGGVCNGGGGASALVLELL

SEQ ID NO: 72891 - protein, 485 aa, Arabidopsis thaliana
  peptide (1)..(485): Ceres Seq. ID no. 4950653
  misc_feature (92)..(355): Pfam Name: Thiolase, N-terminal domain Pfam Description: Thiolase, N-terminal domain
  misc_feature (1)..(485): Homolog of NCBI NO: 8777413 NR Description: acetyl-CoA C-acetyltransferase [Arabidopsis
  misc_feature (83)..(485): Homolog of NCBI NO: 30695411 NR Description: acetyl-CoA C-acetyltransferase A thiolase), putative [Arabidopsis thaliana]
  misc_feature (89)..(485): Homolog of NCBI NO: 30695409 NR Description: acetyl-CoA C-acetyltransferase A thiolase), putative [Arabidopsis thaliana]
  misc_feature (83)..(485): Homolog of NCBI NO: 7433657 NR Description: acetyl-CoA C-acetyltransferase (EC 2.3.1.9),
  misc_feature (83)..(485): Homolog of NCBI NO: 16417944 NR Description: acetyl Co-A acetyltransferase [Hevea brasiliensis]
  misc_feature (86)..(485): Homolog of NCBI NO: 15238793 NR Description: acetoacyl-CoA-thiolase; protein id: At5g47720.1,
  misc_feature (86)..(485): Homolog of NCBI NO: 30695277 NR Description: acetyl-CoA C-acetyltransferase
  misc_feature (87)..(485): Homolog of NCBI NO: 34894172 NR Description: putative acetoacyl-CoA-thiolase [Oryza sativa
  misc_feature (94)..(483): Homolog of NCBI NO: 19113478 NR Description: acetyl-coa acetyltransferase (EC 2.3.1.9)
  misc_feature (94)..(483): Homolog of NCBI NO: 11257345 NR Description: probable acetyl-CoA C-acetyltransferase (EC - fission yeast (Schizosaccharomyces pombe)
MIYVEEGVDTTDHIAVVLLFIVVIVADSPTTTTSQESVLFYRTLCPCFSLQFYCRIRCHFHNDSLLSALSIRRSLLELKNQAMAHTSESVNPRDVCIVGVARTPMGGFLGSLSSLPATKLGSLAIAAALKRANVDPALVQEVVFGNVLSANLGQAPARQAALGAGIPNSVICTTVNKVCASGMKAVMIAAQSIQLGINDVVVAGGMESMSNTPKYLAEARKGSRFGHDSLVDGMLKDGLWDVYNDCGMGSCAELCAEKFQITREQQDDYAVQSFERGIAAQEAGAFTWEIVPVEVSGGRGRPSTIVDKDEGLGKFDAAKLRKLRPSFKENGGTVTAGNASSISDGAAALVLVSGEKALQLGLLVLAKIKGYGDAAQEPEFFTTAPALAIPKAIAHAGLESSQVDYYEINEAFAVVALANQKLLGIAPEKVNVNGGAVSLGHPLGCSGARILITLLGILKKRNGKYGVGGVCNGGGGASALVLELL

SEQ ID NO: 72892 - protein, 403 aa, Arabidopsis thaliana; identical to SEQ ID NO: 41746
  peptide (1)..(403): Ceres Seq. ID no. 4950654
  misc_feature (10)..(273): Pfam Name: Thiolase, N-terminal domain Pfam Description: Thiolase, N-terminal domain
  misc_feature (1)..(403): Homolog of NCBI NO: 8777413 NR Description: acetyl-CoA C-acetyltransferase [Arabidopsis
  misc_feature (1)..(403): Homolog of NCBI NO: 30695411 NR Description: acetyl-CoA C-acetyltransferase A thiolase), putative [Arabidopsis thaliana]
  misc_feature (7)..(403): Homolog of NCBI NO: 30695409 NR Description: acetyl-CoA C-acetyltransferase A thiolase), putative [Arabidopsis thaliana]
  misc_feature (1)..(403): Homolog of NCBI NO: 7433657 NR Description: acetyl-CoA C-acetyltransferase (EC 2.3.1.9),
  misc_feature (1)..(403): Homolog of NCBI NO: 16417944 NR Description: acetyl Co-A acetyltransferase [Hevea brasiliensis]
  misc_feature (4)..(403): Homolog of NCBI NO: 15238793 NR Description: acetoacyl-CoA-thiolase; protein id: At5g47720.1,
  misc_feature (4)..(403): Homolog of NCBI NO: 30695277 NR Description: acetyl-CoA C-acetyltransferase
  misc_feature (5)..(403): Homolog of NCBI NO: 34894172 NR Description: putative acetoacyl-CoA-thiolase [Oryza sativa
  misc_feature (12)..(401): Homolog of NCBI NO: 19113478 NR Description: acetyl-coa acetyltransferase (EC 2.3.1.9)
  misc_feature (12)..(401): Homolog of NCBI NO: 11257345 NR Description: probable acetyl-CoA C-acetyltransferase (EC - fission yeast (Schizosaccharomyces pombe)

SEQ ID NO: 72893 - DNA, 1380 bp, Arabidopsis thaliana
  misc_feature (1)..(1380): Ceres Seq. ID no. 4950824
  misc_feature: MA Experiment ID: 20000180 Result: Up-regulated in Transcription
  misc_feature: MA Experiment 20000180 PARAMETER Experiment Name: At_Germinating_Seeds_P Parameter: Age (hr) Value: 24 vs. 0
  misc_feature: MA Experiment 20000180 PARAMETER Experiment Name: At_Germinating_Seeds_P Parameter: Tissue Value: Germinating Seeds
  misc_feature: MA Experiment ID: 20000184 Result: Down-regulated in Transcription
  misc_feature: MA Experiment 20000184 PARAMETER Experiment Name: At_Shoots__P Parameter: Age (day) Value: 7
  misc_feature: MA Experiment 20000184 PARAMETER Experiment Name: At_Shoots__P Parameter: Tissue Value: Shoots vs. Whole Plant
  misc_feature: MA Experiment ID: 20000794 Result: Down-regulated in Transcription
  misc_feature: MA Experiment 20000794 PARAMETER Experiment Name: At_Petals_P Parameter: Age (day) Value: 23-25 days
  misc_feature: MA Experiment 20000794 PARAMETER Experiment Name: At_Petals_P Parameter: Plant Line Value: WS
  misc_feature: MA Experiment 20000794 PARAMETER Experiment Name: At_Petals_P Parameter: Tissue Value: Petals vs. Whole plant
  misc_feature: MA Experiment ID: 20001905 Result: Down-regulated in Transcription
  misc_feature: MA Experiment 20001905 PARAMETER Experiment Name: At_Drought_Reproduction_P Parameter: Age (day) Value: 40
  misc_feature: MA Experiment 20001905 PARAMETER Experiment Name: At_Drought_Reproduction_P Parameter: Organism Value: A. thaliana
  misc_feature: MA Experiment 20001905 PARAMETER Experiment Name: At_Drought_Reproduction_P Parameter: Plant Line Value: WS
  misc_feature: MA Experiment 20001905 PARAMETER Experiment Name: At_Drought_Reproduction_P Parameter: Timepoint (day) Value: 10
  misc_feature: MA Experiment 20001905 PARAMETER Experiment Name: At_Drought_Reproduction_P Parameter: Tissue Value: Rosettes
  misc_feature: MA Experiment 20001905 PARAMETER Experiment Name: At_Drought_Reproduction_P Parameter: Treatment Value: Drought vs. No Drought
atggtttccattttccttcaatcacccacctttttaacaccactgagctacccattttcatctcggagctccaccaagagaacccaacatggagcttctctgtcactacgtgtcacagcttctcgtagctccttcgatgttgttgttgtaggtggtgggatcattgggttaaccatagcccgccaattccttaccgggtcggatctatctgttgctgttgtcgataaagccgtaccttgctccggcgccaccggtgccgggcagggatatatatggatgacacacaagaaaccaggcagtgatgtgtgggacttgaccttgaggagccatgaactctggcacaagcttgcagagagcttgactgatgatggtcttgatcctgaagagttgcttggctggaaaaagacaggaagcttgctcattggtaggaccactgaggaatgtgttgctctgaagcaaaaggttcatgagctatctgaagctgggttaagaactgaatatttgtctagtgctgagttgttgttaaaggagcctgcgatacttgtaaatgataatactggtgctgcatttcttcctgatgattcacagttggacgcccatcgtgcggttgcttatatcgagaagggtaatagagcgtttgcaacagcaggcagatatgccgagttctataatgaaccagttacaggtttaataaggtctgatggggatagcaaggtggttgctggcgttaagactttgaaacgcaacttgtatggtaagaaggctactatagtagctgctggttgctggagtggatctctgatgcatgaattgcttaaagactgcaacattccgctggacgttccggtgaagccaagaaaggggcatctgcttgtggtagagaactttgattcattccacttaaatcatgggataatggaggctggttactcgaatcatcaaagtgcttcagtttcaggattggatgtcgatgaacggatgctatctatttccatgacagccacaatggacacatcaggaaaccttgttcttgggagcagccgtgagtttgtcgggttcgacactgaagctgatgagtttatcatccgttgcatatgggagcgtgctgcagaattctttcctaagttacgtgatatttccctcgaagatttcatccgtaacaggaaagtgagagtcgggttgcgcccttacatgcctgacgggaagccagtgataggatccgtgcccggattacaaaacatgtacttagcagctgggcatgaaggaggtggactttccatggctctagcaacagcggaaatggtaacggacatggtactaggaaaaccatcacaagtggatacttcaacgtttggggttaaagggcgtcgttgttgctga

SEQ ID NO: 72894 - protein, 459 aa, Arabidopsis thaliana
  peptide (1)..(459): Ceres Seq. ID no. 4950825
  misc_feature (45)..(444): Pfam Name: FAD dependent oxidoreductase Pfam Description: FAD dependent oxidoreductase
  misc_feature (1)..(459): Homolog of NCBI NO: 15238972 NR Description: putative protein; protein id: At5g48440.1 thaliana] >gi|8777374|dbj|BAA96964.1| gene_id:MJE7.7~similar to
  misc_feature (28)..(242): Homolog of NCBI NO: 21243282 NR Description: D-amino acid oxidase [Xanthomonas axonopodis pv.
  misc_feature (280)..(451): Homolog of NCBI NO: 21243282 NR Description: D-amino acid oxidase [Xanthomonas axonopodis pv.
  misc_feature (40)..(242): Homolog of NCBI NO: 21231851 NR Description: D-amino acid oxidase [Xanthomonas campestris pv.
  misc_feature (280)..(451): Homolog of NCBI NO: 21231851 NR Description: D-amino acid oxidase [Xanthomonas campestris pv.
  misc_feature (46)..(267): Homolog of NCBI NO: 29828276 NR Description: putative secreted oxidoreductase [Streptomyces
  misc_feature (281)..(451): Homolog of NCBI NO: 29828276 NR Description: putative secreted oxidoreductase [Streptomyces
  misc_feature (120)..(439): Homolog of NCBI NO: 21400731 NR Description: DAO, FAD dependent oxidoreductase [Bacillus
  misc_feature (120)..(439): Homolog of NCBI NO: 30020955 NR Description: Sarcosine oxidase beta subunit [Bacillus cereus
  misc_feature (32)..(230): Homolog of NCBI NO: 16263212 NR Description: putative oxidoreductase [Sinorhizobium meliloti]
MVSIFLQSPTFLTPLSYPFSSRSSTKRTQHGASLSLRVTASRSSFDVVVVGGGIIGLTIARQFLTGSDLSVAVVDKAVPCSGATGAGQGYIWMTHKKPGSDVWDLTLRSHELWHKLAESLTDDGLDPEELLGWKKTGSLLIGRTTEECVALKQKVHELSEAGLRTEYLSSAELLLKEPAILVNDNTGAAFLPDDSQLDAHRAVAYIEKGNRAFATAGRYAEFYNEPVTGLIRSDGDSKVVAGVKTLKRNLYGKKATIVAAGCWSGSLMHELLKDCNIPLDVPVKPRKGHLLVVENFDSFHLNHGIMEAGYSNHQSASVSGLDVDERMLSISMTATMDTSGNLVLGSSREFVGFDTEADEFIIRCIWERAAEFFPKLRDISLEDFIRNRKVRVGLRPYMPDGKPVIGSVPGLQNMYLAAGHEGGGLSMALATAEMVTDMVLGKPSQVDTSTFGVKGRRCC

SEQ ID NO: 72895 - protein, 367 aa, Arabidopsis thaliana
  peptide (1)..(367): Ceres Seq. ID no. 4950826
  misc_feature (1)..(352): Pfam Name: FAD dependent oxidoreductase Pfam Description: FAD dependent oxidoreductase
  misc_feature (1)..(367): Homolog of NCBI NO: 15238972 NR Description: putative protein; protein id: At5g48440.1 thaliana] >gi|8777374|dbj|BAA96964.1| gene_id:MJE7.7~similar to
  misc_feature (1)..(150): Homolog of NCBI NO: 21243282 NR Description: D-amino acid oxidase [Xanthomonas axonopodis pv.
  misc_feature (188)..(359): Homolog of NCBI NO: 21243282 NR Description: D-amino acid oxidase [Xanthomonas axonopodis pv.
  misc_feature (1)..(150): Homolog of NCBI NO: 21231851 NR Description: D-amino acid oxidase [Xanthomonas campestris pv.
  misc_feature (188)..(359): Homolog of NCBI NO: 21231851 NR Description: D-amino acid oxidase [Xanthomonas campestris pv.
  misc_feature (1)..(175): Homolog of NCBI NO: 29828276 NR Description: putative secreted oxidoreductase [Streptomyces
  misc_feature (189)..(359): Homolog of NCBI NO: 29828276 NR Description: putative secreted oxidoreductase [Streptomyces
  misc_feature (28)..(347): Homolog of NCBI NO: 21400731 NR Description: DAO, FAD dependent oxidoreductase [Bacillus
  misc_feature (28)..(347): Homolog of NCBI NO: 30020955 NR Description: Sarcosine oxidase beta subunit [Bacillus cereus
  misc_feature (1)..(138): Homolog of NCBI NO: 16263212 NR Description: putative oxidoreductase [Sinorhizobium meliloti]
MTHKKPGSDVWDLTLRSHELWHKLAESLTDDGLDPEELLGWKKTGSLLIGRTTEECVALKQKVHELSEAGLRTEYLSSAELLLKEPAILVNDNTGAAFLPDDSQLDAHRAVAYIEKGNRAFATAGRYAEFYNEPVTGLIRSDGDSKVVAGVKTLKRNLYGKKATIVAAGCWSGSLMHELLKDCNIPLDVPVKPRKGHLLVVENFDSFHLNHGIMEAGYSNHQSASVSGLDVDERMLSISMTATMDTSGNLVLGSSREFVGFDTEADEFIIRCIWERAAEFFPKLRDISLEDFIRNRKVRVGLRPYMPDGKPVIGSVPGLQNMYLAAGHEGGGLSMALATAEMVTDMVLGKPSQVDTSTFGVKGRRCC

SEQ ID NO: 72896 - DNA, 3021 bp, Arabidopsis thaliana
  misc_feature (1)..(3021): Ceres Seq. ID no. 4951081
  misc_feature: MA Experiment ID: 20000227 Result: Down-regulated in Transcription
  misc_feature: MA Experiment 20000227 PARAMETER Experiment Name: At_Root-Tips-vs-Tops_P Parameter: Tissue Value: Root Tips vs. Root Tops
  misc_feature: MA Experiment ID: 20000269 Result: Up-regulated in Transcription
  misc_feature: MA Experiment 20000269 PARAMETER Experiment Name: At_1mM_KNO3_L-vs-H_Roots_P Parameter: Age (day) Value: 7,10,12
  misc_feature: MA Experiment 20000269 PARAMETER Experiment Name: At_1mM_KNO3_L-vs-H_Roots_P Parameter: Organism Value: A. thaliana
  misc_feature: MA Experiment 20000269 PARAMETER Experiment Name: At_1mM_KNO3_L-vs-H_Roots_P Parameter: Plant Line Value: WS
  misc_feature: MA Experiment 20000269 PARAMETER Experiment Name: At_1mM_KNO3_L-vs-H_Roots_P Parameter: Timepoint (day) Value: 7,10,12
  misc_feature: MA Experiment 20000269 PARAMETER Experiment Name: At_1mM_KNO3_L-vs-H_Roots_P Parameter: Tissue Value: Roots
  misc_feature: MA Experiment 20000269 PARAMETER Experiment Name: At_1mM_KNO3_L-vs-H_Roots_P Parameter: Treatment Value: 1mM KNO3 vs. 50mM KNO3
atgatccactgccaatttctattatttatatgtttacttttacattattcaaagtcttctccttcttgtttaacaatattatgtaaatgttttgttagcgaggaagctgtatttttgtattcaagactatgtcataacgtgtgcaaatcacatgctttctcattgaatgactttccgatacagtcagaagcagggaaagagaaaaagagattctttgtgggtctcaagatgagttcaagaattgaagtctttgtgctcttgatcttgctttcgttccaattttgttctgtatctgcgcagacaaatggtttcgatgctgatgctttacaatacctgaagagtagtttgaccatacctcctcggaattggaaaggctatgatccttgtggaaccaattgggttggaattgcatgtgaatatggccgcgttgttaacatatcactaggcaaccttaacttggaaggaaagcttcctgcctttattacgacgttgtctgaattgcataccctggatttgacatctaatcctaatttgaccggaccgcttccactaaatatcggtaaccttaaggagttgacgaacttaaatcttatgggatgtggtttcagtggtcaaatccctgagtccataggatctctagaacaacttgtaacactctccttgaattcaaataaatttaatggaacgattccggcttccattggcctgttatcgaaactatattggtttgatatagctgacaatcagatagaaggaaagcttccagtttctgatggggcttctttacctggacttgatatgcttcttcaaactaagcattttcattttggaaaaaacaagctttctggtgatatccctgaaaagctattcagtgccaacatgactttaaaacatttgctattcgatggaaacctactaaccggtgaaatcccacaaagcctcagccttgttaaaacattgacggtgttacgccttgataggaatagactaagtggagaaattcctccaagtcttaataatctcacaaatcttcaagaactgtacttgtccgacaacaaatttaccggtagtcttccaagtttaaccagcttgaccagtctctccacattaaggatggcagggctccaacttcaaggtccaataccaacctccctcttcagtcttcctgaattgcagactgttatcctaaagcgtaactggctaaacgaaacactagacttcggtaccaacaagagccaaaacctagattttgtggatttacaatataatgacataacagagtatattaaacaaccagctaataaaggaagcagcaggatagtaatcttggcaaataatccagtgtgccccgaggtagggaacccaccaaatgaatactgcatagaagtcgaacacaattcctcatattcttcccctaagaacacatgtggtcgttgtagtggtgaggacagggaacccattcccaccacgtgccgttgtgtgtatccaatcacaggaacactcacttttaggtcaccttccttctcagggtattccaacaacgatacattcgagaacctcaggctaaacctaactggtttctttgagaatagaaattatacagtggattctgtggccataagaaacataagagaagatgaagatgatcattatcttctaatagatctctctctctttccatataaacaagacagatttaatgagacgggaatggatagtgttatttccaggtttagcacacagacttataagcctcctaatacctttggcccttacatattcaaagccaataagtacaataagttccctgcaggaggttcaaactcgtcacacatcattggagctgtagttggttctactgtttttctgttaattctaatgatagctgggatctatgctcttaagcaaaagagaagagcagagaaagcaaatgatcaaattaatccttttgccaagtgggatgcgaatcagaacagtgtcgatgcaccacagcttatgggaacaaaagcatttacttttgaagagatgaggaaatgtgcaaacaacttttcagtggcaaatgatgtcggtggtggaggttatggccaagtatacaaagggattcttccttctggtcaactcatagcaattaaaagagctcaaccaggatctttgcaaggagcgttggagtttaaaactgagatcgagcttctttcaagggtccatcataaaaatgttgtcaaactcttaggcttttgctttgatcgaggagaacaaatgctcgtctacgagtatattccaaatggttctcttagagatagtctatcagggaaaagtgggattagacttgattggacgagaaggcttagaatagcacttggttcagggaagggtttggcttatcttcatgagcttgcagatcctccaattatacacagagacgttaaatcaagtaatgtattacttgatgaaagtttaactgcaaaagttgctgattttggcttatctcaacttgtggaagatgctgagaaagctaatgtaacggcacaagtgaagggaactatgggctacttggatcctgagtactacatgacgaatcaattgacagagaagagcgatgtatatgggtttggggttatgatgcttgagctactgactggtaagattcctatagagaatggaaaatatgtggtgaaagagatgaagatgaagatgaataaatcgaagaacttgtatgacctacaagattttctggacactacgatcagcgcaacgtccaacaggaatcttaagggatttgaaaagtatgtagatgtggctctaagatgcgtagatccagaaggagtgaagaggccatcaatgaatgaggttgtgaaagagattgagaacataatgcagtatgcaggattaaaccctaacgtagaatcatatgcgagttcaagaacgtatgatgaagcaagcaaagaatctggagatctttatggaaacaactcttttgagtatagtgcaagtttcccaactacaaacctcgaacctcaatga

SEQ ID NO: 72897 - protein, 1006 aa, Arabidopsis thaliana
  peptide (1)..(1006): Ceres Seq. ID no. 4951082
  misc_feature (683)..(883): Pfam Name: Protein kinase domain Pfam Description: Protein kinase domain
  misc_feature (142)..(1006): Homolog of NCBI NO: 30695748 NR Description: receptor protein kinase-related [Arabidopsis >gi|26449348|dbj|BAC41801.1| putative receptor protein kinase thaliana] >gi|30102752|gb|AAP21294.1| At5g49760 [Arabidopsis
  misc_feature (115)..(1000): Homolog of NCBI NO: 15240547 NR Description: leucine-rich repeat transmembrane protein kinase, protein id: At5g49770.1 [Arabidopsis thaliana]
  misc_feature (142)..(1006): Homolog of NCBI NO: 30699436 NR Description: leucine-rich repeat transmembrane protein kinase, [Arabidopsis thaliana] >gi|26450791|dbj|BAC42504.1| unknown
  misc_feature (142)..(1006): Homolog of NCBI NO: 7715608 NR Description: F20B17.5 [Arabidopsis thaliana]
  misc_feature (226)..(1006): Homolog of NCBI NO: 34909240 NR Description: putative receptor protein kinase [Oryza sativa
  misc_feature (79)..(972): Homolog of NCBI NO: 34905792 NR Description: P0401G10.22 [Oryza sativa (japonica
  misc_feature (108)..(959): Homolog of NCBI NO: 15222211 NR Description: leucine-rich repeat transmembrane protein kinase,
  misc_feature (77)..(527): Homolog of NCBI NO: 30695748 NR Description: receptor protein kinase-related [Arabidopsis >gi|26449348|dbj|BAC41801.1| putative receptor protein kinase thaliana] >gi|30102752|gb|AAP21294.1| At5g49760 [Arabidopsis
  misc_feature (75)..(493): Homolog of NCBI NO: 15240547 NR Description: leucine-rich repeat transmembrane protein kinase, protein id: At5g49770.1 [Arabidopsis thaliana]
  misc_feature (100)..(991): Homolog of NCBI NO: 30679474 NR Description: leucine-rich repeat transmembrane protein kinase,
MIHCQFLLFICLLLHYSKSSPSCLTILCKCFVSEEAVFLYSRLCHNVCKSHAFSLNDFPIQSEAGKEKKRFFVGLKMSSRIEVFVLLILLSFQFCSVSAQTNGFDADALQYLKSSLTIPPRNWKGYDPCGTNWVGIACEYGRVVNISLGNLNLEGKLPAFITTLSELHTLDLTSNPNLTGPLPLNIGNLKELTNLNLMGCGFSGQIPESIGSLEQLVTLSLNSNKFNGTIPASIGLLSKLYWFDIADNQIEGKLPVSDGASLPGLDMLLQTKHFHFGKNKLSGDIPEKLFSANMTLKHLLFDGNLLTGEIPQSLSLVKTLTVLRLDRNRLSGEIPPSLNNLTNLQELYLSDNKFTGSLPSLTSLTSLSTLRMAGLQLQGPIPTSLFSLPELQTVILKRNWLNETLDFGTNKSQNLDFVDLQYNDITEYIKQPANKGSSRIVILANNPVCPEVGNPPNEYCIEVEHNSSYSSPKNTCGRCSGEDREPIPTTCRCVYPITGTLTFRSPSFSGYSNNDTFENLRLNLTGFFENRNYTVDSVAIRNIREDEDDHYLLIDLSLFPYKQDRFNETGMDSVISRFSTQTYKPPNTFGPYIFKANKYNKFPAGGSNSSHIIGAVVGSTVFLLILMIAGIYALKQKRRAEKANDQINPFAKWDANQNSVDAPQLMGTKAFTFEEMRKCANNFSVANDVGGGGYGQVYKGILPSGQLIAIKRAQPGSLQGALEFKTEIELLSRVHHKNVVKLLGFCFDRGEQMLVYEYIPNGSLRDSLSGKSGIRLDWTRRLRIALGSGKGLAYLHELADPPIIHRDVKSSNVLLDESLTAKVADFGLSQLVEDAEKANVTAQVKGTMGYLDPEYYMTNQLTEKSDVYGFGVMMLELLTGKIPIENGKYVVKEMKMKMNKSKNLYDLQDFLDTTISATSNRNLKGFEKYVDVALRCVDPEGVKRPSMNEVVKEIENIMQYAGLNPNVESYASSRTYDEASKESGDLYGNNSFEYSASFPTTNLEPQ

SEQ ID NO: 72898 - protein, 930 aa, Arabidopsis thaliana
  peptide (1)..(930): Ceres Seq. ID no. 4951083
  misc_feature (607)..(807): Pfam Name: Protein kinase domain Pfam Description: Protein kinase domain
  misc_feature (66)..(930): Homolog of NCBI NO: 30695748 NR Description: receptor protein kinase-related [Arabidopsis >gi|26449348|dbj|BAC41801.1| putative receptor protein kinase thaliana] >gi|30102752|gb|AAP21294.1| At5g49760 [Arabidopsis
  misc_feature (39)..(924): Homolog of NCBI NO: 15240547 NR Description: leucine-rich repeat transmembrane protein kinase, protein id: At5g49770.1 [Arabidopsis thaliana]
  misc_feature (66)..(930): Homolog of NCBI NO: 30699436 NR Description: leucine-rich repeat transmembrane protein kinase, [Arabidopsis thaliana] >gi|26450791|dbj|BAC42504.1| unknown
  misc_feature (66)..(930): Homolog of NCBI NO: 7715608 NR Description: F20B17.5 [Arabidopsis thaliana]
  misc_feature (150)..(930): Homolog of NCBI NO: 34909240 NR Description: putative receptor protein kinase [Oryza sativa
  misc_feature (3)..(896): Homolog of NCBI NO: 34905792 NR Description: P0401G10.22 [Oryza sativa (japonica
  misc_feature (32)..(883): Homolog of NCBI NO: 15222211 NR Description: leucine-rich repeat transmembrane protein kinase,
  misc_feature (1)..(451): Homolog of NCBI NO: 30695748 NR Description: receptor protein kinase-related [Arabidopsis >gi|26449348|dbj|BAC41801.1| putative receptor protein kinase thaliana] >gi|30102752|gb|AAP21294.1| At5g49760 [Arabidopsis
  misc_feature (1)..(417): Homolog of NCBI NO: 15240547 NR Description: leucine-rich repeat transmembrane protein kinase, protein id: At5g49770.1 [Arabidopsis thaliana]
  misc_feature (24)..(915): Homolog of NCBI NO: 30679474 NR Description: leucine-rich repeat transmembrane protein kinase,
MSSRIEVFVLLILLSFQFCSVSAQTNGFDADALQYLKSSLTIPPRNWKGYDPCGTNWVGIACEYGRVVNISLGNLNLEGKLPAFITTLSELHTLDLTSNPNLTGPLPLNIGNLKELTNLNLMGCGFSGQIPESIGSLEQLVTLSLNSNKFNGTIPASIGLLSKLYWFDIADNQIEGKLPVSDGASLPGLDMLLQTKHFHFGKNKLSGDIPEKLFSANMTLKHLLFDGNLLTGEIPQSLSLVKTLTVLRLDRNRLSGEIPPSLNNLTNLQELYLSDNKFTGSLPSLTSLTSLSTLRMAGLQLQGPIPTSLFSLPELQTVILKRNWLNETLDFGTNKSQNLDFVDLQYNDITEYIKQPANKGSSRIVILANNPVCPEVGNPPNEYCIEVEHNSSYSSPKNTCGRCSGEDREPIPTTCRCVYPITGTLTFRSPSFSGYSNNDTFENLRLNLTGFFENRNYTVDSVAIRNIREDEDDHYLLIDLSLFPYKQDRFNETGMDSVISRFSTQTYKPPNTFGPYIFKANKYNKFPAGGSNSSHIIGAVVGSTVFLLILMIAGIYALKQKRRAEKANDQINPFAKWDANQNSVDAPQLMGTKAFTFEEMRKCANNFSVANDVGGGGYGQVYKGILPSGQLIAIKRAQPGSLQGALEFKTEIELLSRVHHKNVVKLLGFCFDRGEQMLVYEYIPNGSLRDSLSGKSGIRLDWTRRLRIALGSGKGLAYLHELADPPIIHRDVKSSNVLLDESLTAKVADFGLSQLVEDAEKANVTAQVKGTMGYLDPEYYMTNQLTEKSDVYGFGVMMLELLTGKIPIENGKYVVKEMKMKMNKSKNLYDLQDFLDTTISATSNRNLKGFEKYVDVALRCVDPEGVKRPSMNEVVKEIENIMQYAGLNPNVESYASSRTYDEASKESGDLYGNNSFEYSASFPTTNLEPQ

SEQ ID NO: 72899 - protein, 809 aa, Arabidopsis thaliana
  peptide (1)..(809): Ceres Seq. ID no. 4951084
  misc_feature (486)..(686): Pfam Name: Protein kinase domain Pfam Description: Protein kinase domain
  misc_feature (1)..(809): Homolog of NCBI NO: 30695748 NR Description: receptor protein kinase-related [Arabidopsis >gi|26449348|dbj|BAC41801.1| putative receptor protein kinase thaliana] >gi|30102752|gb|AAP21294.1| At5g49760 [Arabidopsis
  misc_feature (1)..(803): Homolog of NCBI NO: 15240547 NR Description: leucine-rich repeat transmembrane protein kinase, protein id: At5g49770.1 [Arabidopsis thaliana]
  misc_feature (1)..(809): Homolog of NCBI NO: 30699436 NR Description: leucine-rich repeat transmembrane protein kinase, [Arabidopsis thaliana] >gi|26450791|dbj|BAC42504.1| unknown
  misc_feature (1)..(809): Homolog of NCBI NO: 7715608 NR Description: F20B17.5 [Arabidopsis thaliana]
  misc_feature (29)..(809): Homolog of NCBI NO: 34909240 NR Description: putative receptor protein kinase [Oryza sativa
  misc_feature (1)..(775): Homolog of NCBI NO: 34905792 NR Description: P0401G10.22 [Oryza sativa (japonica
  misc_feature (1)..(762): Homolog of NCBI NO: 15222211 NR Description: leucine-rich repeat transmembrane protein kinase,
  misc_feature (1)..(330): Homolog of NCBI NO: 30695748 NR Description: receptor protein kinase-related [Arabidopsis >gi|26449348|dbj|BAC41801.1| putative receptor protein kinase thaliana] >gi|30102752|gb|AAP21294.1| At5g49760 [Arabidopsis
  misc_feature (1)..(296): Homolog of NCBI NO: 15240547 NR Description: leucine-rich repeat transmembrane protein kinase, protein id: At5g49770.1 [Arabidopsis thaliana]
  misc_feature (1)..(794): Homolog of NCBI NO: 30679474 NR Description: leucine-rich repeat transmembrane protein kinase,
MGCGFSGQIPESIGSLEQLVTLSLNSNKFNGTIPASIGLLSKLYWFDIADNQIEGKLPVSDGASLPGLDMLLQTKHFHFGKNKLSGDIPEKLFSANMTLKHLLFDGNLLTGEIPQSLSLVKTLTVLRLDRNRLSGEIPPSLNNLTNLQELYLSDNKFTGSLPSLTSLTSLSTLRMAGLQLQGPIPTSLFSLPELQTVILKRNWLNETLDFGTNKSQNLDFVDLQYNDITEYIKQPANKGSSRIVILANNPVCPEVGNPPNEYCIEVEHNSSYSSPKNTCGRCSGEDREPIPTTCRCVYPITGTLTFRSPSFSGYSNNDTFENLRLNLTGFFENRNYTVDSVAIRNIREDEDDHYLLIDLSLFPYKQDRFNETGMDSVISRFSTQTYKPPNTFGPYIFKANKYNKFPAGGSNSSHIIGAVVGSTVFLLILMIAGIYALKQKRRAEKANDQINPFAKWDANQNSVDAPQLMGTKAFTFEEMRKCANNFSVANDVGGGGYGQVYKGILPSGQLIAIKRAQPGSLQGALEFKTEIELLSRVHHKNVVKLLGFCFDRGEQMLVYEYIPNGSLRDSLSGKSGIRLDWTRRLRIALGSGKGLAYLHELADPPIIHRDVKSSNVLLDESLTAKVADFGLSQLVEDAEKANVTAQVKGTMGYLDPEYYMTNQLTEKSDVYGFGVMMLELLTGKIPIENGKYVVKEMKMKMNKSKNLYDLQDFLDTTISATSNRNLKGFEKYVDVALRCVDPEGVKRPSMNEVVKEIENIMQYAGLNPNVESYASSRTYDEASKESGDLYGNNSFEYSASFPTTNLEPQ

SEQ ID NO: 72900 - DNA, 2826 bp, Arabidopsis thaliana
  misc_feature (1)..(2826): Ceres Seq. ID no. 4951156
  misc_feature: MA Experiment ID: 20000173 Result: Down-regulated in Transcription
  misc_feature: MA Experiment 20000173 PARAMETER Experiment Name: At_42deg_Heat_P Parameter: Age (day) Value: 14
  misc_feature: MA Experiment 20000173 PARAMETER Experiment Name: At_42deg_Heat_P Parameter: Organism Value: A. thaliana
  misc_feature: MA Experiment 20000173 PARAMETER Experiment Name: At_42deg_Heat_P Parameter: Plant Line Value: WS
  misc_feature: MA Experiment 20000173 PARAMETER Experiment Name: At_42deg_Heat_P Parameter: Temperature (deg C) Value: 42 vs. 22
  misc_feature: MA Experiment 20000173 PARAMETER Experiment Name: At_42deg_Heat_P Parameter: Timepoint (hr) Value: 6
  misc_feature: MA Experiment 20000173 PARAMETER Experiment Name: At_42deg_Heat_P Parameter: Tissue Value: Aerial
  misc_feature: MA Experiment ID: 20000184 Result: Down-regulated in Transcription
  misc_feature: MA Experiment 20000184 PARAMETER Experiment Name: At_Shoots__P Parameter: Age (day) Value: 7
  misc_feature: MA Experiment 20000184 PARAMETER Experiment Name: At_Shoots__P Parameter: Tissue Value: Shoots vs. Whole Plant
  misc_feature: MA Experiment ID: 20000234 Result: Down-regulated in Transcription
  misc_feature: MA Experiment 20000234 PARAMETER Experiment Name: At_Siliques_P Parameter: Age (day) Value: 21
  misc_feature: MA Experiment 20000234 PARAMETER Experiment Name: At_Siliques_P Parameter: Organism Value: A. thaliana
  misc_feature: MA Experiment 20000234 PARAMETER Experiment Name: At_Siliques_P Parameter: Plant Line Value: WS
  misc_feature: MA Experiment 20000234 PARAMETER Experiment Name: At_Siliques_P Parameter: Tissue Value: Less Than 5mm Siliques vs. Whole Plant
  misc_feature: MA Experiment ID: 20001560 Result: Down-regulated in Transcription
  misc_feature: MA Experiment 20001560 PARAMETER Experiment Name: At_Drought_Soil_Dry_P Parameter: Age (day) Value: 28
  misc_feature: MA Experiment 20001560 PARAMETER Experiment Name: At_Drought_Soil_Dry_P Parameter: Organism Value: A. thaliana
  misc_feature: MA Experiment 20001560 PARAMETER Experiment Name: At_Drought_Soil_Dry_P Parameter: Plant Line Value: WS
  misc_feature: MA Experiment 20001560 PARAMETER Experiment Name: At_Drought_Soil_Dry_P Parameter: Post Timepoint (hr) Value: None
  misc_feature: MA Experiment 20001560 PARAMETER Experiment Name: At_Drought_Soil_Dry_P Parameter: Post-Treatment Value: None
  misc_feature: MA Experiment 20001560 PARAMETER Experiment Name: At_Drought_Soil_Dry_P Parameter: Timepoint (day) Value: 14
  misc_feature: MA Experiment 20001560 PARAMETER Experiment Name: At_Drought_Soil_Dry_P Parameter: Treatment Value: Drought vs. No Drought
atgagttcaagaactggagcctctttgctcctgatcttgtttttcttccaaatttgttctgtttcggcactcacgaatggtttagacgcttctgctttaaatgctctgaagagtgaatggaccactcctcctgatggttgggaaggctctgatccttgtggaaccaattgggttggaattacatgtcaaaatgaccgcgtcgtttcaatatcactaggtaaccttgacttggaaggaaagcttcctgccgatatatcgttcttgtccgagttgcggatcttggatttgtcatacaatcctaaattgtccggaccgcttccaccaaacatcggtaaccttgggaagttaaggaacttgatccttgtgggatgtagtttcagtggtcaaatccctgagtccattggaactctaaaagaacttatatatctctccctaaatttaaataaatttagtggaacaattccgccttcaattggcctgttatcaaaactatattggtttgatatagctgacaatcagattgaaggagagcttccagtttctaatgggacttctgcacctggacttgacatgcttcttcaaactaagcattttcattttggaaaaaacaagctttcaggcaatatcccaaaagaacttttcagctcaaacatgagtttaatacatgtcctcttcgatggaaaccaattcacgggcgaaattccagagaccctcagtctcgttaaaacgttgacggtgttacgccttgataggaacaaactcattggagatattccttcatatcttaacaatctcacaaatcttaacgaactgtacttggccaacaacagatttactggtactcttccaaatttaaccagcttgaccagtctctacacattaaggatggaagggatccaacttaatggtccaataccaatctcatttttcagccctcctcagttgcagactgttatcttaaagcgaaatagtatagtggaaagcttagactttggtacagacgttagcagccagttggagtttgtggatttacaatacaatgaaataactgattataaaccatcagctaataaagtcctccaagtaatattggcaaataatccagtgtgtctagaggcgggaaacgggccgagttactgttcagcaatccaacacaatacctcattttctacactcccaacaaactgttctccatgcgaaccgggcatggaagcgagtcccacgtgccgctgtgcgtatccattcatgggaacactctacttccggtctccttctttctcagggttgttcaactccaccaacttctcaattctacagaaggcaatcgcggatttctttaagaagttcaattatcctgtagactccgttggtgttcggaacataagagagaatccaactgatcatcagcttctaatagatctattggtctttccattgggaagagagagttttaatcagacaggaatgtcacttgttggttttgcatttagcaaccagacttataagcctcctccgatatttggcccttatattttcaaagctgatttgtacaaacagttctctgatgtagaagtttcatcaaagtcatcaaacaaaagcattctcattggagcagtagttggtgttgttgttcttctactattgttaacaatagctgggatttacgctcttaggcagaagaagagagctgaaagagcaactggtcaaaataatccttttgctaaatgggatacaagtaagagtagtattgatgctccgcagctaatgggagcaaaagcgtttacttttgaggagctgaagaaatgcactgacaacttttcagaggcaaatgatgttggcggtggaggttacggcaaggtttatagagggattcttcctaatgggcaactcatagcaatcaaaagggctcaacaaggatctttgcaaggagggttggagttcaaaactgagattgagcttctctcaagggtccatcataagaatgttgtcagactcttgggcttctgctttgaccggaatgaacaaatgctcgtatacgagtacatttcaaatgggtcacttaaagacagtctgtccgggaagagtgggattcgattggattggacaagaagacttaaaatagcacttggttcaggcaagggcttggcttatcttcatgaacttgctgatcctccaattatacatagagacatcaaatcaaataacatattacttgatgaaaatctaaccgcaaaggttgccgacttcggtctctccaaacttgtgggagaccctgagaaaactcatgtcacaacacaagtcaaaggaaccatgggctacttggatccagagtactacatgacgaatcaattaacggagaagagcgatgtgtatgggtttggtgtggttttactcgagctattaaccggtagaagtccgatagagagaggcaaatatgtggtgagagaggtgaagacaaagatgaataaatctcggagtttgtatgacctgcaggagttgttggacacaacgatcatagcaagcagtgggaatctaaaagggttcgagaagtatgtagacttggctttgagatgtgtggaggaggaaggagttaataggccatcaatgggtgaggttgtgaaagagattgagaacataatgcagcttgcgggattaaatcctaactcagattcagcaacgagttcaagaacgtatgaggacgcaatcaaaggatctgatgaatggagagccaaacgcagaatcaaaaaccaccagatctttggcaatgtcgacaccagtttcaaacataagaaaagtaatcaagctcaatgtatgatgaataattga

SEQ ID NO: 72901 - protein, 941 aa, Arabidopsis thaliana
  peptide (1)..(941): Ceres Seq. ID no. 4951157
  misc_feature (606)..(806): Pfam Name: Protein kinase domain Pfam Description: Protein kinase domain
  misc_feature (73)..(901): Homolog of NCBI NO: 15240547 NR Description: leucine-rich repeat transmembrane protein kinase, protein id: At5g49770.1 [Arabidopsis thaliana]
  misc_feature (69)..(897): Homolog of NCBI NO: 30699436 NR Description: leucine-rich repeat transmembrane protein kinase, [Arabidopsis thaliana] >gi|26450791|dbj|BAC42504.1| unknown
  misc_feature (69)..(897): Homolog of NCBI NO: 7715608 NR Description: F20B17.5 [Arabidopsis thaliana]
  misc_feature (150)..(906): Homolog of NCBI NO: 34909240 NR Description: putative receptor protein kinase [Oryza sativa
  misc_feature (1)..(351): Homolog of NCBI NO: 30695748 NR Description: receptor protein kinase-related [Arabidopsis >gi|26449348|dbj|BAC41801.1| putative receptor protein kinase thaliana] >gi|30102752|gb|AAP21294.1| At5g49760 [Arabidopsis
  misc_feature (32)..(922): Homolog of NCBI NO: 15222211 NR Description: leucine-rich repeat transmembrane protein kinase,
  misc_feature (47)..(881): Homolog of NCBI NO: 30679474 NR Description: leucine-rich repeat transmembrane protein kinase,
  misc_feature (11)..(924): Homolog of NCBI NO: 34905792 NR Description: P0401G10.22 [Oryza sativa (japonica
  misc_feature (1)..(349): Homolog of NCBI NO: 15240547 NR Description: leucine-rich repeat transmembrane protein kinase, protein id: At5g49770.1 [Arabidopsis thaliana]
  misc_feature (116)..(881): Homolog of NCBI NO: 11346408 NR Description: hypothetical protein T20L15.220 - Arabidopsis >gi|7329668|emb|CAB82765.1| putative protein [Arabidopsis
MSSRTGASLLLILFFFQICSVSALTNGLDASALNALKSEWTTPPDGWEGSDPCGTNWVGITCQNDRVVSISLGNLDLEGKLPADISFLSELRILDLSYNPKLSGPLPPNIGNLGKLRNLILVGCSFSGQIPESIGTLKELIYLSLNLNKFSGTIPPSIGLLSKLYWFDIADNQIEGELPVSNGTSAPGLDMLLQTKHFHFGKNKLSGNIPKELFSSNMSLIHVLFDGNQFTGEIPETLSLVKTLTVLRLDRNKLIGDIPSYLNNLTNLNELYLANNRFTGTLPNLTSLTSLYTLRMEGIQLNGPIPISFFSPPQLQTVILKRNSIVESLDFGTDVSSQLEFVDLQYNEITDYKPSANKVLQVILANNPVCLEAGNGPSYCSAIQHNTSFSTLPTNCSPCEPGMEASPTCRCAYPFMGTLYFRSPSFSGLFNSTNFSILQKAIADFFKKFNYPVDSVGVRNIRENPTDHQLLIDLLVFPLGRESFNQTGMSLVGFAFSNQTYKPPPIFGPYIFKADLYKQFSDVEVSSKSSNKSILIGAVVGVVVLLLLLTIAGIYALRQKKRAERATGQNNPFAKWDTSKSSIDAPQLMGAKAFTFEELKKCTDNFSEANDVGGGGYGKVYRGILPNGQLIAIKRAQQGSLQGGLEFKTEIELLSRVHHKNVVRLLGFCFDRNEQMLVYEYISNGSLKDSLSGKSGIRLDWTRRLKIALGSGKGLAYLHELADPPIIHRDIKSNNILLDENLTAKVADFGLSKLVGDPEKTHVTTQVKGTMGYLDPEYYMTNQLTEKSDVYGFGVVLLELLTGRSPIERGKYVVREVKTKMNKSRSLYDLQELLDTTIIASSGNLKGFEKYVDLALRCVEEEGVNRPSMGEVVKEIENIMQLAGLNPNSDSATSSRTYEDAIKGSDEWRAKRRIKNHQIFGNVDTSFKHKKSNQAQCMMNN

SEQ ID NO: 72902 - protein, 751 aa, Arabidopsis thaliana
  peptide (1)..(751): Ceres Seq. ID no. 4951158
  misc_feature (416)..(616): Pfam Name: Protein kinase domain Pfam Description: Protein kinase domain
  misc_feature (1)..(711): Homolog of NCBI NO: 15240547 NR Description: leucine-rich repeat transmembrane protein kinase, protein id: At5g49770.1 [Arabidopsis thaliana]
  misc_feature (1)..(707): Homolog of NCBI NO: 30699436 NR Description: leucine-rich repeat transmembrane protein kinase, [Arabidopsis thaliana] >gi|26450791|dbj|BAC42504.1| unknown
  misc_feature (1)..(707): Homolog of NCBI NO: 7715608 NR Description: F20B17.5 [Arabidopsis thaliana]
  misc_feature (1)..(716): Homolog of NCBI NO: 34909240 NR Description: putative receptor protein kinase [Oryza sativa
  misc_feature (1)..(161): Homolog of NCBI NO: 30695748 NR Description: receptor protein kinase-related [Arabidopsis >gi|26449348|dbj|BAC41801.1| putative receptor protein kinase thaliana] >gi|30102752|gb|AAP21294.1| At5g49760 [Arabidopsis
  misc_feature (1)..(732): Homolog of NCBI NO: 15222211 NR Description: leucine-rich repeat transmembrane protein kinase,
  misc_feature (1)..(691): Homolog of NCBI NO: 30679474 NR Description: leucine-rich repeat transmembrane protein kinase,
  misc_feature (1)..(734): Homolog of NCBI NO: 34905792 NR Description: P0401G10.22 [Oryza sativa (japonica
  misc_feature (1)..(159): Homolog of NCBI NO: 15240547 NR Description: leucine-rich repeat transmembrane protein kinase, protein id: At5g49770.1 [Arabidopsis thaliana]
  misc_feature (1)..(691): Homolog of NCBI NO: 11346408 NR Description: hypothetical protein T20L15.220 - Arabidopsis >gi|7329668|emb|CAB82765.1| putative protein [Arabidopsis
MLLQTKHFHFGKNKLSGNIPKELFSSNMSLIHVLFDGNQFTGEIPETLSLVKTLTVLRLDRNKLIGDIPSYLNNLTNLNELYLANNRFTGTLPNLTSLTSLYTLRMEGIQLNGPIPISFFSPPQLQTVILKRNSIVESLDFGTDVSSQLEFVDLQYNEITDYKPSANKVLQVILANNPVCLEAGNGPSYCSAIQHNTSFSTLPTNCSPCEPGMEASPTCRCAYPFMGTLYFRSPSFSGLFNSTNFSILQKAIADFFKKFNYPVDSVGVRNIRENPTDHQLLIDLLVFPLGRESFNQTGMSLVGFAFSNQTYKPPPIFGPYIFKADLYKQFSDVEVSSKSSNKSILIGAVVGVVVLLLLLTIAGIYALRQKKRAERATGQNNPFAKWDTSKSSIDAPQLMGAKAFTFEELKKCTDNFSEANDVGGGGYGKVYRGILPNGQLIAIKRAQQGSLQGGLEFKTEIELLSRVHHKNVVRLLGFCFDRNEQMLVYEYISNGSLKDSLSGKSGIRLDWTRRLKIALGSGKGLAYLHELADPPIIHRDIKSNNILLDENLTAKVADFGLSKLVGDPEKTHVTTQVKGTMGYLDPEYYMTNQLTEKSDVYGFGVVLLELLTGRSPIERGKYVVREVKTKMNKSRSLYDLQELLDTTIIASSGNLKGFEKYVDLALRCVEEEGVNRPSMGEVVKEIENIMQLAGLNPNSDSATSSRTYEDAIKGSDEWRAKRRIKNHQIFGNVDTSFKHKKSNQAQCMMNN

SEQ ID NO: 72903 - protein, 724 aa, Arabidopsis thaliana
  peptide (1)..(724): Ceres Seq. ID no. 4951159
  misc_feature (389)..(589): Pfam Name: Protein kinase domain Pfam Description: Protein kinase domain
  misc_feature (1)..(684): Homolog of NCBI NO: 15240547 NR Description: leucine-rich repeat transmembrane protein kinase, protein id: At5g49770.1 [Arabidopsis thaliana]
  misc_feature (1)..(680): Homolog of NCBI NO: 30699436 NR Description: leucine-rich repeat transmembrane protein kinase, [Arabidopsis thaliana] >gi|26450791|dbj|BAC42504.1| unknown
  misc_feature (1)..(680): Homolog of NCBI NO: 7715608 NR Description: F20B17.5 [Arabidopsis thaliana]
  misc_feature (1)..(689): Homolog of NCBI NO: 34909240 NR Description: putative receptor protein kinase [Oryza sativa
  misc_feature (1)..(134): Homolog of NCBI NO: 30695748 NR Description: receptor protein kinase-related [Arabidopsis >gi|26449348|dbj|BAC41801.1| putative receptor protein kinase thaliana] >gi|30102752|gb|AAP21294.1| At5g49760 [Arabidopsis
  misc_feature (1)..(705): Homolog of NCBI NO: 15222211 NR Description: leucine-rich repeat transmembrane protein kinase,
  misc_feature (1)..(664): Homolog of NCBI NO: 30679474 NR Description: leucine-rich repeat transmembrane protein kinase,
  misc_feature (1)..(707): Homolog of NCBI NO: 34905792 NR Description: P0401G10.22 [Oryza sativa (japonica
  misc_feature (1)..(132): Homolog of NCBI NO: 15240547 NR Description: leucine-rich repeat transmembrane protein kinase, protein id: At5g49770.1 [Arabidopsis thaliana]
  misc_feature (1)..(664): Homolog of NCBI NO: 11346408 NR Description: hypothetical protein T20L15.220 - Arabidopsis >gi|7329668|emb|CAB82765.1| putative protein [Arabidopsis
MSLIHVLFDGNQFTGEIPETLSLVKTLTVLRLDRNKLIGDIPSYLNNLTNLNELYLANNRFTGTLPNLTSLTSLYTLRMEGIQLNGPIPISFFSPPQLQTVILKRNSIVESLDFGTDVSSQLEFVDLQYNEITDYKPSANKVLQVILANNPVCLEAGNGPSYCSAIQHNTSFSTLPTNCSPCEPGMEASPTCRCAYPFMGTLYFRSPSFSGLFNSTNFSILQKAIADFFKKFNYPVDSVGVRNIRENPTDHQLLIDLLVFPLGRESFNQTGMSLVGFAFSNQTYKPPPIFGPYIFKADLYKQFSDVEVSSKSSNKSILIGAVVGVVVLLLLLTIAGIYALRQKKRAERATGQNNPFAKWDTSKSSIDAPQLMGAKAFTFEELKKCTDNFSEANDVGGGGYGKVYRGILPNGQLIAIKRAQQGSLQGGLEFKTEIELLSRVHHKNVVRLLGFCFDRNEQMLVYEYISNGSLKDSLSGKSGIRLDWTRRLKIALGSGKGLAYLHELADPPIIHRDIKSNNILLDENLTAKVADFGLSKLVGDPEKTHVTTQVKGTMGYLDPEYYMTNQLTEKSDVYGFGVVLLELLTGRSPIERGKYVVREVKTKMNKSRSLYDLQELLDTTIIASSGNLKGFEKYVDLALRCVEEEGVNRPSMGEVVKEIENIMQLAGLNPNSDSATSSRTYEDAIKGSDEWRAKRRIKNHQIFGNVDTSFKHKKSNQAQCMMNN

SEQ ID NO: 72904 - DNA, 2688 bp, Arabidopsis thaliana
  misc_feature (1)..(2688): Ceres Seq. ID no. 4951225
  misc_feature: MA Experiment ID: 20000235 Result: Up-regulated in Transcription
  misc_feature: MA Experiment 20000235 PARAMETER Experiment Name: At_Siliques_P Parameter: Age (day) Value: 21
  misc_feature: MA Experiment 20000235 PARAMETER Experiment Name: At_Siliques_P Parameter: Organism Value: A. thaliana
  misc_feature: MA Experiment 20000235 PARAMETER Experiment Name: At_Siliques_P Parameter: Plant Line Value: WS
  misc_feature: MA Experiment 20000235 PARAMETER Experiment Name: At_Siliques_P Parameter: Tissue Value: 5-10mm Siliques vs. Whole Plant
atggcgtcttctaagcataataaactctgttctttcttttatctttgcctcttcttgactttagttgcagctgctgagcctcaaacagaatctcttctcactttaaaatctcaactcaccgacaatttcaacagcttaaaagactggttcatcaacactcctgaagtttccgacaatcttgtcgcttgttgttcttggtctggtgtccgatgtaaccaaaactcaacttctgttgtctccgtcgatctctcttccaagaatctcgctgggagtttatcaggcaaggagttcctcgtcttcaccgaactccttgaactcaacatcagtgacaactcgttttccggcgagtttccggctgagatcttcttcaacatgaccaatctcagaagccttgacattagcagaaacaacttctccggacgtttccctgacggtaacggtggtgactcaagtctcaagaatctgatctttctcgacgccttgagcaatagcttctccggtccattaccgatccatctctctcagttagagaatctcaaggtactgaatctcgctgggagttacttcactggctcgattccgagtcagtacggatctttcaagaatcttgagtttcttcatcttggtgggaatttactaagtggtcacatacctcaagagcttgggaatctcacaactttgactcacatggagattggatataactcatatgaaggagtaatcccttgggaaataggttacatgagtgagctcaagtacctcgacattgctggagctaatctctctggcttcttaccaaagcatttcagcaatctcacaaagcttgaatctttgtttctctttaggaaccatctttctagagaaatcccatgggagcttggagaaattacttctcttgttaacttagacctctcagacaaccatatctctggaaccataccagagagtttttcaggtttgaagaatctcaggcttttgaatcttatgttcaatgaaatgagtgggactctccctgaagtaattgctcagctaccttctttggatactctcttcatatggaacaattacttctctgggtcacttcccaaaagcttggggatgaattcaaagcttagatgggtggacgtttccaccaacagtttccaaggtgaaatcccacaaggtatttgctcaagaggtgttcttttcaagctcattcttttctccaataacttcactggaactctgtctccatctctctcaaattgttcaacgcttgttcgtatccggcttgaagataattcattctcaggtgtgatcccttttagctttagcgagattcctgatatctcatacatagacctctctagaaacaaactcacaggaggtattcctttagatatatccaaagctacaaaacttgactacttcaatatctccaataaccctgagctaggaggcaaacttccaccgcatatttggtctgcgcctagtcttcagaacttctctgcatcatcatgcagtatctctggtggtctccctgtgtttgaatcctgcaaatctatcactgttattgaattgagcaataacaatatatcagggatgttaacaccaactgtttccacttgtggctctcttaagaagatggatttgtcacacaataacttgagaggtgccataccatctgacaaagtgtttcaatcaatggggaaacatgcgtacgagagtaatgcaaacctatgtgggcttcctctgaagtcatgttcagcttacagctcaaggaagcttgtgtctgttctggtagcttgtctagtctctattctgctaatggtagttgcagctttggcattgtactatattcgtcaaagaagtcaaggacaatggaagatggtgtctttcgcgggactccctcatttcacagcagatgatgttttgaggagctttggttcacccgaacctagtgaagcagttccagcttcagtgagcaaagcagttctgccaacaggaataacagtcatagtgagaaaaattgagttgcatgacaagaagaagagtgttgtcctgaacgttttaacgcagatggggaatgcaagacatgtaaatctggtcagattgctcgggttttgttacaacaatcatcttgtgtatgtgttgtatgataataacctgcataccgggacgactctagctgagaaaatgaagacaaagaagaaagattggcaaactaagaagaggatcatcactggtgttgctaagggactttgctttcttcaccatgaatgtttgcctgcaattcctcatggagatgtgaagtcgtctaatatattattcgatgacgataagatagagccctgcttgggtgaatttgggttcaaatacatgctacatttgaacacagatcagatgaacgatgttataagagtggagaagcaaaaggacgtctacaactttggacaacttattttggaaatcttaacaaatggtaagctgatgaatgccggtggattgatgatacagaacaagccaaaggatggtcttctaagagaagtatacacagaaaacgaagtgagttcaagtgattttaaacaaggagaagttaaaagagttgttgaggtcgcacttctctgcataagaagtgaccagtctgaccgtccttgcatggaagatgcactcaggttattgtctgaagcagagaataggttcaaatag

SEQ ID NO: 72905 - protein, 895 aa, Arabidopsis thaliana
  peptide (1)..(895): Ceres Seq. ID no. 4951226
  misc_feature (652)..(887): Pfam Name: Protein kinase domain Pfam Description: Protein kinase domain
  misc_feature (18)..(554): Homolog of NCBI NO: 15240263 NR Description: leucine-rich receptor-like protein kinase - like
  misc_feature (619)..(822): Homolog of NCBI NO: 15240263 NR Description: leucine-rich receptor-like protein kinase - like
  misc_feature (799)..(895): Homolog of NCBI NO: 15240263 NR Description: leucine-rich receptor-like protein kinase - like
  misc_feature (1)..(555): Homolog of NCBI NO: 27497207 NR Description: Hypothetical protein [Oryza sativa (japonica
  misc_feature (687)..(819): Homolog of NCBI NO: 27497207 NR Description: Hypothetical protein [Oryza sativa (japonica
  misc_feature (799)..(895): Homolog of NCBI NO: 27497207 NR Description: Hypothetical protein [Oryza sativa (japonica
  misc_feature (13)..(554): Homolog of NCBI NO: 15223264 NR Description: CLAVATA1 receptor kinase( CLV1); protein id:
  misc_feature (680)..(871): Homolog of NCBI NO: 15223264 NR Description: CLAVATA1 receptor kinase( CLV1); protein id:
  misc_feature (15)..(554): Homolog of NCBI NO: 34915202 NR Description: putative receptor-like protein kinase 1 [Oryza
  misc_feature (588)..(822): Homolog of NCBI NO: 34915202 NR Description: putative receptor-like protein kinase 1 [Oryza
MASSKHNKLCSFFYLCLFLTLVAAAEPQTESLLTLKSQLTDNFNSLKDWFINTPEVSDNLVACCSWSGVRCNQNSTSVVSVDLSSKNLAGSLSGKEFLVFTELLELNISDNSFSGEFPAEIFFNMTNLRSLDISRNNFSGRFPDGNGGDSSLKNLIFLDALSNSFSGPLPIHLSQLENLKVLNLAGSYFTGSIPSQYGSFKNLEFLHLGGNLLSGHIPQELGNLTTLTHMEIGYNSYEGVIPWEIGYMSELKYLDIAGANLSGFLPKHFSNLTKLESLFLFRNHLSREIPWELGEITSLVNLDLSDNHISGTIPESFSGLKNLRLLNLMFNEMSGTLPEVIAQLPSLDTLFIWNNYFSGSLPKSLGMNSKLRWVDVSTNSFQGEIPQGICSRGVLFKLILFSNNFTGTLSPSLSNCSTLVRIRLEDNSFSGVIPFSFSEIPDISYIDLSRNKLTGGIPLDISKATKLDYFNISNNPELGGKLPPHIWSAPSLQNFSASSCSISGGLPVFESCKSITVIELSNNNISGMLTPTVSTCGSLKKMDLSHNNLRGAIPSDKVFQSMGKHAYESNANLCGLPLKSCSAYSSRKLVSVLVACLVSILLMVVAALALYYIRQRSQGQWKMVSFAGLPHFTADDVLRSFGSPEPSEAVPASVSKAVLPTGITVIVRKIELHDKKKSVVLNVLTQMGNARHVNLVRLLGFCYNNHLVYVLYDNNLHTGTTLAEKMKTKKKDWQTKKRIITGVAKGLCFLHHECLPAIPHGDVKSSNILFDDDKIEPCLGEFGFKYMLHLNTDQMNDVIRVEKQKDVYNFGQLILEILTNGKLMNAGGLMIQNKPKDGLLREVYTENEVSSSDFKQGEVKRVVEVALLCIRSDQSDRPCMEDALRLLSEAENRFK

SEQ ID NO: 72906 - protein, 771 aa, Arabidopsis thaliana
  peptide (1)..(771): Ceres Seq. ID no. 4951227
  misc_feature (528)..(763): Pfam Name: Protein kinase domain Pfam Description: Protein kinase domain
  misc_feature (1)..(430): Homolog of NCBI NO: 15240263 NR Description: leucine-rich receptor-like protein kinase - like
  misc_feature (495)..(698): Homolog of NCBI NO: 15240263 NR Description: leucine-rich receptor-like protein kinase - like
  misc_feature (675)..(771): Homolog of NCBI NO: 15240263 NR Description: leucine-rich receptor-like protein kinase - like
  misc_feature (1)..(431): Homolog of NCBI NO: 27497207 NR Description: Hypothetical protein [Oryza sativa (japonica
  misc_feature (563)..(695): Homolog of NCBI NO: 27497207 NR Description: Hypothetical protein [Oryza sativa (japonica
  misc_feature (675)..(771): Homolog of NCBI NO: 27497207 NR Description: Hypothetical protein [Oryza sativa (japonica
  misc_feature (1)..(430): Homolog of NCBI NO: 15223264 NR Description: CLAVATA1 receptor kinase( CLV1); protein id:
  misc_feature (556)..(747): Homolog of NCBI NO: 15223264 NR Description: CLAVATA1 receptor kinase( CLV1); protein id:
  misc_feature (1)..(430): Homolog of NCBI NO: 34915202 NR Description: putative receptor-like protein kinase 1 [Oryza
  misc_feature (464)..(698): Homolog of NCBI NO: 34915202 NR Description: putative receptor-like protein kinase 1 [Oryza
MTNLRSLDISRNNFSGRFPDGNGGDSSLKNLIFLDALSNSFSGPLPIHLSQLENLKVLNLAGSYFTGSIPSQYGSFKNLEFLHLGGNLLSGHIPQELGNLTTLTHMEIGYNSYEGVIPWEIGYMSELKYLDIAGANLSGFLPKHFSNLTKLESLFLFRNHLSREIPWELGEITSLVNLDLSDNHISGTIPESFSGLKNLRLLNLMFNEMSGTLPEVIAQLPSLDTLFIWNNYFSGSLPKSLGMNSKLRWVDVSTNSFQGEIPQGICSRGVLFKLILFSNNFTGTLSPSLSNCSTLVRIRLEDNSFSGVIPFSFSEIPDISYIDLSRNKLTGGIPLDISKATKLDYFNISNNPELGGKLPPHIWSAPSLQNFSASSCSISGGLPVFESCKSITVIELSNNNISGMLTPTVSTCGSLKKMDLSHNNLRGAIPSDKVFQSMGKHAYESNANLCGLPLKSCSAYSSRKLVSVLVACLVSILLMVVAALALYYIRQRSQGQWKMVSFAGLPHFTADDVLRSFGSPEPSEAVPASVSKAVLPTGITVIVRKIELHDKKKSVVLNVLTQMGNARHVNLVRLLGFCYNNHLVYVLYDNNLHTGTTLAEKMKTKKKDWQTKKRIITGVAKGLCFLHHECLPAIPHGDVKSSNILFDDDKIEPCLGEFGFKYMLHLNTDQMNDVIRVEKQKDVYNFGQLILEILTNGKLMNAGGLMIQNKPKDGLLREVYTENEVSSSDFKQGEVKRVVEVALLCIRSDQSDRPCMEDALRLLSEAENRFK

SEQ ID NO: 72907 - protein, 666 aa, Arabidopsis thaliana
  peptide (1)..(666): Ceres Seq. ID no. 4951228
  misc_feature (423)..(658): Pfam Name: Protein kinase domain Pfam Description: Protein kinase domain
  misc_feature (1)..(325): Homolog of NCBI NO: 15240263 NR Description: leucine-rich receptor-like protein kinase - like
  misc_feature (390)..(593): Homolog of NCBI NO: 15240263 NR Description: leucine-rich receptor-like protein kinase - like
  misc_feature (570)..(666): Homolog of NCBI NO: 15240263 NR Description: leucine-rich receptor-like protein kinase - like
  misc_feature (1)..(326): Homolog of NCBI NO: 27497207 NR Description: Hypothetical protein [Oryza sativa (japonica
  misc_feature (458)..(590): Homolog of NCBI NO: 27497207 NR Description: Hypothetical protein [Oryza sativa (japonica
  misc_feature (570)..(666): Homolog of NCBI NO: 27497207 NR Description: Hypothetical protein [Oryza sativa (japonica
  misc_feature (1)..(325): Homolog of NCBI NO: 15223264 NR Description: CLAVATA1 receptor kinase( CLV1); protein id:
  misc_feature (451)..(642): Homolog of NCBI NO: 15223264 NR Description: CLAVATA1 receptor kinase( CLV1); protein id:
  misc_feature (1)..(325): Homolog of NCBI NO: 34915202 NR Description: putative receptor-like protein kinase 1 [Oryza
  misc_feature (359)..(593): Homolog of NCBI NO: 34915202 NR Description: putative receptor-like protein kinase 1 [Oryza
MEIGYNSYEGVIPWEIGYMSELKYLDIAGANLSGFLPKHFSNLTKLESLFLFRNHLSREIPWELGEITSLVNLDLSDNHISGTIPESFSGLKNLRLLNLMFNEMSGTLPEVIAQLPSLDTLFIWNNYFSGSLPKSLGMNSKLRWVDVSTNSFQGEIPQGICSRGVLFKLILFSNNFTGTLSPSLSNCSTLVRIRLEDNSFSGVIPFSFSEIPDISYIDLSRNKLTGGIPLDISKATKLDYFNISNNPELGGKLPPHIWSAPSLQNFSASSCSISGGLPVFESCKSITVIELSNNNISGMLTPTVSTCGSLKKMDLSHNNLRGAIPSDKVFQSMGKHAYESNANLCGLPLKSCSAYSSRKLVSVLVACLVSILLMVVAALALYYIRQRSQGQWKMVSFAGLPHFTADDVLRSFGSPEPSEAVPASVSKAVLPTGITVIVRKIELHDKKKSVVLNVLTQMGNARHVNLVRLLGFCYNNHLVYVLYDNNLHTGTTLAEKMKTKKKDWQTKKRIITGVAKGLCFLHHECLPAIPHGDVKSSNILFDDDKIEPCLGEFGFKYMLHLNTDQMNDVIRVEKQKDVYNFGQLILEILTNGKLMNAGGLMIQNKPKDGLLREVYTENEVSSSDFKQGEVKRVVEVALLCIRSDQSDRPCMEDALRLLSEAENRFK

SEQ ID NO: 72908 - DNA, 723 bp, Arabidopsis thaliana
  misc_feature (1)..(723): Ceres Seq. ID no. 4951242
  misc_feature: MA Experiment ID: 108434 Result: Up-regulated in Transcription
  misc_feature: MA Experiment 108434 PARAMETER Experiment Name: At_Root_Tips_cDNA_P Parameter: Tissue Value: Root Tips
  misc_feature: MA Experiment ID: 108462 Result: Down-regulated in Transcription
  misc_feature: MA Experiment 108462 PARAMETER Experiment Name: At_Germinating_Seeds_cDNA_P Parameter: Age (day) Value: 2 vs. 0
  misc_feature: MA Experiment 108462 PARAMETER Experiment Name: At_Germinating_Seeds_cDNA_P Parameter: Tissue Value: Germinating Seeds
  misc_feature: MA Experiment ID: 108463 Result: Down-regulated in Transcription
  misc_feature: MA Experiment 108463 PARAMETER Experiment Name: At_Germinating_Seeds_cDNA_P Parameter: Age (day) Value: 3 vs. 0
  misc_feature: MA Experiment 108463 PARAMETER Experiment Name: At_Germinating_Seeds_cDNA_P Parameter: Tissue Value: Germinating Seeds
  misc_feature: MA Experiment ID: 108577 Result: Down-regulated in Transcription
  misc_feature: MA Experiment 108577 PARAMETER Experiment Name: At_42deg_Heat_cDNA_P Parameter: Temperature (deg C) Value: 42 vs. 22
  misc_feature: MA Experiment 108577 PARAMETER Experiment Name: At_42deg_Heat_cDNA_P Parameter: Timepoint (hr) Value: 6
  misc_feature: MA Experiment 108577 PARAMETER Experiment Name: At_42deg_Heat_cDNA_P Parameter: Tissue Value: Aerial
  misc_feature: MA Experiment ID: 20000112 Result: Down-regulated in Transcription
  misc_feature: MA Experiment 20000112 PARAMETER Experiment Name: At_42deg_Heat_cDNA_P Parameter: Temperature (deg C) Value: 42 vs. 22
  misc_feature: MA Experiment 20000112 PARAMETER Experiment Name: At_42deg_Heat_cDNA_P Parameter: Timepoint (hr) Value: 2
  misc_feature: MA Experiment 20000112 PARAMETER Experiment Name: At_42deg_Heat_cDNA_P Parameter: Tissue Value: Aerial
accctaacaccctactaacacctccctctttcaatctccgatcaaatacaaacgcatacttccaatttcgccggcgaagatgcagcagaggaagccgacggcgggtagacccagtggtaccgatggatccgatttctcataccgcatggtcgttgactctcgttacacgaaggtcactaaagaaaaagctcgtctccgtcctttgatctttgttcaggctgcgatttatgtaatcggattatcgtgtgcgtttctaacaacaactaaaaaggatgagaagaacacccttgctattgcagctgctgttgctggcttagtgtgttcattgataggagaattaggttgcagacgtagcagagtaaaccttttgaggctctacacggctgcatcaaccattgttatggttctttctgtgttttgtgctgttaggagcagattaaccatggaggaacgcaatagctctggaacaaccgcgaagcttgagctcgcaggtttcatttgtgctcaattaggagcggtggtgcagatattagcgatcatcgttacagggtcccttgtcaataatatgtctccacctacgaaagcagcatagaggaacataaaatttgggcactgtcgtgtgtgcttctcttaaatgaagaacttaggaatttgtaatttttgaaccatttttgttctctccaccaagtgattagtgttatacaacgttgtttacttcagctt

SEQ ID NO: 72909 - protein, 170 aa, Arabidopsis thaliana; identical to SEQ ID NO: 31072
  peptide (1)..(170): Ceres Seq. ID no. 4951243
  misc_feature (1)..(170): Homolog of NCBI NO: 18423288 NR Description: expressed protein; protein id: At5g51510.1, by cDNA: 20287. [Arabidopsis thaliana] gene_id:K17N15.6~unknown protein [Arabidopsis thaliana]
  misc_feature (1)..(170): Homolog of NCBI NO: 37535924 NR Description: unknown protein [Oryza sativa (japonica

SEQ ID NO: 72910 - protein, 148 aa, Arabidopsis thaliana; identical to SEQ ID NO: 31073
  peptide (1)..(148): Ceres Seq. ID no. 4951244
  misc_feature (1)..(148): Homolog of NCBI NO: 18423288 NR Description: expressed protein; protein id: At5g51510.1, by cDNA: 20287. [Arabidopsis thaliana] gene_id:K17N15.6~unknown protein [Arabidopsis thaliana]
  misc_feature (1)..(148): Homolog of NCBI NO: 37535924 NR Description: unknown protein [Oryza sativa (japonica

SEQ ID NO: 72911 - DNA, 1329 bp, Arabidopsis thaliana
  misc_feature (1)..(1329): Ceres Seq. ID no. 4951332
  misc_feature: MA Experiment ID: 20000171 Result: Up-regulated in Transcription
  misc_feature: MA Experiment 20000171 PARAMETER Experiment Name: At_42deg_Heat_P Parameter: Age (day) Value: 14
  misc_feature: MA Experiment 20000171 PARAMETER Experiment Name: At_42deg_Heat_P Parameter: Organism Value: A. thaliana
  misc_feature: MA Experiment 20000171 PARAMETER Experiment Name: At_42deg_Heat_P Parameter: Plant Line Value: WS
  misc_feature: MA Experiment 20000171 PARAMETER Experiment Name: At_42deg_Heat_P Parameter: Temperature (deg C) Value: 42 vs. 22
  misc_feature: MA Experiment 20000171 PARAMETER Experiment Name: At_42deg_Heat_P Parameter: Timepoint (hr) Value: 1
  misc_feature: MA Experiment 20000171 PARAMETER Experiment Name: At_42deg_Heat_P Parameter: Tissue Value: Aerial
  misc_feature: MA Experiment ID: 20000173 Result: Up-regulated in Transcription
  misc_feature: MA Experiment 20000173 PARAMETER Experiment Name: At_42deg_Heat_P Parameter: Age (day) Value: 14
  misc_feature: MA Experiment 20000173 PARAMETER Experiment Name: At_42deg_Heat_P Parameter: Organism Value: A. thaliana
  misc_feature: MA Experiment 20000173 PARAMETER Experiment Name: At_42deg_Heat_P Parameter: Plant Line Value: WS
  misc_feature: MA Experiment 20000173 PARAMETER Experiment Name: At_42deg_Heat_P Parameter: Temperature (deg C) Value: 42 vs. 22
  misc_feature: MA Experiment 20000173 PARAMETER Experiment Name: At_42deg_Heat_P Parameter: Timepoint (hr) Value: 6
  misc_feature: MA Experiment 20000173 PARAMETER Experiment Name: At_42deg_Heat_P Parameter: Tissue Value: Aerial
  misc_feature: MA Experiment ID: 20000437 Result: Up-regulated in Transcription
  misc_feature: MA Experiment 20000437 PARAMETER Experiment Name: At_Drought_P Parameter: Age (day) Value: 8
  misc_feature: MA Experiment 20000437 PARAMETER Experiment Name: At_Drought_P Parameter: Organism Value: A. thaliana
  misc_feature: MA Experiment 20000437 PARAMETER Experiment Name: At_Drought_P Parameter: Plant Line Value: WS
  misc_feature: MA Experiment 20000437 PARAMETER Experiment Name: At_Drought_P Parameter: Timepoint (hr) Value: 24
  misc_feature: MA Experiment 20000437 PARAMETER Experiment Name: At_Drought_P Parameter: Tissue Value: Whole Plant
  misc_feature: MA Experiment 20000437 PARAMETER Experiment Name: At_Drought_P Parameter: Treatment Value: Drought vs. No Drought
  misc_feature: MA Experiment ID: 20001905 Result: Up-regulated in Transcription
  misc_feature: MA Experiment 20001905 PARAMETER Experiment Name: At_Drought_Reproduction_P Parameter: Age (day) Value: 40
  misc_feature: MA Experiment 20001905 PARAMETER Experiment Name: At_Drought_Reproduction_P Parameter: Organism Value: A. thaliana
  misc_feature: MA Experiment 20001905 PARAMETER Experiment Name: At_Drought_Reproduction_P Parameter: Plant Line Value: WS
  misc_feature: MA Experiment 20001905 PARAMETER Experiment Name: At_Drought_Reproduction_P Parameter: Timepoint (day) Value: 10
  misc_feature: MA Experiment 20001905 PARAMETER Experiment Name: At_Drought_Reproduction_P Parameter: Tissue Value: Rosettes
  misc_feature: MA Experiment 20001905 PARAMETER Experiment Name: At_Drought_Reproduction_P Parameter: Treatment Value: Drought vs. No Drought
atgtcatggtacagaagaacaaaactcgtattcgattccctgcgacgcaacataaacccgaagattctacctcgatctcatgttacttcgagaatcaacaatccaattgggtcttctaatccctcagctaagttctcttcaatctcttcgcgagaagtaggattaagatcatggacatctctcggccgaaacacgaacagaatcgcgtataatccgtttctgagtcaacccaagagatattactacgttgatcgataccaagttcgtcatttcaagccacgaggaccaggacggtggtttcaaaaccctagaactgtgtttacggtggtgctcgttggttccgttggtctgatcactttgattgttgggaatacagaaacgattccgtacacaaagagaacacatttcattctcttatcgaaacctatggagaagcttcttggtgaaactcaatttgagcagattaagaaaacttaccaagggaaaattcttcctgcgactcatcctgagagtatcagggttagattgatagctaaagaggttattgatgcgttacagagaggtttgagtaatgagcgtgtatggagtgatttggggtatgcttctactgagagtagtttgggaggtggtagtgataaaggagttaaggaaatggaaatggctatgagtggtgaagatactatgactgatatgaaatggtctaaagaagatcaggttcttgatgatcaatggattcaaaagagtaggaagaaagattcaaaggctcatgcagcgactagtcatcttgaaggtattagttgggaggttcttgtggttaatgagcctattgttaacgcgttttgtttgcctgctgggaagattgtggtgttcactgggctgcttaatcatttcaagtcagatgctgaagttgccactgtgattgggcatgaggttggtcatgcggtggcccgacatgtagctgagggaataactaagaacttgtggtttgctatccttcaactggtcctatatcagtttgtcatgcctgatcttgtgaacactatgtccgcccttttcttgaggcttcctttctccagaaagatggagatagaagcagactacatcggtttgctgttacttgcatctgcgggctatgacccacgagtagctcccacagtgtatgagaagctgggaaagctcggtggagacgcactcggagattatctatcgacccatccgtcgggaaaaaagagatcaaaacttttggctcaagccaatgtgatggaagaagcactaatgatatatagagaagtccaagcaggtcgtactggcgttgaaggctttctttag

SEQ ID NO: 72912 - protein, 442 aa, Arabidopsis thaliana; identical to SEQ ID NO: 48030
  peptide (1)..(442): Ceres Seq. ID no. 4951333
  misc_feature (1)..(442): Homolog of NCBI NO: 10177873 NR Description: contains similarity to peptidase~gene_id:MIO24.13
  misc_feature (1)..(442): Homolog of NCBI NO: 30696099 NR Description: expressed protein [Arabidopsis thaliana]
  misc_feature (260)..(423): Homolog of NCBI NO: 6322940 NR Description: Hypothetical ORF; Ykr087cp [Saccharomyces
  misc_feature (129)..(184): Homolog of NCBI NO: 6322940 NR Description: Hypothetical ORF; Ykr087cp [Saccharomyces
  misc_feature (258)..(430): Homolog of NCBI NO: 19114452 NR Description: hypothetical peptidase 48 family protein pombe] >gi|7211063|emb|CAB77005.1| hypothetical peptidase 48
  misc_feature (63)..(195): Homolog of NCBI NO: 19114452 NR Description: hypothetical peptidase 48 family protein pombe] >gi|7211063|emb|CAB77005.1| hypothetical peptidase 48
  misc_feature (13)..(182): Homolog of NCBI NO: 40745859 NR Description: hypothetical protein AN1850.2 [Aspergillus
  misc_feature (262)..(415): Homolog of NCBI NO: 40745859 NR Description: hypothetical protein AN1850.2 [Aspergillus
  misc_feature (217)..(429): Homolog of NCBI NO: 23473121 NR Description: hypothetical protein [Desulfovibrio desulfuricans
  misc_feature (216)..(418): Homolog of NCBI NO: 34557683 NR Description: conserved hypothetical protein [Wolinella >gi|34483400|emb|CAE10398.1| conserved hypothetical protein

SEQ ID NO: 72913 - protein, 300 aa, Arabidopsis thaliana; identical to SEQ ID NO: 48031
  peptide (1)..(300): Ceres Seq. ID no. 4951334
  misc_feature (1)..(300): Homolog of NCBI NO: 10177873 NR Description: contains similarity to peptidase~gene_id:MIO24.13
  misc_feature (1)..(300): Homolog of NCBI NO: 30696099 NR Description: expressed protein [Arabidopsis thaliana]
  misc_feature (118)..(281): Homolog of NCBI NO: 6322940 NR Description: Hypothetical ORF; Ykr087cp [Saccharomyces
  misc_feature (1)..(42): Homolog of NCBI NO: 6322940 NR Description: Hypothetical ORF; Ykr087cp [Saccharomyces
  misc_feature (116)..(288): Homolog of NCBI NO: 19114452 NR Description: hypothetical peptidase 48 family protein pombe] >gi|7211063|emb|CAB77005.1| hypothetical peptidase 48
  misc_feature (1)..(53): Homolog of NCBI NO: 19114452 NR Description: hypothetical peptidase 48 family protein pombe] >gi|7211063|emb|CAB77005.1| hypothetical peptidase 48
  misc_feature (1)..(40): Homolog of NCBI NO: 40745859 NR Description: hypothetical protein AN1850.2 [Aspergillus
  misc_feature (120)..(273): Homolog of NCBI NO: 40745859 NR Description: hypothetical protein AN1850.2 [Aspergillus
  misc_feature (75)..(287): Homolog of NCBI NO: 23473121 NR Description: hypothetical protein [Desulfovibrio desulfuricans
  misc_feature (74)..(276): Homolog of NCBI NO: 34557683 NR Description: conserved hypothetical protein [Wolinella >gi|34483400|emb|CAE10398.1| conserved hypothetical protein

SEQ ID NO: 72914 - protein, 225 aa, Arabidopsis thaliana
  peptide (1)..(225): Ceres Seq. ID no. 4951335
  misc_feature (1)..(225): Homolog of NCBI NO: 10177873 NR Description: contains similarity to peptidase~gene_id:MIO24.13
  misc_feature (1)..(225): Homolog of NCBI NO: 30696099 NR Description: expressed protein [Arabidopsis thaliana]
  misc_feature (43)..(206): Homolog of NCBI NO: 6322940 NR Description: Hypothetical ORF; Ykr087cp [Saccharomyces
  misc_feature (41)..(213): Homolog of NCBI NO: 19114452 NR Description: hypothetical peptidase 48 family protein pombe] >gi|7211063|emb|CAB77005.1| hypothetical peptidase 48
  misc_feature (45)..(198): Homolog of NCBI NO: 40745859 NR Description: hypothetical protein AN1850.2 [Aspergillus
  misc_feature (1)..(212): Homolog of NCBI NO: 23473121 NR Description: hypothetical protein [Desulfovibrio desulfuricans
  misc_feature (1)..(201): Homolog of NCBI NO: 34557683 NR Description: conserved hypothetical protein [Wolinella >gi|34483400|emb|CAE10398.1| conserved hypothetical protein
  misc_feature (48)..(212): Homolog of NCBI NO: 34541762 NR Description: conserved hypothetical protein [Porphyromonas W83] >gi|34398080|gb|AAQ67140.1| conserved hypothetical protein
  misc_feature (50)..(215): Homolog of NCBI NO: 33592558 NR Description: putative lipoprotein [Bordetella pertussis]
  misc_feature (37)..(212): Homolog of NCBI NO: 32034234 NR Description: hypothetical protein [Actinobacillus
MEMAMSGEDTMTDMKWSKEDQVLDDQWIQKSRKKDSKAHAATSHLEGISWEVLVVNEPIVNAFCLPAGKIVVFTGLLNHFKSDAEVATVIGHEVGHAVARHVAEGITKNLWFAILQLVLYQFVMPDLVNTMSALFLRLPFSRKMEIEADYIGLLLLASAGYDPRVAPTVYEKLGKLGGDALGDYLSTHPSGKKRSKLLAQANVMEEALMIYREVQAGRTGVEGFL

SEQ ID NO: 72915 - DNA, 1219 bp, Arabidopsis thaliana
  misc_feature (1)..(1219): Ceres Seq. ID no. 4951360
  misc_feature: MA Experiment ID: 108434 Result: Up-regulated in Transcription
  misc_feature: MA Experiment 108434 PARAMETER Experiment Name: At_Root_Tips_cDNA_P Parameter: Tissue Value: Root Tips
  misc_feature: MA Experiment ID: 108461 Result: Up-regulated in Transcription
  misc_feature: MA Experiment 108461 PARAMETER Experiment Name: At_Germinating_Seeds_cDNA_P Parameter: Age (day) Value: 1 vs. 0
  misc_feature: MA Experiment 108461 PARAMETER Experiment Name: At_Germinating_Seeds_cDNA_P Parameter: Tissue Value: Germinating Seeds
  misc_feature: MA Experiment ID: 20000179 Result: Up-regulated in Transcription
  misc_feature: MA Experiment 20000179 PARAMETER Experiment Name: At_Germinating_Seeds_P Parameter: Age (hr) Value: 6 vs. 0
  misc_feature: MA Experiment 20000179 PARAMETER Experiment Name: At_Germinating_Seeds_P Parameter: Tissue Value: Germinating Seeds
  misc_feature: MA Experiment ID: 20000180 Result: Up-regulated in Transcription
  misc_feature: MA Experiment 20000180 PARAMETER Experiment Name: At_Germinating_Seeds_P Parameter: Age (hr) Value: 24 vs. 0
  misc_feature: MA Experiment 20000180 PARAMETER Experiment Name: At_Germinating_Seeds_P Parameter: Tissue Value: Germinating Seeds
  misc_feature: MA Experiment ID: 20000224 Result: Up-regulated in Transcription
  misc_feature: MA Experiment ID: 20000227 Result: Up-regulated in Transcription
  misc_feature: MA Experiment 20000227 PARAMETER Experiment Name: At_Root-Tips-vs-Tops_P Parameter: Tissue Value: Root Tips vs. Root Tops
  misc_feature: MA Experiment ID: 20001560 Result: Up-regulated in Transcription
  misc_feature: MA Experiment 20001560 PARAMETER Experiment Name: At_Drought_Soil_Dry_P Parameter: Age (day) Value: 28
  misc_feature: MA Experiment 20001560 PARAMETER Experiment Name: At_Drought_Soil_Dry_P Parameter: Organism Value: A. thaliana
  misc_feature: MA Experiment 20001560 PARAMETER Experiment Name: At_Drought_Soil_Dry_P Parameter: Plant Line Value: WS
  misc_feature: MA Experiment 20001560 PARAMETER Experiment Name: At_Drought_Soil_Dry_P Parameter: Post Timepoint (hr) Value: None
  misc_feature: MA Experiment 20001560 PARAMETER Experiment Name: At_Drought_Soil_Dry_P Parameter: Post-Treatment Value: None
  misc_feature: MA Experiment 20001560 PARAMETER Experiment Name: At_Drought_Soil_Dry_P Parameter: Timepoint (day) Value: 14
  misc_feature: MA Experiment 20001560 PARAMETER Experiment Name: At_Drought_Soil_Dry_P Parameter: Treatment Value: Drought vs. No Drought
  misc_feature: Pfam Name: DUF662 Pfam Description: Family of unknown function (DUF662)
aaaatccgggacgataattctcgcacacgttctccatcactttccctcgatccaaaaccagagtgggaactacacgcgaatcgaatcataaatggaatgtgaattttgaaatcgaggaagaagacgaaatcggagcattattggattgagttttgaagtttttaggagaaggaaatgatggcgtcggatccaaaactgaaggctgagatcggagccgatggtcttgcaagagaagctcctgttattgcttacacagagaagataatcgaggaagagcaagttcagctgaggaaatacattgaggagaactatacaaaaattagggatgttgaaagggaatttggaaacctttcaatggaattgaaactcactgctggacctaagaaagcagcaatggaacacttgagaaagaaaatcgaagtctcaactgaaaggatccatgctgctaagttgaaagaagaagaagcgcgaaaggcatttgaagcagcatcaaaagttgtgaaggatgaagaagcaacaaaacagagtctttgcgaagatttaaacagtctggtacaacaaagcagcaatacgcagtacgccagacttgaggaattgaaaagaagactagaagcgttgaatccaaatcgatcatctacttctattcagcaagtgcaagaaccggagactaaatctgtagtagacagcgcaccagcagccaatgcgaaccaaactcacccgggaaaacctgaaaataaccacgggaacgaggaaggtggtaaagaacatggacagagaccagcaacagctgaaggagaatcaaaagcgaaaaagaaaccacagaatcaagggaggggaagaggaattggaataatgaacaaaggcagaggaggttggacaggtgctggattcgatgtcgatggtagaaattgagatacatatatctagataatccatataccgaaagcgtcatttcgaatcagaagtatgtcaaatatattgttaccaggtatgttctatcatcttttaacatcgatggaccagtacgtagccacaaagacttctcattttctcatacacttgtgttactgaaaagaaatccatccaatcatatttggactgttcattgatcatctcttgtgtatgtctccaattttgtgcaattgggtttgatgtaataatctgagaacagttaagtttgattgtctaagaggttagagtgaggcatgattcgttatgg

SEQ ID NO: 72916 - protein, 245 aa, Arabidopsis thaliana; identical to SEQ ID NO: 23394
  peptide (1)..(245): Ceres Seq. ID no. 4951361
  misc_feature: Pfam Name: DUF662 Pfam Description: Family of unknown function (DUF662)
  misc_feature (1)..(245): Homolog of NCBI NO: 18423326 NR Description: expressed protein; protein id: At5g51840.1,
  misc_feature (2)..(245): Homolog of NCBI NO: 21593113 NR Description: unknown [Arabidopsis thaliana]
  misc_feature (1)..(100): Homolog of NCBI NO: 10177883 NR Description: gene_id:MIO24.2~unknown protein [Arabidopsis
  misc_feature (46)..(244): Homolog of NCBI NO: 37531870 NR Description: hypothetical protein [Oryza sativa (japonica group)] >gi|22725983|gb|AAN04983.1| hypothetical protein [Oryza
  misc_feature (6)..(239): Homolog of NCBI NO: 37531870 NR Description: hypothetical protein [Oryza sativa (japonica group)] >gi|22725983|gb|AAN04983.1| hypothetical protein [Oryza

SEQ ID NO: 72917 - protein, 244 aa, Arabidopsis thaliana; identical to SEQ ID NO: 23395
  peptide (1)..(244): Ceres Seq. ID no. 4951362
  misc_feature: Pfam Name: DUF662 Pfam Description: Family of unknown function (DUF662)
  misc_feature (1)..(244): Homolog of NCBI NO: 18423326 NR Description: expressed protein; protein id: At5g51840.1,
  misc_feature (1)..(244): Homolog of NCBI NO: 21593113 NR Description: unknown [Arabidopsis thaliana]
  misc_feature (1)..(99): Homolog of NCBI NO: 10177883 NR Description: gene_id:MIO24.2~unknown protein [Arabidopsis
  misc_feature (45)..(243): Homolog of NCBI NO: 37531870 NR Description: hypothetical protein [Oryza sativa (japonica group)] >gi|22725983|gb|AAN04983.1| hypothetical protein [Oryza
  misc_feature (5)..(238): Homolog of NCBI NO: 37531870 NR Description: hypothetical protein [Oryza sativa (japonica group)] >gi|22725983|gb|AAN04983.1| hypothetical protein [Oryza

SEQ ID NO: 72918 - protein, 185 aa, Arabidopsis thaliana; identical to SEQ ID NO: 23396
  peptide (1)..(185): Ceres Seq. ID no. 4951363
  misc_feature: Pfam Name: DUF662 Pfam Description: Family of unknown function (DUF662)
  misc_feature (1)..(185): Homolog of NCBI NO: 18423326 NR Description: expressed protein; protein id: At5g51840.1,
  misc_feature (1)..(185): Homolog of NCBI NO: 21593113 NR Description: unknown [Arabidopsis thaliana]
  misc_feature (1)..(40): Homolog of NCBI NO: 10177883 NR Description: gene_id:MIO24.2~unknown protein [Arabidopsis
  misc_feature (1)..(184): Homolog of NCBI NO: 37531870 NR Description: hypothetical protein [Oryza sativa (japonica group)] >gi|22725983|gb|AAN04983.1| hypothetical protein [Oryza
  misc_feature (1)..(179): Homolog of NCBI NO: 37531870 NR Description: hypothetical protein [Oryza sativa (japonica group)] >gi|22725983|gb|AAN04983.1| hypothetical protein [Oryza

SEQ ID NO: 72919 - DNA, 786 bp, Arabidopsis thaliana
  misc_feature (1)..(786): Ceres Seq. ID no. 4951576
  misc_feature: MA Experiment ID: 20000173 Result: Up-regulated in Transcription
  misc_feature: MA Experiment 20000173 PARAMETER Experiment Name: At_42deg_Heat_P Parameter: Age (day) Value: 14
  misc_feature: MA Experiment 20000173 PARAMETER Experiment Name: At_42deg_Heat_P Parameter: Organism Value: A. thaliana
  misc_feature: MA Experiment 20000173 PARAMETER Experiment Name: At_42deg_Heat_P Parameter: Plant Line Value: WS
  misc_feature: MA Experiment 20000173 PARAMETER Experiment Name: At_42deg_Heat_P Parameter: Temperature (deg C) Value: 42 vs. 22
  misc_feature: MA Experiment 20000173 PARAMETER Experiment Name: At_42deg_Heat_P Parameter: Timepoint (hr) Value: 6
  misc_feature: MA Experiment 20000173 PARAMETER Experiment Name: At_42deg_Heat_P Parameter: Tissue Value: Aerial
  misc_feature: MA Experiment ID: 20000185 Result: Up-regulated in Transcription
  misc_feature: MA Experiment 20000185 PARAMETER Experiment Name: At_Roots__P Parameter: Age (day) Value: 7 vs. 21
  misc_feature: MA Experiment 20000185 PARAMETER Experiment Name: At_Roots__P Parameter: Organism Value: A. thaliana
  misc_feature: MA Experiment 20000185 PARAMETER Experiment Name: At_Roots__P Parameter: Tissue Value: Roots vs. Whole Plant
  misc_feature: MA Experiment ID: 20000265 Result: Up-regulated in Transcription
  misc_feature: MA Experiment 20000265 PARAMETER Experiment Name: At_Open_Flower_P Parameter: Age (day) Value: 21
  misc_feature: MA Experiment 20000265 PARAMETER Experiment Name: At_Open_Flower_P Parameter: Plant Line Value: WS
  misc_feature: MA Experiment 20000265 PARAMETER Experiment Name: At_Open_Flower_P Parameter: Tissue Value: Closed Flower vs. Whole Plant
  misc_feature: MA Experiment ID: 20000286 Result: Up-regulated in Transcription
  misc_feature: MA Experiment 20000286 PARAMETER Experiment Name: At_Open_Flower_P Parameter: Age (day) Value: 21
  misc_feature: MA Experiment 20000286 PARAMETER Experiment Name: At_Open_Flower_P Parameter: Plant Line Value: WS
  misc_feature: MA Experiment 20000286 PARAMETER Experiment Name: At_Open_Flower_P Parameter: Tissue Value: Half Open vs. Whole Plant
  misc_feature: MA Experiment ID: 20000439 Result: Up-regulated in Transcription
  misc_feature: MA Experiment 20000439 PARAMETER Experiment Name: At_Roots__P Parameter: Age (day) Value: 14 vs. 21
  misc_feature: MA Experiment 20000439 PARAMETER Experiment Name: At_Roots__P Parameter: Organism Value: A. thaliana
  misc_feature: MA Experiment 20000439 PARAMETER Experiment Name: At_Roots__P Parameter: Tissue Value: Roots vs. Whole Plant
  misc_feature: MA Experiment ID: 20000451 Result: Down-regulated in Transcription
  misc_feature: MA Experiment 20000451 PARAMETER Experiment Name: At_CS6879_Shoots-Roots_P Parameter: Age (day) Value: 14
  misc_feature: MA Experiment 20000451 PARAMETER Experiment Name: At_CS6879_Shoots-Roots_P Parameter: Organism Value: A. thaliana
  misc_feature: MA Experiment 20000451 PARAMETER Experiment Name: At_CS6879_Shoots-Roots_P Parameter: Plant Line Value: CS6879 vs. WS
  misc_feature: MA Experiment 20000451 PARAMETER Experiment Name: At_CS6879_Shoots-Roots_P Parameter: Tissue Value: Roots
  misc_feature: MA Experiment ID: 20001910 Result: Down-regulated in Transcription
  misc_feature: MA Experiment 20001910 PARAMETER Experiment Name: At_Drought_Reproduction_P Parameter: Age (day) Value: 37
  misc_feature: MA Experiment 20001910 PARAMETER Experiment Name: At_Drought_Reproduction_P Parameter: Organism Value: A. thaliana
  misc_feature: MA Experiment 20001910 PARAMETER Experiment Name: At_Drought_Reproduction_P Parameter: Plant Line Value: WS
  misc_feature: MA Experiment 20001910 PARAMETER Experiment Name: At_Drought_Reproduction_P Parameter: Timepoint (day) Value: 7
  misc_feature: MA Experiment 20001910 PARAMETER Experiment Name: At_Drought_Reproduction_P Parameter: Tissue Value: Flowers
  misc_feature: MA Experiment 20001910 PARAMETER Experiment Name: At_Drought_Reproduction_P Parameter: Treatment Value: Drought vs. No Drought
atgggtgataaacttcgattatccatcggaattttgggaaacggagcttctctgttgctatatacagctccaatagtaacattttcaagggtgtttaagaagaaaagcacagaggaattctcatgttttccttacgttatgacactctttaactgtttgatatatacttggtacggtttaccgattgtgagtcatctttgggagaatcttcctctcgtcaccattaatggagtcggcatccttctcgaatctatcttcattttcatatatttctactacgcatcaccaaaagaaaaggttggtgttacatttgttccggtgatcgttgggttcggcttaacgacagcaatctcagccttggtatttgacgaccatcgtcaccgaaaatcattcgtcggaagtgttggcctcgtggcttccatctctatgtatggttctcctctcgtcgttatgaagaaagtgatagagacaagaagtgtggaatacatgccgttttacttgtccttcttctcatttctggctagttccctttggttggcatatggcttactcagccatgatctctttcttgcgtcacctaatatggttgcgactccattgggaattctccaacttatcctctacttcaagtacaagaataagaaggatttagcaccaacaacaatggtgatcaccaaacgaaatgatcatgatgacaagaacaaagccacacttgagtttgttgttgacgttgatcgtaatagtgataccaatgagaagaattctaacaatgcctcatcgatctaa

SEQ ID NO: 72920 - protein, 261 aa, Arabidopsis thaliana
  peptide (1)..(261): Ceres Seq. ID no. 4951577
  misc_feature (7)..(98): Pfam Name: MtN3/saliva family Pfam Description: MtN3/saliva family
  misc_feature (1)..(261): Homolog of NCBI NO: 15238678 NR Description: MtN3 protein-like; protein id: At5g53190.1
  misc_feature (1)..(261): Homolog of NCBI NO: 34146818 NR Description: At5g53190 [Arabidopsis thaliana]
  misc_feature (1)..(216): Homolog of NCBI NO: 34904086 NR Description: unnamed protein product [Oryza sativa (japonica group)] >gi|8096648|dbj|BAA96219.1| unnamed protein product
  misc_feature (10)..(215): Homolog of NCBI NO: 18394992 NR Description: expressed protein; protein id: At1g21460.1, by cDNA: 6411. [Arabidopsis thaliana] >gi|21594011|gb|AAM65929.1| [Arabidopsis thaliana] >gi|28393568|gb|AAO42204.1| unknown
  misc_feature (6)..(219): Homolog of NCBI NO: 34907420 NR Description: P0018C10.36 [Oryza sativa (japonica
  misc_feature (10)..(211): Homolog of NCBI NO: 18405611 NR Description: Expressed protein; protein id: At3g28007.1, by cDNA: 22745., supported by cDNA: gi_16226221 [Arabidopsis >gi|16226222|gb|AAL16107.1|AF428275_1 unknown protein
  misc_feature (10)..(211): Homolog of NCBI NO: 21592355 NR Description: contains similarity to nodulin MtN3 protein
  misc_feature (1)..(217): Homolog of NCBI NO: 30684193 NR Description: nodulin MtN3 family protein [Arabidopsis thaliana]
  misc_feature (5)..(215): Homolog of NCBI NO: 18413388 NR Description: putative protein; protein id: At4g10850.1, by cDNA: 33161. [Arabidopsis thaliana] contains similarity to Medicago truncatula MtN3 (GB:Y08726)
  misc_feature (9)..(215): Homolog of NCBI NO: 27754697 NR Description: putative cytochrome c oxidoreductase [Arabidopsis
MGDKLRLSIGILGNGASLLLYTAPIVTFSRVFKKKSTEEFSCFPYVMTLFNCLIYTWYGLPIVSHLWENLPLVTINGVGILLESIFIFIYFYYASPKEKVGVTFVPVIVGFGLTTAISALVFDDHRHRKSFVGSVGLVASISMYGSPLVVMKKVIETRSVEYMPFYLSFFSFLASSLWLAYGLLSHDLFLASPNMVATPLGILQLILYFKYKNKKDLAPTTMVITKRNDHDDKNKATLEFVVDVDRNSDTNEKNSNNASSI

SEQ ID NO: 72921 - protein, 215 aa, Arabidopsis thaliana
  peptide (1)..(215): Ceres Seq. ID no. 4951578
  misc_feature (1)..(52): Pfam Name: MtN3/saliva family Pfam Description: MtN3/saliva family
  misc_feature (1)..(215): Homolog of NCBI NO: 15238678 NR Description: MtN3 protein-like; protein id: At5g53190.1
  misc_feature (1)..(215): Homolog of NCBI NO: 34146818 NR Description: At5g53190 [Arabidopsis thaliana]
  misc_feature (1)..(170): Homolog of NCBI NO: 34904086 NR Description: unnamed protein product [Oryza sativa (japonica group)] >gi|8096648|dbj|BAA96219.1| unnamed protein product
  misc_feature (1)..(169): Homolog of NCBI NO: 18394992 NR Description: expressed protein; protein id: At1g21460.1, by cDNA: 6411. [Arabidopsis thaliana] >gi|21594011|gb|AAM65929.1| [Arabidopsis thaliana] >gi|28393568|gb|AAO42204.1| unknown
  misc_feature (1)..(173): Homolog of NCBI NO: 34907420 NR Description: P0018C10.36 [Oryza sativa (japonica
  misc_feature (1)..(165): Homolog of NCBI NO: 18405611 NR Description: Expressed protein; protein id: At3g28007.1, by cDNA: 22745., supported by cDNA: gi_16226221 [Arabidopsis >gi|16226222|gb|AAL16107.1|AF428275_1 unknown protein
  misc_feature (1)..(165): Homolog of NCBI NO: 21592355 NR Description: contains similarity to nodulin MtN3 protein
  misc_feature (1)..(171): Homolog of NCBI NO: 30684193 NR Description: nodulin MtN3 family protein [Arabidopsis thaliana]
  misc_feature (1)..(169): Homolog of NCBI NO: 18413388 NR Description: putative protein; protein id: At4g10850.1, by cDNA: 33161. [Arabidopsis thaliana] contains similarity to Medicago truncatula MtN3 (GB:Y08726)
  misc_feature (1)..(169): Homolog of NCBI NO: 27754697 NR Description: putative cytochrome c oxidoreductase [Arabidopsis
MTLFNCLIYTWYGLPIVSHLWENLPLVTINGVGILLESIFIFIYFYYASPKEKVGVTFVPVIVGFGLTTAISALVFDDHRHRKSFVGSVGLVASISMYGSPLVVMKKVIETRSVEYMPFYLSFFSFLASSLWLAYGLLSHDLFLASPNMVATPLGILQLILYFKYKNKKDLAPTTMVITKRNDHDDKNKATLEFVVDVDRNSDTNEKNSNNASSI

SEQ ID NO: 72922 - DNA, 1115 bp, Arabidopsis thaliana
  misc_feature (1)..(1115): Ceres Seq. ID no. 4951602
  misc_feature: MA Experiment ID: 108434 Result: Up-regulated in Transcription
  misc_feature: MA Experiment 108434 PARAMETER Experiment Name: At_Root_Tips_cDNA_P Parameter: Tissue Value: Root Tips
  misc_feature: MA Experiment ID: 108579 Result: Down-regulated in Transcription
  misc_feature: MA Experiment 108579 PARAMETER Experiment Name: At_4deg_Cold_cDNA_P Parameter: Temperature (deg C) Value: 4 vs. 22
  misc_feature: MA Experiment 108579 PARAMETER Experiment Name: At_4deg_Cold_cDNA_P Parameter: Timepoint (hr) Value: 6
  misc_feature: MA Experiment 108579 PARAMETER Experiment Name: At_4deg_Cold_cDNA_P Parameter: Tissue Value: Aerial
  misc_feature: MA Experiment ID: 108595 Result: Down-regulated in Transcription
  misc_feature: MA Experiment 108595 PARAMETER Experiment Name: At_Ler-pi_Ovule_cDNA_P Parameter: Plant Line Value: null
  misc_feature: MA Experiment ID: 108607 Result: Down-regulated in Transcription
  misc_feature: MA Experiment 108607 PARAMETER Experiment Name: At_100uM_ABA_cDNA_P Parameter: Timepoint (hr) Value: 4
  misc_feature: MA Experiment 108607 PARAMETER Experiment Name: At_100uM_ABA_cDNA_P Parameter: Tissue Value: Aerial
  misc_feature: MA Experiment 108607 PARAMETER Experiment Name: At_100uM_ABA_cDNA_P Parameter: Treatment Value: 100uM ABA vs. No Treatment
  misc_feature: MA Experiment ID: 108608 Result: Down-regulated in Transcription
  misc_feature: MA Experiment 108608 PARAMETER Experiment Name: At_100uM_ABA_cDNA_P Parameter: Timepoint (hr) Value: 1
  misc_feature: MA Experiment 108608 PARAMETER Experiment Name: At_100uM_ABA_cDNA_P Parameter: Tissue Value: Aerial
  misc_feature: MA Experiment 108608 PARAMETER Experiment Name: At_100uM_ABA_cDNA_P Parameter: Treatment Value: 100uM ABA vs. No Treatment
  misc_feature: MA Experiment ID: 108609 Result: Down-regulated in Transcription
  misc_feature: MA Experiment 108609 PARAMETER Experiment Name: At_100uM_ABA_cDNA_P Parameter: Timepoint (hr) Value: 24
  misc_feature: MA Experiment 108609 PARAMETER Experiment Name: At_100uM_ABA_cDNA_P Parameter: Tissue Value: Aerial
  misc_feature: MA Experiment 108609 PARAMETER Experiment Name: At_100uM_ABA_cDNA_P Parameter: Treatment Value: 100uM ABA vs. No Treatment
  misc_feature: MA Experiment ID: 20000166 Result: Down-regulated in Transcription
  misc_feature: MA Experiment 20000166 PARAMETER Experiment Name: At_100uM_ABA_P Parameter: Age (day) Value: 14
  misc_feature: MA Experiment 20000166 PARAMETER Experiment Name: At_100uM_ABA_P Parameter: Organism Value: A. thaliana
  misc_feature: MA Experiment 20000166 PARAMETER Experiment Name: At_100uM_ABA_P Parameter: Plant Line Value: WS
  misc_feature: MA Experiment 20000166 PARAMETER Experiment Name: At_100uM_ABA_P Parameter: Timepoint (hr) Value: 1
  misc_feature: MA Experiment 20000166 PARAMETER Experiment Name: At_100uM_ABA_P Parameter: Tissue Value: Aerial
  misc_feature: MA Experiment 20000166 PARAMETER Experiment Name: At_100uM_ABA_P Parameter: Treatment Value: 100uM ABA vs. No Treatment
  misc_feature: MA Experiment ID: 20000234 Result: Down-regulated in Transcription
  misc_feature: MA Experiment 20000234 PARAMETER Experiment Name: At_Siliques_P Parameter: Age (day) Value: 21
  misc_feature: MA Experiment 20000234 PARAMETER Experiment Name: At_Siliques_P Parameter: Organism Value: A. thaliana
  misc_feature: MA Experiment 20000234 PARAMETER Experiment Name: At_Siliques_P Parameter: Plant Line Value: WS
  misc_feature: MA Experiment 20000234 PARAMETER Experiment Name: At_Siliques_P Parameter: Tissue Value: Less Than 5mm Siliques vs. Whole Plant
  misc_feature: MA Experiment ID: 20000235 Result: Down-regulated in Transcription
  misc_feature: MA Experiment 20000235 PARAMETER Experiment Name: At_Siliques_P Parameter: Age (day) Value: 21
  misc_feature: MA Experiment 20000235 PARAMETER Experiment Name: At_Siliques_P Parameter: Organism Value: A. thaliana
  misc_feature: MA Experiment 20000235 PARAMETER Experiment Name: At_Siliques_P Parameter: Plant Line Value: WS
  misc_feature: MA Experiment 20000235 PARAMETER Experiment Name: At_Siliques_P Parameter: Tissue Value: 5-10mm Siliques vs. Whole Plant
  misc_feature: MA Experiment ID: 20000264 Result: Down-regulated in Transcription
  misc_feature: MA Experiment 20000264 PARAMETER Experiment Name: At_Open_Flower_P Parameter: Age (day) Value: 21
  misc_feature: MA Experiment 20000264 PARAMETER Experiment Name: At_Open_Flower_P Parameter: Plant Line Value: WS
  misc_feature: MA Experiment 20000264 PARAMETER Experiment Name: At_Open_Flower_P Parameter: Tissue Value: Open Flower vs. Whole Plant
  misc_feature: MA Experiment ID: 20000265 Result: Down-regulated in Transcription
  misc_feature: MA Experiment 20000265 PARAMETER Experiment Name: At_Open_Flower_P Parameter: Age (day) Value: 21
  misc_feature: MA Experiment 20000265 PARAMETER Experiment Name: At_Open_Flower_P Parameter: Plant Line Value: WS
  misc_feature: MA Experiment 20000265 PARAMETER Experiment Name: At_Open_Flower_P Parameter: Tissue Value: Closed Flower vs. Whole Plant
  misc_feature: MA Experiment ID: 20000286 Result: Down-regulated in Transcription
  misc_feature: MA Experiment 20000286 PARAMETER Experiment Name: At_Open_Flower_P Parameter: Age (day) Value: 21
  misc_feature: MA Experiment 20000286 PARAMETER Experiment Name: At_Open_Flower_P Parameter: Plant Line Value: WS
  misc_feature: MA Experiment 20000286 PARAMETER Experiment Name: At_Open_Flower_P Parameter: Tissue Value: Half Open vs. Whole Plant
  misc_feature: MA Experiment ID: 20000436 Result: Down-regulated in Transcription
  misc_feature: MA Experiment 20000436 PARAMETER Experiment Name: At_Drought_P Parameter: Age (day) Value: 7
  misc_feature: MA Experiment 20000436 PARAMETER Experiment Name: At_Drought_P Parameter: Organism Value: A. thaliana
  misc_feature: MA Experiment 20000436 PARAMETER Experiment Name: At_Drought_P Parameter: Plant Line Value: WS
  misc_feature: MA Experiment 20000436 PARAMETER Experiment Name: At_Drought_P Parameter: Timepoint (hr) Value: 12
  misc_feature: MA Experiment 20000436 PARAMETER Experiment Name: At_Drought_P Parameter: Tissue Value: Whole Plant
  misc_feature: MA Experiment 20000436 PARAMETER Experiment Name: At_Drought_P Parameter: Treatment Value: Drought vs. No Drought
  misc_feature: MA Experiment ID: 20000437 Result: Down-regulated in Transcription
  misc_feature: MA Experiment 20000437 PARAMETER Experiment Name: At_Drought_P Parameter: Age (day) Value: 8
  misc_feature: MA Experiment 20000437 PARAMETER Experiment Name: At_Drought_P Parameter: Organism Value: A. thaliana
  misc_feature: MA Experiment 20000437 PARAMETER Experiment Name: At_Drought_P Parameter: Plant Line Value: WS
  misc_feature: MA Experiment 20000437 PARAMETER Experiment Name: At_Drought_P Parameter: Timepoint (hr) Value: 24
  misc_feature: MA Experiment 20000437 PARAMETER Experiment Name: At_Drought_P Parameter: Tissue Value: Whole Plant
  misc_feature: MA Experiment 20000437 PARAMETER Experiment Name: At_Drought_P Parameter: Treatment Value: Drought vs. No Drought
  misc_feature: MA Experiment ID: 20000453 Result: Down-regulated in Transcription
  misc_feature: MA Experiment 20000453 PARAMETER Experiment Name: At_100uM_ABA_P Parameter: Age (day) Value: 15
  misc_feature: MA Experiment 20000453 PARAMETER Experiment Name: At_100uM_ABA_P Parameter: Organism Value: A. thaliana
  misc_feature: MA Experiment 20000453 PARAMETER Experiment Name: At_100uM_ABA_P Parameter: Plant Line Value: WS
  misc_feature: MA Experiment 20000453 PARAMETER Experiment Name: At_100uM_ABA_P Parameter: Timepoint (hr) Value: 24
  misc_feature: MA Experiment 20000453 PARAMETER Experiment Name: At_100uM_ABA_P Parameter: Tissue Value: Aerial
  misc_feature: MA Experiment 20000453 PARAMETER Experiment Name: At_100uM_ABA_P Parameter: Treatment Value: 100uM ABA vs. No Treatment
  misc_feature: MA Experiment ID: 20000455 Result: Down-regulated in Transcription
  misc_feature: MA Experiment 20000455 PARAMETER Experiment Name: At_100uM_ABA_P Parameter: Age (day) Value: 16
  misc_feature: MA Experiment 20000455 PARAMETER Experiment Name: At_100uM_ABA_P Parameter: Organism Value: A. thaliana
  misc_feature: MA Experiment 20000455 PARAMETER Experiment Name: At_100uM_ABA_P Parameter: Plant Line Value: WS
  misc_feature: MA Experiment 20000455 PARAMETER Experiment Name: At_100uM_ABA_P Parameter: Timepoint (hr) Value: 48
  misc_feature: MA Experiment 20000455 PARAMETER Experiment Name: At_100uM_ABA_P Parameter: Tissue Value: Aerial
  misc_feature: MA Experiment 20000455 PARAMETER Experiment Name: At_100uM_ABA_P Parameter: Treatment Value: 100uM ABA vs. No Treatment
  misc_feature: MA Experiment ID: 20000573 Result: Up-regulated in Transcription
  misc_feature: MA Experiment 20000573 PARAMETER Experiment Name: At_100uM_ABA_Mutants__P Parameter: Organism Value: A. thaliana
  misc_feature: MA Experiment 20000573 PARAMETER Experiment Name: At_100uM_ABA_Mutants__P Parameter: Plant Line Value: CS22 vs. Ler wt
  misc_feature: MA Experiment 20000573 PARAMETER Experiment Name: At_100uM_ABA_Mutants__P Parameter: Timepoint (hr) Value: N/A
  misc_feature: MA Experiment 20000573 PARAMETER Experiment Name: At_100uM_ABA_Mutants__P Parameter: Tissue Value: Whole Plant
  misc_feature: MA Experiment 20000573 PARAMETER Experiment Name: At_100uM_ABA_Mutants__P Parameter: Treatment Value: None
  misc_feature: MA Experiment ID: 20001248 Result: Up-regulated in Transcription
  misc_feature: MA Experiment 20001248 PARAMETER Experiment Name: At_Far-red-induction_P Parameter: Age (day) Value: 7
  misc_feature: MA Experiment 20001248 PARAMETER Experiment Name: At_Far-red-induction_P Parameter: Light Value: Far-red vs. White
  misc_feature: MA Experiment 20001248 PARAMETER Experiment Name: At_Far-red-induction_P Parameter: Organism Value: A. thaliana
  misc_feature: MA Experiment 20001248 PARAMETER Experiment Name: At_Far-red-induction_P Parameter: Plant Line Value: Columbia
  misc_feature: MA Experiment 20001248 PARAMETER Experiment Name: At_Far-red-induction_P Parameter: Timepoint (hr) Value: 4
  misc_feature: MA Experiment 20001248 PARAMETER Experiment Name: At_Far-red-induction_P Parameter: Tissue Value: Whole Plant
  misc_feature: MA Experiment ID: 20001450 Result: Up-regulated in Transcription
  misc_feature: MA Experiment 20001450 PARAMETER Experiment Name: At_Far-red-induction_P Parameter: Age (day) Value: 7
  misc_feature: MA Experiment 20001450 PARAMETER Experiment Name: At_Far-red-induction_P Parameter: Light Value: Far-red vs. White
  misc_feature: MA Experiment 20001450 PARAMETER Experiment Name: At_Far-red-induction_P Parameter: Organism Value: A. thaliana
  misc_feature: MA Experiment 20001450 PARAMETER Experiment Name: At_Far-red-induction_P Parameter: Plant Line Value: Columbia
  misc_feature: MA Experiment 20001450 PARAMETER Experiment Name: At_Far-red-induction_P Parameter: Timepoint (hr) Value: 8
  misc_feature: MA Experiment 20001450 PARAMETER Experiment Name: At_Far-red-induction_P Parameter: Tissue Value: Whole Plant
  misc_feature: MA Experiment ID: 20001451 Result: Up-regulated in Transcription
  misc_feature: MA Experiment 20001451 PARAMETER Experiment Name: At_Far-red-induction_P Parameter: Age (day) Value: 7
  misc_feature: MA Experiment 20001451 PARAMETER Experiment Name: At_Far-red-induction_P Parameter: Light Value: Far-red vs. White
  misc_feature: MA Experiment 20001451 PARAMETER Experiment Name: At_Far-red-induction_P Parameter: Organism Value: A. thaliana
  misc_feature: MA Experiment 20001451 PARAMETER Experiment Name: At_Far-red-induction_P Parameter: Plant Line Value: Columbia
  misc_feature: MA Experiment 20001451 PARAMETER Experiment Name: At_Far-red-induction_P Parameter: Timepoint (hr) Value: 24
  misc_feature: MA Experiment 20001451 PARAMETER Experiment Name: At_Far-red-induction_P Parameter: Tissue Value: Whole Plant
  misc_feature: MA Experiment ID: 20001555 Result: Down-regulated in Transcription
  misc_feature: MA Experiment 20001555 PARAMETER Experiment Name: At_Drought_Soil_Dry_P Parameter: Age (day) Value: 24
  misc_feature: MA Experiment 20001555 PARAMETER Experiment Name: At_Drought_Soil_Dry_P Parameter: Organism Value: A. thaliana
  misc_feature: MA Experiment 20001555 PARAMETER Experiment Name: At_Drought_Soil_Dry_P Parameter: Plant Line Value: WS
  misc_feature: MA Experiment 20001555 PARAMETER Experiment Name: At_Drought_Soil_Dry_P Parameter: Post Timepoint (hr) Value: None
  misc_feature: MA Experiment 20001555 PARAMETER Experiment Name: At_Drought_Soil_Dry_P Parameter: Post-Treatment Value: None
  misc_feature: MA Experiment 20001555 PARAMETER Experiment Name: At_Drought_Soil_Dry_P Parameter: Timepoint (day) Value: 10
  misc_feature: MA Experiment 20001555 PARAMETER Experiment Name: At_Drought_Soil_Dry_P Parameter: Treatment Value: Drought vs. No Drought
  misc_feature: MA Experiment ID: 20001556 Result: Down-regulated in Transcription
  misc_feature: MA Experiment 20001556 PARAMETER Experiment Name: At_Drought_Soil_Dry_P Parameter: Age (day) Value: 26
  misc_feature: MA Experiment 20001556 PARAMETER Experiment Name: At_Drought_Soil_Dry_P Parameter: Organism Value: A. thaliana
  misc_feature: MA Experiment 20001556 PARAMETER Experiment Name: At_Drought_Soil_Dry_P Parameter: Plant Line Value: WS
  misc_feature: MA Experiment 20001556 PARAMETER Experiment Name: At_Drought_Soil_Dry_P Parameter: Post Timepoint (hr) Value: None
  misc_feature: MA Experiment 20001556 PARAMETER Experiment Name: At_Drought_Soil_Dry_P Parameter: Post-Treatment Value: None
  misc_feature: MA Experiment 20001556 PARAMETER Experiment Name: At_Drought_Soil_Dry_P Parameter: Timepoint (day) Value: 12
  misc_feature: MA Experiment 20001556 PARAMETER Experiment Name: At_Drought_Soil_Dry_P Parameter: Treatment Value: Drought vs. No Drought
  misc_feature: MA Experiment ID: 20001559 Result: Down-regulated in Transcription
  misc_feature: MA Experiment 20001559 PARAMETER Experiment Name: At_Drought_Soil_Dry_P Parameter: Age (day) Value: 28
  misc_feature: MA Experiment 20001559 PARAMETER Experiment Name: At_Drought_Soil_Dry_P Parameter: Organism Value: A. thaliana
  misc_feature: MA Experiment 20001559 PARAMETER Experiment Name: At_Drought_Soil_Dry_P Parameter: Plant Line Value: WS
  misc_feature: MA Experiment 20001559 PARAMETER Experiment Name: At_Drought_Soil_Dry_P Parameter: Post Timepoint (hr) Value: 29
  misc_feature: MA Experiment 20001559 PARAMETER Experiment Name: At_Drought_Soil_Dry_P Parameter: Post-Treatment Value: Re-Water vs. No Drought
  misc_feature: MA Experiment 20001559 PARAMETER Experiment Name: At_Drought_Soil_Dry_P Parameter: Timepoint (day) Value: 14
  misc_feature: MA Experiment 20001559 PARAMETER Experiment Name: At_Drought_Soil_Dry_P Parameter: Treatment Value: Drought vs. No Drought
  misc_feature: MA Experiment ID: 20001904 Result: Down-regulated in Transcription
  misc_feature: MA Experiment 20001904 PARAMETER Experiment Name: At_Drought_Reproduction_P Parameter: Age (day) Value: 37
  misc_feature: MA Experiment 20001904 PARAMETER Experiment Name: At_Drought_Reproduction_P Parameter: Organism Value: A. thaliana
  misc_feature: MA Experiment 20001904 PARAMETER Experiment Name: At_Drought_Reproduction_P Parameter: Plant Line Value: WS
  misc_feature: MA Experiment 20001904 PARAMETER Experiment Name: At_Drought_Reproduction_P Parameter: Timepoint (day) Value: 7
  misc_feature: MA Experiment 20001904 PARAMETER Experiment Name: At_Drought_Reproduction_P Parameter: Tissue Value: Rosettes
  misc_feature: MA Experiment 20001904 PARAMETER Experiment Name: At_Drought_Reproduction_P Parameter: Treatment Value: Drought vs. No Drought
  misc_feature: MA Experiment ID: 20001911 Result: Down-regulated in Transcription
  misc_feature: MA Experiment 20001911 PARAMETER Experiment Name: At_Drought_Reproduction_P Parameter: Age (day) Value: 40
  misc_feature: MA Experiment 20001911 PARAMETER Experiment Name: At_Drought_Reproduction_P Parameter: Organism Value: A. thaliana
  misc_feature: MA Experiment 20001911 PARAMETER Experiment Name: At_Drought_Reproduction_P Parameter: Plant Line Value: WS
  misc_feature: MA Experiment 20001911 PARAMETER Experiment Name: At_Drought_Reproduction_P Parameter: Timepoint (day) Value: 10
  misc_feature: MA Experiment 20001911 PARAMETER Experiment Name: At_Drought_Reproduction_P Parameter: Tissue Value: Flowers
  misc_feature: MA Experiment 20001911 PARAMETER Experiment Name: At_Drought_Reproduction_P Parameter: Treatment Value: Drought vs. No Drought
aaagtttgttggaggattcgtctctctctctctctctttctctttctctcatcttcttcttatctccctccaaagacggcgactgtataatctatcatttcttcacagtaacgctttcatcggaagatctcgccggaaaaaaacttctctctgagatcagatctcttacgattctcagctcaatcttatcttttcctttgttgtgctgcttttcactctcttctgcgcgacgaatttggccttgttttttgtttgtttgtcgtatccgacgcggaggtattgagaaaccgtggcttaagacggaggaagaagatggaagctaacgggattgagaacttgacgaatccgaatcaggaaagagagtttataaggagacatcataagcatgagcttgtggataatcagtgtagctctacgcttgttaaacatatcaacgctcctgttcatattgtgtggtcacttgtgagaagatttgatcagccacagaagtataagccgtttatcagtagatgtgtggtgaaaggaaacatggagattggtacagtaagagaagttgatgtgaaatctggactaccagcaactagaagcactgagagattggagttacttgatgacaatgagcatattctcagtatcagaatcgttggtggtgatcatagacttaagaactattcttcaatcatctctcttcaccccgagactatagaaggaagaataggaacacttgtgattgagtcatttgtggttgatgtaccagaaggaaacacaaaggatgagacttgttactttgttgaagctttaatcaaatgcaatcttaaatctttagctgatatctctgaacgtcttgcggttcaagacacgacagaatcgagagtctaaagatcaaaggagtaagaaactattgaatcagagagattttggttgccatggatgaagctctcaaagggaaaaagagagagtgggtgagtttctttgaggatggacaaggcaaaaaaagtatcatcatttatccagttacataataagtttctcatttgctatttttggggtcatttcactttcaaaccctctttttaatttcatgtgtctaatttaatgaatgtgtttttggtttc

SEQ ID NO: 72923 - protein, 188 aa, Arabidopsis thaliana; identical to SEQ ID NO: 25988
  peptide (1)..(188): Ceres Seq. ID no. 4951603
  misc_feature (32)..(171): Pfam Name: Pathogenesis-related protein Bet v I family Pfam Description: Pathogenesis-related protein Bet v I family
  misc_feature (1)..(188): Homolog of NCBI NO: 15238661 NR Description: putative protein; protein id: At5g53160.1 thaliana] >gi|9757997|dbj|BAB08419.1| to unknown protein [Arabidopsis thaliana]
  misc_feature (17)..(185): Homolog of NCBI NO: 18378830 NR Description: expressed protein; protein id: At1g01360.1,
  misc_feature (17)..(185): Homolog of NCBI NO: 21593547 NR Description: unknown [Arabidopsis thaliana]
  misc_feature (17)..(185): Homolog of NCBI NO: 25348264 NR Description: hypothetical protein F6F3.16 - Arabidopsis >gi|9665155|gb|AAF97339.1|AC023628_20 Unknown protein
  misc_feature (15)..(188): Homolog of NCBI NO: 30687786 NR Description: expressed protein [Arabidopsis thaliana]
  misc_feature (15)..(188): Homolog of NCBI NO: 7486961 NR Description: hypothetical protein T13J8.30 - Arabidopsis >gi|4455351|emb|CAB36761.1| putative protein [Arabidopsis >gi|7269646|emb|CAB79594.1| putative protein [Arabidopsis
  misc_feature (19)..(186): Homolog of NCBI NO: 18411513 NR Description: Expressed protein; protein id: At4g01026.1,
  misc_feature (19)..(186): Homolog of NCBI NO: 21593105 NR Description: unknown [Arabidopsis thaliana]
  misc_feature (1)..(118): Homolog of NCBI NO: 30696291 NR Description: expressed protein [Arabidopsis thaliana]
  misc_feature (47)..(186): Homolog of NCBI NO: 7486358 NR Description: hypothetical protein F3I3.40 - Arabidopsis >gi|5262156|emb|CAB45785.1| putative protein [Arabidopsis >gi|7267599|emb|CAB80911.1| putative protein [Arabidopsis

SEQ ID NO: 72924 - protein, 116 aa, Arabidopsis thaliana
  peptide (1)..(116): Ceres Seq. ID no. 4951604
  misc_feature (1)..(99): Pfam Name: Pathogenesis-related protein Bet v I family Pfam Description: Pathogenesis-related protein Bet v I family
  misc_feature (1)..(116): Homolog of NCBI NO: 15238661 NR Description: putative protein; protein id: At5g53160.1 thaliana] >gi|9757997|dbj|BAB08419.1| to unknown protein [Arabidopsis thaliana]
  misc_feature (1)..(113): Homolog of NCBI NO: 18378830 NR Description: expressed protein; protein id: At1g01360.1,
  misc_feature (1)..(113): Homolog of NCBI NO: 21593547 NR Description: unknown [Arabidopsis thaliana]
  misc_feature (1)..(113): Homolog of NCBI NO: 25348264 NR Description: hypothetical protein F6F3.16 - Arabidopsis >gi|9665155|gb|AAF97339.1|AC023628_20 Unknown protein
  misc_feature (1)..(116): Homolog of NCBI NO: 30687786 NR Description: expressed protein [Arabidopsis thaliana]
  misc_feature (1)..(116): Homolog of NCBI NO: 7486961 NR Description: hypothetical protein T13J8.30 - Arabidopsis >gi|4455351|emb|CAB36761.1| putative protein [Arabidopsis >gi|7269646|emb|CAB79594.1| putative protein [Arabidopsis
  misc_feature (1)..(114): Homolog of NCBI NO: 18411513 NR Description: Expressed protein; protein id: At4g01026.1,
  misc_feature (1)..(114): Homolog of NCBI NO: 21593105 NR Description: unknown [Arabidopsis thaliana]
  misc_feature (1)..(46): Homolog of NCBI NO: 30696291 NR Description: expressed protein [Arabidopsis thaliana]
  misc_feature (1)..(114): Homolog of NCBI NO: 7486358 NR Description: hypothetical protein F3I3.40 - Arabidopsis >gi|5262156|emb|CAB45785.1| putative protein [Arabidopsis >gi|7267599|emb|CAB80911.1| putative protein [Arabidopsis
MEIGTVREVDVKSGLPATRSTERLELLDDNEHILSIRIVGGDHRLKNYSSIISLHPETIEGRIGTLVIESFVVDVPEGNTKDETCYFVEALIKCNLKSLADISERLAVQDTTESRV

SEQ ID NO: 72925 - protein, 106 aa, Arabidopsis thaliana
  peptide (1)..(106): Ceres Seq. ID no. 4951605
SLLEDSSLSLSLSLSLIFFLSPSKDGDCIIYHFFTVTLSSEDLAGKKLLSEIRSLTILSSILSFPLLCCFSLSSARRIWPCFLFVCRIRRGGIEKPWLKTEEEDGS

SEQ ID NO: 72926 - DNA, 1458 bp, Arabidopsis thaliana
  misc_feature (1)..(1458): Ceres Seq. ID no. 4951622
  misc_feature: MA Experiment ID: 108435 Result: Up-regulated in Transcription
  misc_feature: MA Experiment 108435 PARAMETER Experiment Name: At_stm_Mutants_cDNA_P Parameter: Plant Line Value: wt Landsburg vs stm
  misc_feature: MA Experiment 108435 PARAMETER Experiment Name: At_stm_Mutants_cDNA_P Parameter: Tissue Value: Shoot Apical Meristem Region
atgggtgaagacaagaagacggcaagggagacggtggaggaggaaccacttagcccatgttcacggctgttcaattcgccggattttaactgtgcaataatcgttacaatgggatctaaagttaaaggagacacaccagccatcatccacggccttgaacacaccctcgtaaaccaccctcgcttctctagcattttaatgaacaatgggaagaagccgcgttgggttcggacaaaagttaaagtagaagagcatgtgattgttcctgatgtggatcccgacattgaaaatccggatcagtatcttgaagactatatctctaagttaacgaccattcctatggatttgtctaaaccattatgggaaatgcacttactaggcgtcaaaacatcgaacgctgaatcctatgctattctcaagatccatcattctttgggtgatggaatgtctctcatgtctcttttactggcttgtacccgcaaaacatcagaccccgaggctttgcctaccgttgcggttcataaaaaacgctttggaccgagctgcaacagcgggtttttcaacaagatttggtggttatttgtagggctctggttcatcctaagattgctattcaacacttttgttgatatcttaatgtttgctcttacaatatttgtcttgagggatacggagactcctctcttggccaaacccggtagtgaacttatccctaagaggttcgtccaccggattatcagttttgacgatgttaagctggtgaaaaacgcaatgaaaatgacggtgaacgatgttcttcttggagtaacgcaagccggactttcgcgttaccttagtcgaaaatatgatcaagaagcaacaccgaaatcgaaagagtccatgaggagaatccgacttcgttcagccattatgattaacttgagaccaaacgcaggaattgaggctctagcggatatgatggccaagaaatcaaaatgcagatggggaaatctcttcggctacattctcctaccgttctccgttgggctagagaccgatcctctagaatacgtgcgccaagctaaagccacgattgaccgcaagaaacactctctagaagccgtattctccatggcattctttaaattgatactaaaagttcttgggctcaaggcaagtgtagttcttgtaaggaaagtgatccatagcacaacgttatcattttcaaatgtggtcggtccaaaggaagaaattacattccatggtcacccactgaattatatctccccatgtgtttttggccacccacatgctcttactctacatttccagacctacgcgaacaaggtcataatatcggtaacggctgatccaacggtcattcctgaccctcacaagatgtgtgatgatttggtggagtctctcaagatgattaaagccgctgttcttgaaagagggttatatgagattgaggtctaa

SEQ ID NO: 72927 - protein, 485 aa, Arabidopsis thaliana
  peptide (1)..(485): Ceres Seq. ID no. 4951623
  misc_feature (13)..(300): Pfam Name: Condensation domain Pfam Description: Condensation domain
  misc_feature (1)..(485): Homolog of NCBI NO: 9759186 NR Description: emb|CAB66399.1~gene_id:K19E1.19~strong similarity
  misc_feature (1)..(485): Homolog of NCBI NO: 30696326 NR Description: expressed protein [Arabidopsis thaliana]
  misc_feature (1)..(485): Homolog of NCBI NO: 26451548 NR Description: unknown protein [Arabidopsis thaliana]
  misc_feature (7)..(478): Homolog of NCBI NO: 15229103 NR Description: putative protein; protein id: At3g49200.1
  misc_feature (6)..(485): Homolog of NCBI NO: 30687731 NR Description: hypothetical protein [Arabidopsis thaliana]
  misc_feature (10)..(478): Homolog of NCBI NO: 15229102 NR Description: putative protein; protein id: At3g49190.1
  misc_feature (9)..(485): Homolog of NCBI NO: 15218351 NR Description: hypothetical protein; protein id: At1g72110.1
  misc_feature (10)..(485): Homolog of NCBI NO: 9758716 NR Description: emb|CAB66398.1~gene_id:MNJ8.9~strong similarity
  misc_feature (10)..(485): Homolog of NCBI NO: 18421632 NR Description: putative protein; protein id: At5g37300.1, by cDNA: gi_15810554 [Arabidopsis thaliana]
  misc_feature (4)..(480): Homolog of NCBI NO: 15242259 NR Description: putative protein; protein id: At5g22490.1 thaliana] >gi|9758655|dbj|BAB09121.1|
MGEDKKTARETVEEEPLSPCSRLFNSPDFNCAIIVTMGSKVKGDTPAIIHGLEHTLVNHPRFSSILMNNGKKPRWVRTKVKVEEHVIVPDVDPDIENPDQYLEDYISKLTTIPMDLSKPLWEMHLLGVKTSNAESYAILKIHHSLGDGMSLMSLLLACTRKTSDPEALPTVAVHKKRFGPSCNSGFFNKIWWLFVGLWFILRLLFNTFVDILMFALTIFVLRDTETPLLAKPGSELIPKRFVHRIISFDDVKLVKNAMKMTVNDVLLGVTQAGLSRYLSRKYDQEATPKSKESMRRIRLRSAIMINLRPNAGIEALADMMAKKSKCRWGNLFGYILLPFSVGLETDPLEYVRQAKATIDRKKHSLEAVFSMAFFKLILKVLGLKASVVLVRKVIHSTTLSFSNVVGPKEEITFHGHPLNYISPCVFGHPHALTLHFQTYANKVIISVTADPTVIPDPHKMCDDLVESLKMIKAAVLERGLYEIEV

SEQ ID NO: 72928 - protein, 449 aa, Arabidopsis thaliana
  peptide (1)..(449): Ceres Seq. ID no. 4951624
  misc_feature (1)..(264): Pfam Name: Condensation domain Pfam Description: Condensation domain
  misc_feature (1)..(449): Homolog of NCBI NO: 9759186 NR Description: emb|CAB66399.1~gene_id:K19E1.19~strong similarity
  misc_feature (1)..(449): Homolog of NCBI NO: 30696326 NR Description: expressed protein [Arabidopsis thaliana]
  misc_feature (1)..(449): Homolog of NCBI NO: 26451548 NR Description: unknown protein [Arabidopsis thaliana]
  misc_feature (1)..(442): Homolog of NCBI NO: 15229103 NR Description: putative protein; protein id: At3g49200.1
  misc_feature (1)..(449): Homolog of NCBI NO: 30687731 NR Description: hypothetical protein [Arabidopsis thaliana]
  misc_feature (1)..(442): Homolog of NCBI NO: 15229102 NR Description: putative protein; protein id: At3g49190.1
  misc_feature (1)..(449): Homolog of NCBI NO: 15218351 NR Description: hypothetical protein; protein id: At1g72110.1
  misc_feature (1)..(449): Homolog of NCBI NO: 9758716 NR Description: emb|CAB66398.1~gene_id:MNJ8.9~strong similarity
  misc_feature (1)..(449): Homolog of NCBI NO: 18421632 NR Description: putative protein; protein id: At5g37300.1, by cDNA: gi_15810554 [Arabidopsis thaliana]
  misc_feature (1)..(444): Homolog of NCBI NO: 15242259 NR Description: putative protein; protein id: At5g22490.1 thaliana] >gi|9758655|dbj|BAB09121.1|
MGSKVKGDTPAIIHGLEHTLVNHPRFSSILMNNGKKPRWVRTKVKVEEHVIVPDVDPDIENPDQYLEDYISKLTTIPMDLSKPLWEMHLLGVKTSNAESYAILKIHHSLGDGMSLMSLLLACTRKTSDPEALPTVAVHKKRFGPSCNSGFFNKIWWLFVGLWFILRLLFNTFVDILMFALTIFVLRDTETPLLAKPGSELIPKRFVHRIISFDDVKLVKNAMKMTVNDVLLGVTQAGLSRYLSRKYDQEATPKSKESMRRIRLRSAIMINLRPNAGIEALADMMAKKSKCRWGNLFGYILLPFSVGLETDPLEYVRQAKATIDRKKHSLEAVFSMAFFKLILKVLGLKASVVLVRKVIHSTTLSFSNVVGPKEEITFHGHPLNYISPCVFGHPHALTLHFQTYANKVIISVTADPTVIPDPHKMCDDLVESLKMIKAAVLERGLYEIEV

SEQ ID NO: 72929 - protein, 419 aa, Arabidopsis thaliana
  peptide (1)..(419): Ceres Seq. ID no. 4951625
  misc_feature (1)..(234): Pfam Name: Condensation domain Pfam Description: Condensation domain
  misc_feature (1)..(419): Homolog of NCBI NO: 9759186 NR Description: emb|CAB66399.1~gene_id:K19E1.19~strong similarity
  misc_feature (1)..(419): Homolog of NCBI NO: 30696326 NR Description: expressed protein [Arabidopsis thaliana]
  misc_feature (1)..(419): Homolog of NCBI NO: 26451548 NR Description: unknown protein [Arabidopsis thaliana]
  misc_feature (1)..(412): Homolog of NCBI NO: 15229103 NR Description: putative protein; protein id: At3g49200.1
  misc_feature (1)..(419): Homolog of NCBI NO: 30687731 NR Description: hypothetical protein [Arabidopsis thaliana]
  misc_feature (1)..(412): Homolog of NCBI NO: 15229102 NR Description: putative protein; protein id: At3g49190.1
  misc_feature (1)..(419): Homolog of NCBI NO: 15218351 NR Description: hypothetical protein; protein id: At1g72110.1
  misc_feature (1)..(419): Homolog of NCBI NO: 9758716 NR Description: emb|CAB66398.1~gene_id:MNJ8.9~strong similarity
  misc_feature (1)..(419): Homolog of NCBI NO: 18421632 NR Description: putative protein; protein id: At5g37300.1, by cDNA: gi_15810554 [Arabidopsis thaliana]
  misc_feature (1)..(414): Homolog of NCBI NO: 15242259 NR Description: putative protein; protein id: At5g22490.1 thaliana] >gi|9758655|dbj|BAB09121.1|
MNNGKKPRWVRTKVKVEEHVIVPDVDPDIENPDQYLEDYISKLTTIPMDLSKPLWEMHLLGVKTSNAESYAILKIHHSLGDGMSLMSLLLACTRKTSDPEALPTVAVHKKRFGPSCNSGFFNKIWWLFVGLWFILRLLFNTFVDILMFALTIFVLRDTETPLLAKPGSELIPKRFVHRIISFDDVKLVKNAMKMTVNDVLLGVTQAGLSRYLSRKYDQEATPKSKESMRRIRLRSAIMINLRPNAGIEALADMMAKKSKCRWGNLFGYILLPFSVGLETDPLEYVRQAKATIDRKKHSLEAVFSMAFFKLILKVLGLKASVVLVRKVIHSTTLSFSNVVGPKEEITFHGHPLNYISPCVFGHPHALTLHFQTYANKVIISVTADPTVIPDPHKMCDDLVESLKMIKAAVLERGLYEIEV

SEQ ID NO: 72930 - DNA, 1326 bp, Arabidopsis thaliana
  misc_feature (1)..(1326): Ceres Seq. ID no. 4951649
  misc_feature: MA Experiment ID: 20000437 Result: Up-regulated in Transcription
  misc_feature: MA Experiment 20000437 PARAMETER Experiment Name: At_Drought_P Parameter: Age (day) Value: 8
  misc_feature: MA Experiment 20000437 PARAMETER Experiment Name: At_Drought_P Parameter: Organism Value: A. thaliana
  misc_feature: MA Experiment 20000437 PARAMETER Experiment Name: At_Drought_P Parameter: Plant Line Value: WS
  misc_feature: MA Experiment 20000437 PARAMETER Experiment Name: At_Drought_P Parameter: Timepoint (hr) Value: 24
  misc_feature: MA Experiment 20000437 PARAMETER Experiment Name: At_Drought_P Parameter: Tissue Value: Whole Plant
  misc_feature: MA Experiment 20000437 PARAMETER Experiment Name: At_Drought_P Parameter: Treatment Value: Drought vs. No Drought
  misc_feature: MA Experiment ID: 20001557 Result: Down-regulated in Transcription
  misc_feature: MA Experiment 20001557 PARAMETER Experiment Name: At_Drought_Soil_Dry_P Parameter: Age (day) Value: 27
  misc_feature: MA Experiment 20001557 PARAMETER Experiment Name: At_Drought_Soil_Dry_P Parameter: Organism Value: A. thaliana
  misc_feature: MA Experiment 20001557 PARAMETER Experiment Name: At_Drought_Soil_Dry_P Parameter: Plant Line Value: WS
  misc_feature: MA Experiment 20001557 PARAMETER Experiment Name: At_Drought_Soil_Dry_P Parameter: Post Timepoint (hr) Value: 3
  misc_feature: MA Experiment 20001557 PARAMETER Experiment Name: At_Drought_Soil_Dry_P Parameter: Post-Treatment Value: Re-Water vs. No Drought
  misc_feature: MA Experiment 20001557 PARAMETER Experiment Name: At_Drought_Soil_Dry_P Parameter: Timepoint (day) Value: 13
  misc_feature: MA Experiment 20001557 PARAMETER Experiment Name: At_Drought_Soil_Dry_P Parameter: Treatment Value: Drought vs. No Drought
  misc_feature: MA Experiment ID: 20001558 Result: Down-regulated in Transcription
  misc_feature: MA Experiment 20001558 PARAMETER Experiment Name: At_Drought_Soil_Dry_P Parameter: Age (day) Value: 27
  misc_feature: MA Experiment 20001558 PARAMETER Experiment Name: At_Drought_Soil_Dry_P Parameter: Organism Value: A. thaliana
  misc_feature: MA Experiment 20001558 PARAMETER Experiment Name: At_Drought_Soil_Dry_P Parameter: Plant Line Value: WS
  misc_feature: MA Experiment 20001558 PARAMETER Experiment Name: At_Drought_Soil_Dry_P Parameter: Post Timepoint (hr) Value: 6
  misc_feature: MA Experiment 20001558 PARAMETER Experiment Name: At_Drought_Soil_Dry_P Parameter: Post-Treatment Value: Re-Water vs. No Drought
  misc_feature: MA Experiment 20001558 PARAMETER Experiment Name: At_Drought_Soil_Dry_P Parameter: Timepoint (day) Value: 13
  misc_feature: MA Experiment 20001558 PARAMETER Experiment Name: At_Drought_Soil_Dry_P Parameter: Treatment Value: Drought vs. No Drought
atggaggtgaattcgatgggactaaattgtcggtgtcttgagttagaagaaagggttttaaaaggtgaagaaaggtacactcacttagaaacagagttgcagaaacgaaacaatgagtttgaatcacttgaattgaagtttaaagaattggaatcagagaagttagtagttgaagaagagtcaaggaatcttaaagaatctgaggaaggctcaccttgtatgaccacaccggttaaagactatatattagggagagacagagatagagacagagacaccatgtcttctcggagacgagtgaataagatgttgtcgtttgaagatgatggtcacaaattgactgatgtagttgatttatgtgatagtgaaacagagcagagaagtgaggaggaggaatttgctgatgttatggatactatagaggaggcaaatattggtgagaattatgaagatgaagatgtggaagcttgtgatgctaacacaagtagtcctctttctaggcgtaagaggaagcgggttattgccagcgatgatgatgatgatgctgatgatgatgatgaagataatataccgatttcaatactcaagaatttgaaaccaactaaccaagagatgtcagatttgtttgatacacctaacaaaggagagagtgagtctagaagattgagtggacaacgtcgagtgtcgtcaagactgaataaaaagagagtttctgaagaggtatctgcttcaacagagagacttgtgggaatcccaacaaccgataatgccgaggatgatgagacagaagaagaaggttcagagagtgagggtgagagtttagatgggtttattatcgatgatgatgatagtcaggagtctgtcagtgaaaagtctgatgaaatcggggtagaggaatccgatggagaagttggttatgctgatgttatgtcaaggttaaggagggagaagaaacccgagaagcgtaaatgggagtatgaggcagatatgttggcagatttcggtaaagatcctgagctttgtatgagagcggtttgtgttctgtttaggtttcaaacagaagatgaaaaagtggaaagatcaagtcatgtctctaatggtcgcggtttcagcaaggttgacgctgtaaggggcactagcattgcactgtttctgacggatggagattccgcaggcgatatgaagaaatccgttgaggaattgaaagtttttgactttaaaggcgtagagaaatgcgaagaattagcacgcaaatactctaaacaactcttccagatctataacaacagagaagatccattctttactcttcctccatctccatga

SEQ ID NO: 72931 - protein, 441 aa, Arabidopsis thaliana
  peptide (1)..(441): Ceres Seq. ID no. 4951650
  misc_feature (23)..(340): Pfam Name: Sas10/Utp3 family Pfam Description: Sas10/Utp3 family
  misc_feature (1)..(441): Homolog of NCBI NO: 15238681 NR Description: unknown protein; protein id: At5g53220.1 thaliana] >gi|9759169|dbj|BAB09784.1| gene_id:K19E1.2~unknown
  misc_feature (318)..(435): Homolog of NCBI NO: 21742592 NR Description: OSJNBb0076A22.19 [Oryza sativa (japonica
  misc_feature (14)..(339): Homolog of NCBI NO: 23613492 NR Description: P. falciparum RESA-like protein with DnaJ domain
  misc_feature (16)..(329): Homolog of NCBI NO: 9837385 NR Description: retinitis pigmentosa GTPase regulator-like
  misc_feature (14)..(329): Homolog of NCBI NO: 9837385 NR Description: retinitis pigmentosa GTPase regulator-like
  misc_feature (14)..(321): Homolog of NCBI NO: 9837385 NR Description: retinitis pigmentosa GTPase regulator-like
  misc_feature (31)..(325): Homolog of NCBI NO: 21309836 NR Description: glutamic acid-rich protein cNBL1700 [Trichinella
MEVNSMGLNCRCLELEERVLKGEERYTHLETELQKRNNEFESLELKFKELESEKLVVEEESRNLKESEEGSPCMTTPVKDYILGRDRDRDRDTMSSRRRVNKMLSFEDDGHKLTDVVDLCDSETEQRSEEEEFADVMDTIEEANIGENYEDEDVEACDANTSSPLSRRKRKRVIASDDDDDADDDDEDNIPISILKNLKPTNQEMSDLFDTPNKGESESRRLSGQRRVSSRLNKKRVSEEVSASTERLVGIPTTDNAEDDETEEEGSESEGESLDGFIIDDDDSQESVSEKSDEIGVEESDGEVGYADVMSRLRREKKPEKRKWEYEADMLADFGKDPELCMRAVCVLFRFQTEDEKVERSSHVSNGRGFSKVDAVRGTSIALFLTDGDSAGDMKKSVEELKVFDFKGVEKCEELARKYSKQLFQIYNNREDPFFTLPPSP

SEQ ID NO: 72932 - protein, 436 aa, Arabidopsis thaliana
  peptide (1)..(436): Ceres Seq. ID no. 4951651
  misc_feature (18)..(335): Pfam Name: Sas10/Utp3 family Pfam Description: Sas10/Utp3 family
  misc_feature (1)..(436): Homolog of NCBI NO: 15238681 NR Description: unknown protein; protein id: At5g53220.1 thaliana] >gi|9759169|dbj|BAB09784.1| gene_id:K19E1.2~unknown
  misc_feature (313)..(430): Homolog of NCBI NO: 21742592 NR Description: OSJNBb0076A22.19 [Oryza sativa (japonica
  misc_feature (9)..(334): Homolog of NCBI NO: 23613492 NR Description: P. falciparum RESA-like protein with DnaJ domain
  misc_feature (11)..(324): Homolog of NCBI NO: 9837385 NR Description: retinitis pigmentosa GTPase regulator-like
  misc_feature (9)..(324): Homolog of NCBI NO: 9837385 NR Description: retinitis pigmentosa GTPase regulator-like
  misc_feature (9)..(316): Homolog of NCBI NO: 9837385 NR Description: retinitis pigmentosa GTPase regulator-like
  misc_feature (26)..(320): Homolog of NCBI NO: 21309836 NR Description: glutamic acid-rich protein cNBL1700 [Trichinella
MGLNCRCLELEERVLKGEERYTHLETELQKRNNEFESLELKFKELESEKLVVEEESRNLKESEEGSPCMTTPVKDYILGRDRDRDRDTMSSRRRVNKMLSFEDDGHKLTDVVDLCDSETEQRSEEEEFADVMDTIEEANIGENYEDEDVEACDANTSSPLSRRKRKRVIASDDDDDADDDDEDNIPISILKNLKPTNQEMSDLFDTPNKGESESRRLSGQRRVSSRLNKKRVSEEVSASTERLVGIPTTDNAEDDETEEEGSESEGESLDGFIIDDDDSQESVSEKSDEIGVEESDGEVGYADVMSRLRREKKPEKRKWEYEADMLADFGKDPELCMRAVCVLFRFQTEDEKVERSSHVSNGRGFSKVDAVRGTSIALFLTDGDSAGDMKKSVEELKVFDFKGVEKCEELARKYSKQLFQIYNNREDPFFTLPPSP

SEQ ID NO: 72933 - protein, 368 aa, Arabidopsis thaliana
  peptide (1)..(368): Ceres Seq. ID no. 4951652
  misc_feature (1)..(267): Pfam Name: Sas10/Utp3 family Pfam Description: Sas10/Utp3 family
  misc_feature (1)..(368): Homolog of NCBI NO: 15238681 NR Description: unknown protein; protein id: At5g53220.1 thaliana] >gi|9759169|dbj|BAB09784.1| gene_id:K19E1.2~unknown
  misc_feature (245)..(362): Homolog of NCBI NO: 21742592 NR Description: OSJNBb0076A22.19 [Oryza sativa (japonica
  misc_feature (1)..(266): Homolog of NCBI NO: 23613492 NR Description: P. falciparum RESA-like protein with DnaJ domain
  misc_feature (1)..(256): Homolog of NCBI NO: 9837385 NR Description: retinitis pigmentosa GTPase regulator-like
  misc_feature (1)..(256): Homolog of NCBI NO: 9837385 NR Description: retinitis pigmentosa GTPase regulator-like
  misc_feature (1)..(248): Homolog of NCBI NO: 9837385 NR Description: retinitis pigmentosa GTPase regulator-like
  misc_feature (1)..(252): Homolog of NCBI NO: 21309836 NR Description: glutamic acid-rich protein cNBL1700 [Trichinella
MTTPVKDYILGRDRDRDRDTMSSRRRVNKMLSFEDDGHKLTDVVDLCDSETEQRSEEEEFADVMDTIEEANIGENYEDEDVEACDANTSSPLSRRKRKRVIASDDDDDADDDDEDNIPISILKNLKPTNQEMSDLFDTPNKGESESRRLSGQRRVSSRLNKKRVSEEVSASTERLVGIPTTDNAEDDETEEEGSESEGESLDGFIIDDDDSQESVSEKSDEIGVEESDGEVGYADVMSRLRREKKPEKRKWEYEADMLADFGKDPELCMRAVCVLFRFQTEDEKVERSSHVSNGRGFSKVDAVRGTSIALFLTDGDSAGDMKKSVEELKVFDFKGVEKCEELARKYSKQLFQIYNNREDPFFTLPPSP

SEQ ID NO: 72934 - DNA, 885 bp, Arabidopsis thaliana
  misc_feature (1)..(885): Ceres Seq. ID no. 4951653
  misc_feature: MA Experiment ID: 20000171 Result: Down-regulated in Transcription
  misc_feature: MA Experiment 20000171 PARAMETER Experiment Name: At_42deg_Heat_P Parameter: Age (day) Value: 14
  misc_feature: MA Experiment 20000171 PARAMETER Experiment Name: At_42deg_Heat_P Parameter: Organism Value: A. thaliana
  misc_feature: MA Experiment 20000171 PARAMETER Experiment Name: At_42deg_Heat_P Parameter: Plant Line Value: WS
  misc_feature: MA Experiment 20000171 PARAMETER Experiment Name: At_42deg_Heat_P Parameter: Temperature (deg C) Value: 42 vs. 22
  misc_feature: MA Experiment 20000171 PARAMETER Experiment Name: At_42deg_Heat_P Parameter: Timepoint (hr) Value: 1
  misc_feature: MA Experiment 20000171 PARAMETER Experiment Name: At_42deg_Heat_P Parameter: Tissue Value: Aerial
  misc_feature: MA Experiment ID: 20000436 Result: Down-regulated in Transcription
  misc_feature: MA Experiment 20000436 PARAMETER Experiment Name: At_Drought_P Parameter: Age (day) Value: 7
  misc_feature: MA Experiment 20000436 PARAMETER Experiment Name: At_Drought_P Parameter: Organism Value: A. thaliana
  misc_feature: MA Experiment 20000436 PARAMETER Experiment Name: At_Drought_P Parameter: Plant Line Value: WS
  misc_feature: MA Experiment 20000436 PARAMETER Experiment Name: At_Drought_P Parameter: Timepoint (hr) Value: 12
  misc_feature: MA Experiment 20000436 PARAMETER Experiment Name: At_Drought_P Parameter: Tissue Value: Whole Plant
  misc_feature: MA Experiment 20000436 PARAMETER Experiment Name: At_Drought_P Parameter: Treatment Value: Drought vs. No Drought
  misc_feature: MA Experiment ID: 20000453 Result: Down-regulated in Transcription
  misc_feature: MA Experiment 20000453 PARAMETER Experiment Name: At_100uM_ABA_P Parameter: Age (day) Value: 15
  misc_feature: MA Experiment 20000453 PARAMETER Experiment Name: At_100uM_ABA_P Parameter: Organism Value: A. thaliana
  misc_feature: MA Experiment 20000453 PARAMETER Experiment Name: At_100uM_ABA_P Parameter: Plant Line Value: WS
  misc_feature: MA Experiment 20000453 PARAMETER Experiment Name: At_100uM_ABA_P Parameter: Timepoint (hr) Value: 24
  misc_feature: MA Experiment 20000453 PARAMETER Experiment Name: At_100uM_ABA_P Parameter: Tissue Value: Aerial
  misc_feature: MA Experiment 20000453 PARAMETER Experiment Name: At_100uM_ABA_P Parameter: Treatment Value: 100uM ABA vs. No Treatment
atgcaggagataataccggattttcttgaagagtgtgaatttgtcgacacttcactagccggagatgatctatttgccatcttagagagtcttgaaggtgccggagagatatctccgacagctgcatctacacctaaagatggaaccacaagttccaaggagttagttaaggatcaagattatgaaaactcatctcctaagaggaaaaagcaaagactagaaaccaggaaagaagaggacgaagaagaagaagacggagacggagaagcagaagaagataataagcaagatgggcaacaaaagatgtctcatgtaaccgtggaacgtaaccggagaaagcaaatgaacgagcacttaaccgttttgcgttctcttatgccttgtttctacgtcaaacggggggaccaagcatcgatcataggaggagttgtggagtacataagcgagttacaacaagttctccaatctttggaagccaagaaacaacgtaaaacctacgccgaagtcctaagcccgagagttgtcccgagccctcgtccttcaccgcctgttctaagcccaagaaaaccgcctcttagcccgcttagtagtaaccatgagagtagtgtgatcaatgagcttgttgctaactcaaaatcggctttggctgatgtggaagtgaagttttcaggagctaacgtgctgctcaaaacggtgtcgcataagatcccgggacaagttatgaagataattgctgctcttgaagatttggctcttgagattcttcaggttaatattaacaccgtcgacgaaaccatgcttaattctttcaccatcaagattggaattgagtgccaactaagtgcagaagaactggctcaacaaattcagcaaacattctgctag

SEQ ID NO: 72935 - protein, 294 aa, Arabidopsis thaliana
  peptide (1)..(294): Ceres Seq. ID no. 4951654
  misc_feature (100)..(151): Pfam Name: Helix-loop-helix DNA-binding domain Pfam Description: Helix-loop-helix DNA-binding domain
  misc_feature (1)..(294): Homolog of NCBI NO: 15238680 NR Description: bHLH protein; protein id: At5g53210.1
  misc_feature (102)..(293): Homolog of NCBI NO: 15230639 NR Description: putative helix-loop-helix DNA-binding protein; id: At3g06120.1 [Arabidopsis thaliana]
  misc_feature (57)..(293): Homolog of NCBI NO: 30687365 NR Description: bHLH protein family [Arabidopsis thaliana]
  misc_feature (57)..(276): Homolog of NCBI NO: 11994233 NR Description: contains similarity to helix-loop-helix
  misc_feature (94)..(291): Homolog of NCBI NO: 34902426 NR Description: Unknown protein [Oryza sativa (japonica
  misc_feature (94)..(292): Homolog of NCBI NO: 18395124 NR Description: expressed protein; protein id: At1g22490.1,
  misc_feature (94)..(292): Homolog of NCBI NO: 21593808 NR Description: unknown [Arabidopsis thaliana]
  misc_feature (41)..(291): Homolog of NCBI NO: 37533680 NR Description: putative helix-loop-helix DNA-binding protein
  misc_feature (1)..(293): Homolog of NCBI NO: 15234187 NR Description: bHLH protein; protein id: At4g01460.1, supported cDNA: gi_20127053, supported by cDNA: gi_20466627 [Arabidopsis
  misc_feature (94)..(162): Homolog of NCBI NO: 38346722 NR Description: OSJNBa0086O06.20 [Oryza sativa (japonica
MQEIIPDFLEECEFVDTSLAGDDLFAILESLEGAGEISPTAASTPKDGTTSSKELVKDQDYENSSPKRKKQRLETRKEEDEEEEDGDGEAEEDNKQDGQQKMSHVTVERNRRKQMNEHLTVLRSLMPCFYVKRGDQASIIGGVVEYISELQQVLQSLEAKKQRKTYAEVLSPRVVPSPRPSPPVLSPRKPPLSPLSSNHESSVINELVANSKSALADVEVKFSGANVLLKTVSHKIPGQVMKIIAALEDLALEILQVNINTVDETMLNSFTIKIGIECQLSAEELAQQIQQTFC

SEQ ID NO: 72936 - protein, 193 aa, Arabidopsis thaliana
  peptide (1)..(193): Ceres Seq. ID no. 4951655
  misc_feature (1)..(50): Pfam Name: Helix-loop-helix DNA-binding domain Pfam Description: Helix-loop-helix DNA-binding domain
  misc_feature (1)..(193): Homolog of NCBI NO: 15238680 NR Description: bHLH protein; protein id: At5g53210.1
  misc_feature (1)..(192): Homolog of NCBI NO: 15230639 NR Description: putative helix-loop-helix DNA-binding protein; id: At3g06120.1 [Arabidopsis thaliana]
  misc_feature (1)..(192): Homolog of NCBI NO: 30687365 NR Description: bHLH protein family [Arabidopsis thaliana]
  misc_feature (1)..(175): Homolog of NCBI NO: 11994233 NR Description: contains similarity to helix-loop-helix
  misc_feature (1)..(190): Homolog of NCBI NO: 34902426 NR Description: Unknown protein [Oryza sativa (japonica
  misc_feature (1)..(191): Homolog of NCBI NO: 18395124 NR Description: expressed protein; protein id: At1g22490.1,
  misc_feature (1)..(191): Homolog of NCBI NO: 21593808 NR Description: unknown [Arabidopsis thaliana]
  misc_feature (1)..(190): Homolog of NCBI NO: 37533680 NR Description: putative helix-loop-helix DNA-binding protein
  misc_feature (1)..(192): Homolog of NCBI NO: 15234187 NR Description: bHLH protein; protein id: At4g01460.1, supported cDNA: gi_20127053, supported by cDNA: gi_20466627 [Arabidopsis
  misc_feature (1)..(61): Homolog of NCBI NO: 38346722 NR Description: OSJNBa0086O06.20 [Oryza sativa (japonica
MSHVTVERNRRKQMNEHLTVLRSLMPCFYVKRGDQASIIGGVVEYISELQQVLQSLEAKKQRKTYAEVLSPRVVPSPRPSPPVLSPRKPPLSPLSSNHESSVINELVANSKSALADVEVKFSGANVLLKTVSHKIPGQVMKIIAALEDLALEILQVNINTVDETMLNSFTIKIGIECQLSAEELAQQIQQTFC

SEQ ID NO: 72937 - protein, 180 aa, Arabidopsis thaliana
  peptide (1)..(180): Ceres Seq. ID no. 4951656
  misc_feature (1)..(37): Pfam Name: Helix-loop-helix DNA-binding domain Pfam Description: Helix-loop-helix DNA-binding domain
  misc_feature (1)..(180): Homolog of NCBI NO: 15238680 NR Description: bHLH protein; protein id: At5g53210.1
  misc_feature (1)..(179): Homolog of NCBI NO: 15230639 NR Description: putative helix-loop-helix DNA-binding protein; id: At3g06120.1 [Arabidopsis thaliana]
  misc_feature (1)..(179): Homolog of NCBI NO: 30687365 NR Description: bHLH protein family [Arabidopsis thaliana]
  misc_feature (1)..(162): Homolog of NCBI NO: 11994233 NR Description: contains similarity to helix-loop-helix
  misc_feature (1)..(177): Homolog of NCBI NO: 34902426 NR Description: Unknown protein [Oryza sativa (japonica
  misc_feature (1)..(178): Homolog of NCBI NO: 18395124 NR Description: expressed protein; protein id: At1g22490.1,
  misc_feature (1)..(178): Homolog of NCBI NO: 21593808 NR Description: unknown [Arabidopsis thaliana]
  misc_feature (1)..(177): Homolog of NCBI NO: 37533680 NR Description: putative helix-loop-helix DNA-binding protein
  misc_feature (1)..(179): Homolog of NCBI NO: 15234187 NR Description: bHLH protein; protein id: At4g01460.1, supported cDNA: gi_20127053, supported by cDNA: gi_20466627 [Arabidopsis
  misc_feature (1)..(48): Homolog of NCBI NO: 38346722 NR Description: OSJNBa0086O06.20 [Oryza sativa (japonica
MNEHLTVLRSLMPCFYVKRGDQASIIGGVVEYISELQQVLQSLEAKKQRKTYAEVLSPRVVPSPRPSPPVLSPRKPPLSPLSSNHESSVINELVANSKSALADVEVKFSGANVLLKTVSHKIPGQVMKIIAALEDLALEILQVNINTVDETMLNSFTIKIGIECQLSAEELAQQIQQTFC

SEQ ID NO: 72938 - DNA, 1608 bp, Arabidopsis thaliana
  misc_feature (1)..(1608): Ceres Seq. ID no. 4951733
  misc_feature: MA Experiment ID: 20000171 Result: Up-regulated in Transcription
  misc_feature: MA Experiment 20000171 PARAMETER Experiment Name: At_42deg_Heat_P Parameter: Age (day) Value: 14
  misc_feature: MA Experiment 20000171 PARAMETER Experiment Name: At_42deg_Heat_P Parameter: Organism Value: A. thaliana
  misc_feature: MA Experiment 20000171 PARAMETER Experiment Name: At_42deg_Heat_P Parameter: Plant Line Value: WS
  misc_feature: MA Experiment 20000171 PARAMETER Experiment Name: At_42deg_Heat_P Parameter: Temperature (deg C) Value: 42 vs. 22
  misc_feature: MA Experiment 20000171 PARAMETER Experiment Name: At_42deg_Heat_P Parameter: Timepoint (hr) Value: 1
  misc_feature: MA Experiment 20000171 PARAMETER Experiment Name: At_42deg_Heat_P Parameter: Tissue Value: Aerial
  misc_feature: MA Experiment ID: 20000184 Result: Down-regulated in Transcription
  misc_feature: MA Experiment 20000184 PARAMETER Experiment Name: At_Shoots__P Parameter: Age (day) Value: 7
  misc_feature: MA Experiment 20000184 PARAMETER Experiment Name: At_Shoots__P Parameter: Tissue Value: Shoots vs. Whole Plant
  misc_feature: MA Experiment ID: 20000264 Result: Down-regulated in Transcription
  misc_feature: MA Experiment 20000264 PARAMETER Experiment Name: At_Open_Flower_P Parameter: Age (day) Value: 21
  misc_feature: MA Experiment 20000264 PARAMETER Experiment Name: At_Open_Flower_P Parameter: Plant Line Value: WS
  misc_feature: MA Experiment 20000264 PARAMETER Experiment Name: At_Open_Flower_P Parameter: Tissue Value: Open Flower vs. Whole Plant
  misc_feature: MA Experiment ID: 20000265 Result: Down-regulated in Transcription
  misc_feature: MA Experiment 20000265 PARAMETER Experiment Name: At_Open_Flower_P Parameter: Age (day) Value: 21
  misc_feature: MA Experiment 20000265 PARAMETER Experiment Name: At_Open_Flower_P Parameter: Plant Line Value: WS
  misc_feature: MA Experiment 20000265 PARAMETER Experiment Name: At_Open_Flower_P Parameter: Tissue Value: Closed Flower vs. Whole Plant
  misc_feature: MA Experiment ID: 20000286 Result: Down-regulated in Transcription
  misc_feature: MA Experiment 20000286 PARAMETER Experiment Name: At_Open_Flower_P Parameter: Age (day) Value: 21
  misc_feature: MA Experiment 20000286 PARAMETER Experiment Name: At_Open_Flower_P Parameter: Plant Line Value: WS
  misc_feature: MA Experiment 20000286 PARAMETER Experiment Name: At_Open_Flower_P Parameter: Tissue Value: Half Open vs. Whole Plant
  misc_feature: MA Experiment ID: 20000438 Result: Down-regulated in Transcription
  misc_feature: MA Experiment 20000438 PARAMETER Experiment Name: At_Shoots__P Parameter: Age (day) Value: 14
  misc_feature: MA Experiment 20000438 PARAMETER Experiment Name: At_Shoots__P Parameter: Tissue Value: Shoots vs. Whole Plant
  misc_feature: MA Experiment ID: 20001556 Result: Down-regulated in Transcription
  misc_feature: MA Experiment 20001556 PARAMETER Experiment Name: At_Drought_Soil_Dry_P Parameter: Age (day) Value: 26
  misc_feature: MA Experiment 20001556 PARAMETER Experiment Name: At_Drought_Soil_Dry_P Parameter: Organism Value: A. thaliana
  misc_feature: MA Experiment 20001556 PARAMETER Experiment Name: At_Drought_Soil_Dry_P Parameter: Plant Line Value: WS
  misc_feature: MA Experiment 20001556 PARAMETER Experiment Name: At_Drought_Soil_Dry_P Parameter: Post Timepoint (hr) Value: None
  misc_feature: MA Experiment 20001556 PARAMETER Experiment Name: At_Drought_Soil_Dry_P Parameter: Post-Treatment Value: None
  misc_feature: MA Experiment 20001556 PARAMETER Experiment Name: At_Drought_Soil_Dry_P Parameter: Timepoint (day) Value: 12
  misc_feature: MA Experiment 20001556 PARAMETER Experiment Name: At_Drought_Soil_Dry_P Parameter: Treatment Value: Drought vs. No Drought
  misc_feature: MA Experiment ID: 20001557 Result: Down-regulated in Transcription
  misc_feature: MA Experiment 20001557 PARAMETER Experiment Name: At_Drought_Soil_Dry_P Parameter: Age (day) Value: 27
  misc_feature: MA Experiment 20001557 PARAMETER Experiment Name: At_Drought_Soil_Dry_P Parameter: Organism Value: A. thaliana
  misc_feature: MA Experiment 20001557 PARAMETER Experiment Name: At_Drought_Soil_Dry_P Parameter: Plant Line Value: WS
  misc_feature: MA Experiment 20001557 PARAMETER Experiment Name: At_Drought_Soil_Dry_P Parameter: Post Timepoint (hr) Value: 3
  misc_feature: MA Experiment 20001557 PARAMETER Experiment Name: At_Drought_Soil_Dry_P Parameter: Post-Treatment Value: Re-Water vs. No Drought
  misc_feature: MA Experiment 20001557 PARAMETER Experiment Name: At_Drought_Soil_Dry_P Parameter: Timepoint (day) Value: 13
  misc_feature: MA Experiment 20001557 PARAMETER Experiment Name: At_Drought_Soil_Dry_P Parameter: Treatment Value: Drought vs. No Drought
  misc_feature: MA Experiment ID: 20001768 Result: Up-regulated in Transcription
  misc_feature: MA Experiment 20001768 PARAMETER Experiment Name: At_Far-red-enriched-adult_P Parameter: Age (day) Value: 28
  misc_feature: MA Experiment 20001768 PARAMETER Experiment Name: At_Far-red-enriched-adult_P Parameter: Light Value: Far-red enriched vs. White
  misc_feature: MA Experiment 20001768 PARAMETER Experiment Name: At_Far-red-enriched-adult_P Parameter: Organism Value: A. thaliana
  misc_feature: MA Experiment 20001768 PARAMETER Experiment Name: At_Far-red-enriched-adult_P Parameter: Plant Line Value: Columbia
  misc_feature: MA Experiment 20001768 PARAMETER Experiment Name: At_Far-red-enriched-adult_P Parameter: Timepoint (hr) Value: 1
  misc_feature: MA Experiment 20001768 PARAMETER Experiment Name: At_Far-red-enriched-adult_P Parameter: Tissue Value: Aerial
  misc_feature: MA Experiment ID: 20001773 Result: Up-regulated in Transcription
  misc_feature: MA Experiment 20001773 PARAMETER Experiment Name: At_Far-red-enriched-adult_P Parameter: Age (day) Value: 30
  misc_feature: MA Experiment 20001773 PARAMETER Experiment Name: At_Far-red-enriched-adult_P Parameter: Light Value: Far-red enriched vs. White
  misc_feature: MA Experiment 20001773 PARAMETER Experiment Name: At_Far-red-enriched-adult_P Parameter: Organism Value: A. thaliana
  misc_feature: MA Experiment 20001773 PARAMETER Experiment Name: At_Far-red-enriched-adult_P Parameter: Plant Line Value: Columbia
  misc_feature: MA Experiment 20001773 PARAMETER Experiment Name: At_Far-red-enriched-adult_P Parameter: Timepoint (hr) Value: 48
  misc_feature: MA Experiment 20001773 PARAMETER Experiment Name: At_Far-red-enriched-adult_P Parameter: Tissue Value: Aerial
  misc_feature: MA Experiment ID: 20001911 Result: Down-regulated in Transcription
  misc_feature: MA Experiment 20001911 PARAMETER Experiment Name: At_Drought_Reproduction_P Parameter: Age (day) Value: 40
  misc_feature: MA Experiment 20001911 PARAMETER Experiment Name: At_Drought_Reproduction_P Parameter: Organism Value: A. thaliana
  misc_feature: MA Experiment 20001911 PARAMETER Experiment Name: At_Drought_Reproduction_P Parameter: Plant Line Value: WS
  misc_feature: MA Experiment 20001911 PARAMETER Experiment Name: At_Drought_Reproduction_P Parameter: Timepoint (day) Value: 10
  misc_feature: MA Experiment 20001911 PARAMETER Experiment Name: At_Drought_Reproduction_P Parameter: Tissue Value: Flowers
  misc_feature: MA Experiment 20001911 PARAMETER Experiment Name: At_Drought_Reproduction_P Parameter: Treatment Value: Drought vs. No Drought
  misc_feature: Pfam Name: Glyco_transf_8 Pfam Description: Glycosyl transferase family 8
atgcagttacatatatctccgagcttgagacatgtgactgtggtcacagggaaaggattgagagagttcataaaagttaaggttggttctagaagattctcttatcaaatggtgttttactctctactcttcttcacttttcttctccgattcgtctttgttctctccaccgttgatactatcgacggcgatccctctccttgctcctctcttgcttgcttggggaaaagactaaagccaaagcttttaggaagaagggttgattctggtaatgttccagaagctatgtaccaagttttagaacagcctttaagcgaacaagaactcaaaggaagatcagatatacctcaaacacttcaagatttcatgtctgaagtcaaaagaagcaaatcagacgcaagagaatttgctcaaaagctaaaagaaatggtgacattgatggaacagagaacaagaacggctaagattcaagagtatttatatcgacatgtcgcatcaagcagcataccgaaacaacttcactgtttagctcttaaactagccaacgaacactcgataaacgcagcggcgcgtctccagcttccagaagctgagcttgtccctatgttggtagacaacaactactttcactttgtcttggcttcagacaatattcttgcagcttcggttgtggctaagtcgttggttcaaaatgctttaagacctcataagatcgttcttcacatcataacggataggaaaacttatttcccaatgcaagcttggttctcattgcatcctctgtctccagcaataattgaggtcaaggctttgcatcatttcgattggttatcgaaaggtaaagtacccgttttggaagctatggagaaagatcagagagtgaggtctcaattcagaggtggatcatcggttattgtggctaataacaaagagaacccggttgttgttgctgctaagttacaagctctcagccctaaatacaactccttgatgaatcacatccgtattcatctaccagagttgtttccaagcttaaacaaggttgtgtttctagacgatgacattgtgatccaaactgatctttcacctctttgggacattgacatgaatggaaaagtaaatggagcagtggaaacatgtagaggagaagacaagtttgtgatgtcaaagaagttcaagagttacctcaacttctcgaatccgacaattgccaaaaacttcaatccagaggaatgtgcatgggcttatggaatgaatgttttcgacctagcggcttggaggaggactaacataagctccacttactatcattggcttgacgagaacttaaaatcagacctgagtttgtggcagctgggaactttgcctcctgggctgattgctttccacggtcatgtccaaaccatagatccgttctggcatatgcttggtctcggataccaagagaccacgagctatgccgatgctgaaagtgccgctgttgttcatttcaatggaagagctaagccttggctggatatagcatttcctcatctacgtcctctctgggctaagtatcttgattcttctgacagatttatcaagagctgtcacattagagcatcatga

SEQ ID NO: 72939 - protein, 535 aa, Arabidopsis thaliana
  peptide (1)..(535): Ceres Seq. ID no. 4951734
  misc_feature: Pfam Name: Glyco_transf_8 Pfam Description: Glycosyl transferase family 8
  misc_feature (1)..(535): Homolog of NCBI NO: 15239707 NR Description: putative protein; protein id: At5g54690.1 thaliana] >gi|10176796|dbj|BAB09935.1| contains similarity to
  misc_feature (1)..(532): Homolog of NCBI NO: 30678270 NR Description: glycosyltransferase family 8 [Arabidopsis
  misc_feature (1)..(532): Homolog of NCBI NO: 30685369 NR Description: glycosyltransferase family 8 [Arabidopsis >gi|26452322|dbj|BAC43247.1| unknown protein [Arabidopsis
  misc_feature (1)..(532): Homolog of NCBI NO: 11358133 NR Description: hypothetical protein T20K14_80 - Arabidopsis >gi|9755802|emb|CAC01746.1| putative protein [Arabidopsis
  misc_feature (24)..(532): Homolog of NCBI NO: 6714484 NR Description: unknown protein [Arabidopsis thaliana]
  misc_feature (28)..(532): Homolog of NCBI NO: 22331857 NR Description: putative protein; protein id: At3g58790.1, by cDNA: gi_20466463 [Arabidopsis thaliana] putative protein [Arabidopsis thaliana]
  misc_feature (28)..(532): Homolog of NCBI NO: 11358146 NR Description: hypothetical protein T20N10.140 - Arabidopsis >gi|7630074|emb|CAB88296.1| putative protein [Arabidopsis
  misc_feature (138)..(531): Homolog of NCBI NO: 15230806 NR Description: glycosyl transferase, putative; protein id: supported by cDNA: gi_20466216 [Arabidopsis thaliana] Glycosyltransferase QUASIMODO1 >gi|9294170|dbj|BAB02072.1|
  misc_feature (98)..(532): Homolog of NCBI NO: 7485958 NR Description: hypothetical protein F22I13.40 - Arabidopsis >gi|4539335|emb|CAB37483.1| putative protein [Arabidopsis >gi|7270811|emb|CAB80492.1| putative protein [Arabidopsis
  misc_feature (98)..(532): Homolog of NCBI NO: 30691875 NR Description: glycosyltransferase family 8 [Arabidopsis
MQLHISPSLRHVTVVTGKGLREFIKVKVGSRRFSYQMVFYSLLFFTFLLRFVFVLSTVDTIDGDPSPCSSLACLGKRLKPKLLGRRVDSGNVPEAMYQVLEQPLSEQELKGRSDIPQTLQDFMSEVKRSKSDAREFAQKLKEMVTLMEQRTRTAKIQEYLYRHVASSSIPKQLHCLALKLANEHSINAAARLQLPEAELVPMLVDNNYFHFVLASDNILAASVVAKSLVQNALRPHKIVLHIITDRKTYFPMQAWFSLHPLSPAIIEVKALHHFDWLSKGKVPVLEAMEKDQRVRSQFRGGSSVIVANNKENPVVVAAKLQALSPKYNSLMNHIRIHLPELFPSLNKVVFLDDDIVIQTDLSPLWDIDMNGKVNGAVETCRGEDKFVMSKKFKSYLNFSNPTIAKNFNPEECAWAYGMNVFDLAAWRRTNISSTYYHWLDENLKSDLSLWQLGTLPPGLIAFHGHVQTIDPFWHMLGLGYQETTSYADAESAAVVHFNGRAKPWLDIAFPHLRPLWAKYLDSSDRFIKSCHIRAS

SEQ ID NO: 72940 - protein, 499 aa, Arabidopsis thaliana; identical to SEQ ID NO: 70111
  peptide (1)..(499): Ceres Seq. ID no. 4951735
  misc_feature: Pfam Name: Glyco_transf_8 Pfam Description: Glycosyl transferase family 8
  misc_feature (1)..(499): Homolog of NCBI NO: 15239707 NR Description: putative protein; protein id: At5g54690.1 thaliana] >gi|10176796|dbj|BAB09935.1| contains similarity to
  misc_feature (1)..(496): Homolog of NCBI NO: 30678270 NR Description: glycosyltransferase family 8 [Arabidopsis
  misc_feature (1)..(496): Homolog of NCBI NO: 30685369 NR Description: glycosyltransferase family 8 [Arabidopsis >gi|26452322|dbj|BAC43247.1| unknown protein [Arabidopsis
  misc_feature (1)..(496): Homolog of NCBI NO: 11358133 NR Description: hypothetical protein T20K14_80 - Arabidopsis >gi|9755802|emb|CAC01746.1| putative protein [Arabidopsis
  misc_feature (1)..(496): Homolog of NCBI NO: 6714484 NR Description: unknown protein [Arabidopsis thaliana]
  misc_feature (1)..(496): Homolog of NCBI NO: 22331857 NR Description: putative protein; protein id: At3g58790.1, by cDNA: gi_20466463 [Arabidopsis thaliana] putative protein [Arabidopsis thaliana]
  misc_feature (1)..(496): Homolog of NCBI NO: 11358146 NR Description: hypothetical protein T20N10.140 - Arabidopsis >gi|7630074|emb|CAB88296.1| putative protein [Arabidopsis
  misc_feature (102)..(495): Homolog of NCBI NO: 15230806 NR Description: glycosyl transferase, putative; protein id: supported by cDNA: gi_20466216 [Arabidopsis thaliana] Glycosyltransferase QUASIMODO1 >gi|9294170|dbj|BAB02072.1|
  misc_feature (62)..(496): Homolog of NCBI NO: 7485958 NR Description: hypothetical protein F22I13.40 - Arabidopsis >gi|4539335|emb|CAB37483.1| putative protein [Arabidopsis >gi|7270811|emb|CAB80492.1| putative protein [Arabidopsis
  misc_feature (62)..(496): Homolog of NCBI NO: 30691875 NR Description: glycosyltransferase family 8 [Arabidopsis

SEQ ID NO: 72941 - protein, 440 aa, Arabidopsis thaliana; identical to SEQ ID NO: 70112
  peptide (1)..(440): Ceres Seq. ID no. 4951736
  misc_feature: Pfam Name: Glyco_transf_8 Pfam Description: Glycosyl transferase family 8
  misc_feature (1)..(440): Homolog of NCBI NO: 15239707 NR Description: putative protein; protein id: At5g54690.1 thaliana] >gi|10176796|dbj|BAB09935.1| contains similarity to
  misc_feature (1)..(437): Homolog of NCBI NO: 30678270 NR Description: glycosyltransferase family 8 [Arabidopsis
  misc_feature (1)..(437): Homolog of NCBI NO: 30685369 NR Description: glycosyltransferase family 8 [Arabidopsis >gi|26452322|dbj|BAC43247.1| unknown protein [Arabidopsis
  misc_feature (1)..(437): Homolog of NCBI NO: 11358133 NR Description: hypothetical protein T20K14_80 - Arabidopsis >gi|9755802|emb|CAC01746.1| putative protein [Arabidopsis
  misc_feature (1)..(437): Homolog of NCBI NO: 6714484 NR Description: unknown protein [Arabidopsis thaliana]
  misc_feature (1)..(437): Homolog of NCBI NO: 22331857 NR Description: putative protein; protein id: At3g58790.1, by cDNA: gi_20466463 [Arabidopsis thaliana] putative protein [Arabidopsis thaliana]
  misc_feature (1)..(437): Homolog of NCBI NO: 11358146 NR Description: hypothetical protein T20N10.140 - Arabidopsis >gi|7630074|emb|CAB88296.1| putative protein [Arabidopsis
  misc_feature (43)..(436): Homolog of NCBI NO: 15230806 NR Description: glycosyl transferase, putative; protein id: supported by cDNA: gi_20466216 [Arabidopsis thaliana] Glycosyltransferase QUASIMODO1 >gi|9294170|dbj|BAB02072.1|
  misc_feature (3)..(437): Homolog of NCBI NO: 7485958 NR Description: hypothetical protein F22I13.40 - Arabidopsis >gi|4539335|emb|CAB37483.1| putative protein [Arabidopsis >gi|7270811|emb|CAB80492.1| putative protein [Arabidopsis
  misc_feature (3)..(437): Homolog of NCBI NO: 30691875 NR Description: glycosyltransferase family 8 [Arabidopsis

SEQ ID NO: 72942 - DNA, 2493 bp, Arabidopsis thaliana
  misc_feature (1)..(2493): Ceres Seq. ID no. 4951811
  misc_feature: MA Experiment ID: 20000180 Result: Up-regulated in Transcription
  misc_feature: MA Experiment 20000180 PARAMETER Experiment Name: At_Germinating_Seeds_P Parameter: Age (hr) Value: 24 vs. 0
  misc_feature: MA Experiment 20000180 PARAMETER Experiment Name: At_Germinating_Seeds_P Parameter: Tissue Value: Germinating Seeds
  misc_feature: MA Experiment ID: 20000182 Result: Down-regulated in Transcription
  misc_feature: MA Experiment 20000182 PARAMETER Experiment Name: At_2mM_SA_P Parameter: Age (day) Value: 14
  misc_feature: MA Experiment 20000182 PARAMETER Experiment Name: At_2mM_SA_P Parameter: Organism Value: A. thaliana
  misc_feature: MA Experiment 20000182 PARAMETER Experiment Name: At_2mM_SA_P Parameter: Plant Line Value: WS
  misc_feature: MA Experiment 20000182 PARAMETER Experiment Name: At_2mM_SA_P Parameter: Timepoint (hr) Value: 6
  misc_feature: MA Experiment 20000182 PARAMETER Experiment Name: At_2mM_SA_P Parameter: Tissue Value: Aerial
  misc_feature: MA Experiment 20000182 PARAMETER Experiment Name: At_2mM_SA_P Parameter: Treatment Value: 2mM SA vs. No Treatment
  misc_feature: MA Experiment ID: 20000185 Result: Down-regulated in Transcription
  misc_feature: MA Experiment 20000185 PARAMETER Experiment Name: At_Roots__P Parameter: Age (day) Value: 7 vs. 21
  misc_feature: MA Experiment 20000185 PARAMETER Experiment Name: At_Roots__P Parameter: Organism Value: A. thaliana
  misc_feature: MA Experiment 20000185 PARAMETER Experiment Name: At_Roots__P Parameter: Tissue Value: Roots vs. Whole Plant
  misc_feature: MA Experiment ID: 20000439 Result: Down-regulated in Transcription
  misc_feature: MA Experiment 20000439 PARAMETER Experiment Name: At_Roots__P Parameter: Age (day) Value: 14 vs. 21
  misc_feature: MA Experiment 20000439 PARAMETER Experiment Name: At_Roots__P Parameter: Organism Value: A. thaliana
  misc_feature: MA Experiment 20000439 PARAMETER Experiment Name: At_Roots__P Parameter: Tissue Value: Roots vs. Whole Plant
  misc_feature: MA Experiment ID: 20001248 Result: Down-regulated in Transcription
  misc_feature: MA Experiment 20001248 PARAMETER Experiment Name: At_Far-red-induction_P Parameter: Age (day) Value: 7
  misc_feature: MA Experiment 20001248 PARAMETER Experiment Name: At_Far-red-induction_P Parameter: Light Value: Far-red vs. White
  misc_feature: MA Experiment 20001248 PARAMETER Experiment Name: At_Far-red-induction_P Parameter: Organism Value: A. thaliana
  misc_feature: MA Experiment 20001248 PARAMETER Experiment Name: At_Far-red-induction_P Parameter: Plant Line Value: Columbia
  misc_feature: MA Experiment 20001248 PARAMETER Experiment Name: At_Far-red-induction_P Parameter: Timepoint (hr) Value: 4
  misc_feature: MA Experiment 20001248 PARAMETER Experiment Name: At_Far-red-induction_P Parameter: Tissue Value: Whole Plant
  misc_feature: MA Experiment ID: 20001450 Result: Down-regulated in Transcription
  misc_feature: MA Experiment 20001450 PARAMETER Experiment Name: At_Far-red-induction_P Parameter: Age (day) Value: 7
  misc_feature: MA Experiment 20001450 PARAMETER Experiment Name: At_Far-red-induction_P Parameter: Light Value: Far-red vs. White
  misc_feature: MA Experiment 20001450 PARAMETER Experiment Name: At_Far-red-induction_P Parameter: Organism Value: A. thaliana
  misc_feature: MA Experiment 20001450 PARAMETER Experiment Name: At_Far-red-induction_P Parameter: Plant Line Value: Columbia
  misc_feature: MA Experiment 20001450 PARAMETER Experiment Name: At_Far-red-induction_P Parameter: Timepoint (hr) Value: 8
  misc_feature: MA Experiment 20001450 PARAMETER Experiment Name: At_Far-red-induction_P Parameter: Tissue Value: Whole Plant
atggcttctcttcctttcaacactatcccgaataaagttccattttcagtatcatcgaaaccttcttctaaacaccacgatgaacaagctcattctccttcttccacatcttactttcatcgcgtttcgtctctttgtaagaacggtgagatcaaagaagctctgagtttagttacagagatggatttcagaaacttacgcattggtcctgagatatacggtgaaatcctccaaggatgcgtttacgagagagatttaagtacagggaagcaaattcatgctcggattttaaagaacggtgatttctacgcgaggaatgagtacatcgagactaaattggtgatattctacgccaagtgcgatgctttggagattgctgaagttcttttctcgaaattgagggttcgtaatgttttctcttgggcagctattattggtgtgaaatgtaggattgggttatgtgaaggagctttaatgggttttgttgagatgcttgaaaatgagatttttcctgataattttgtggttccgaatgtttgtaaagcgtgtggtgcgttgaaatggagtagatttgggagaggggttcatgggtatgtggtaaaatctggtcttgaggattgtgtgtttgtggctagtagtttagctgatatgtatgggaaatgtggtgttttggatgatgcgagtaaggtgtttgatgaaattcctgacagaaatgctgttgcttggaatgcgttgatggttggttatgtacaaaatggtaagaatgaggaagcgattcggcttttttctgatatgaggaagcaaggtgttgagcctactcgtgtcactgtctcgacttgcttatctgcttctgctaatatgggtggggttgaagaggggaaacagtcgcatgccattgctattgtaaatggaatggagctggataatatcttggggacatctttattgaatttctattgcaaagtgggtttgatagagtatgctgagatggtttttgatcggatgtttgaaaaggatgtggttacatggaatctgattatttctgggtatgttcaacaagggctagttgaagatgctatctacatgtgtcaattaatgagactagagaagctgaaatatgattgtgtcactttagcgacattaatgtctgctgctgcacgtactgagaatctaaagctcgggaaagaggtgcagtgttattgcattagacatagttttgaatctgatatcgttttagccagcactgtgatggatatgtatgccaagtgtggcagcattgttgatgctaagaaagtgtttgattctacagtagagaaagacttgatactgtggaatacgttacttgcagcctatgcagaatctggtcttagtggagaggctttgagattgttctatgggatgcagctagaaggtgtacctccaaatgtgataacatggaatttgatcattctaagtcttctaaggaatggtcaggtagatgaggccaaggatatgttcttgcagatgcaatcctcagggataattccaaatcttatctcatggacgactatgatgaatggtatggttcaaaatggttgcagtgaggaggcaattctgtttcttagaaagatgcaagaatcgggcctgagaccaaatgcatttagcatcactgtcgctctctctgcttgcgcacatctagcatcattgcatatcggaagaacaatccacggatacatcataagaaatctacagcattcctctttggtttctattgaaacttctttggttgacatgtatgctaaatgtggagatataaacaaagcagagaaggttttcggaagtaagctatacagcgagttgcctctctccaatgccatgatctcggcgtatgcattatatggtaacttaaaagaagcaatcgctctatacagaagcttagaaggtgtaggtcttaaaccagacaacatcacaatcacaaatgtcttatcagcatgtaaccacgcaggggatattaaccaggctatcgagattttcactgatatcgtttcaaagcgtagtatgaaaccatgcttggaacattatggacttatggtagatcttcttgcatcagctggagaaacagaaaaagctttaaggttaatcgaggaaatgccattcaagccagatgcacgaatgatccaatctttggttgcttcttgcaacaaacagcgtaagactgagcttgtggactacttatcaaggaaattgcttgaatccgagcctgaaaactccggtaactatgtgacgatatcgaatgcttatgcggttgaaggaagttgggatgaagttgtgaagatgagagagatgatgaaagctaagggtttgaagaaaaaacctggatgtagttggatacagattacaggagaagaaggagtccatgtgtttgttgccaatgataagacacatactaggatcaatgagatacaaatgatgttagcattgttattatatgatatgggtacaggttccaaatga

SEQ ID NO: 72943 - protein, 830 aa, Arabidopsis thaliana
  peptide (1)..(830): Ceres Seq. ID no. 4951812
  misc_feature (139)..(173): Pfam Name: PPR repeat Pfam Description: PPR repeat
  misc_feature (9)..(604): Homolog of NCBI NO: 34912504 NR Description: selenium-binding protein-like [Oryza sativa
  misc_feature (18)..(478): Homolog of NCBI NO: 18394615 NR Description: hypothetical protein; protein id: At1g18485.1
  misc_feature (481)..(821): Homolog of NCBI NO: 18394615 NR Description: hypothetical protein; protein id: At1g18485.1
  misc_feature (18)..(478): Homolog of NCBI NO: 25402861 NR Description: protein F15H18.4 [imported] - Arabidopsis >gi|6714305|gb|AAF26001.1|AC013354_20 F15H18.4 [Arabidopsis
  misc_feature (481)..(821): Homolog of NCBI NO: 25402861 NR Description: protein F15H18.4 [imported] - Arabidopsis >gi|6714305|gb|AAF26001.1|AC013354_20 F15H18.4 [Arabidopsis
  misc_feature (111)..(822): Homolog of NCBI NO: 21741755 NR Description: OSJNBa0060B20.9 [Oryza sativa (japonica
  misc_feature (407)..(818): Homolog of NCBI NO: 38423978 NR Description: PPR-repeat protein-like [Oryza sativa (japonica
  misc_feature (180)..(475): Homolog of NCBI NO: 38423978 NR Description: PPR-repeat protein-like [Oryza sativa (japonica
  misc_feature (414)..(825): Homolog of NCBI NO: 18483237 NR Description: putative vegetative storage protein [Sorghum
  misc_feature (222)..(472): Homolog of NCBI NO: 18483237 NR Description: putative vegetative storage protein [Sorghum
MASLPFNTIPNKVPFSVSSKPSSKHHDEQAHSPSSTSYFHRVSSLCKNGEIKEALSLVTEMDFRNLRIGPEIYGEILQGCVYERDLSTGKQIHARILKNGDFYARNEYIETKLVIFYAKCDALEIAEVLFSKLRVRNVFSWAAIIGVKCRIGLCEGALMGFVEMLENEIFPDNFVVPNVCKACGALKWSRFGRGVHGYVVKSGLEDCVFVASSLADMYGKCGVLDDASKVFDEIPDRNAVAWNALMVGYVQNGKNEEAIRLFSDMRKQGVEPTRVTVSTCLSASANMGGVEEGKQSHAIAIVNGMELDNILGTSLLNFYCKVGLIEYAEMVFDRMFEKDVVTWNLIISGYVQQGLVEDAIYMCQLMRLEKLKYDCVTLATLMSAAARTENLKLGKEVQCYCIRHSFESDIVLASTVMDMYAKCGSIVDAKKVFDSTVEKDLILWNTLLAAYAESGLSGEALRLFYGMQLEGVPPNVITWNLIILSLLRNGQVDEAKDMFLQMQSSGIIPNLISWTTMMNGMVQNGCSEEAILFLRKMQESGLRPNAFSITVALSACAHLASLHIGRTIHGYIIRNLQHSSLVSIETSLVDMYAKCGDINKAEKVFGSKLYSELPLSNAMISAYALYGNLKEAIALYRSLEGVGLKPDNITITNVLSACNHAGDINQAIEIFTDIVSKRSMKPCLEHYGLMVDLLASAGETEKALRLIEEMPFKPDARMIQSLVASCNKQRKTELVDYLSRKLLESEPENSGNYVTISNAYAVEGSWDEVVKMREMMKAKGLKKKPGCSWIQITGEEGVHVFVANDKTHTRINEIQMMLALLLYDMGTGSK

SEQ ID NO: 72944 - protein, 770 aa, Arabidopsis thaliana
  peptide (1)..(770): Ceres Seq. ID no. 4951813
  misc_feature (79)..(113): Pfam Name: PPR repeat Pfam Description: PPR repeat
  misc_feature (1)..(544): Homolog of NCBI NO: 34912504 NR Description: selenium-binding protein-like [Oryza sativa
  misc_feature (1)..(418): Homolog of NCBI NO: 18394615 NR Description: hypothetical protein; protein id: At1g18485.1
  misc_feature (421)..(761): Homolog of NCBI NO: 18394615 NR Description: hypothetical protein; protein id: At1g18485.1
  misc_feature (1)..(418): Homolog of NCBI NO: 25402861 NR Description: protein F15H18.4 [imported] - Arabidopsis >gi|6714305|gb|AAF26001.1|AC013354_20 F15H18.4 [Arabidopsis
  misc_feature (421)..(761): Homolog of NCBI NO: 25402861 NR Description: protein F15H18.4 [imported] - Arabidopsis >gi|6714305|gb|AAF26001.1|AC013354_20 F15H18.4 [Arabidopsis
  misc_feature (51)..(762): Homolog of NCBI NO: 21741755 NR Description: OSJNBa0060B20.9 [Oryza sativa (japonica
  misc_feature (347)..(758): Homolog of NCBI NO: 38423978 NR Description: PPR-repeat protein-like [Oryza sativa (japonica
  misc_feature (120)..(415): Homolog of NCBI NO: 38423978 NR Description: PPR-repeat protein-like [Oryza sativa (japonica
  misc_feature (354)..(765): Homolog of NCBI NO: 18483237 NR Description: putative vegetative storage protein [Sorghum
  misc_feature (162)..(412): Homolog of NCBI NO: 18483237 NR Description: putative vegetative storage protein [Sorghum
MDFRNLRIGPEIYGEILQGCVYERDLSTGKQIHARILKNGDFYARNEYIETKLVIFYAKCDALEIAEVLFSKLRVRNVFSWAAIIGVKCRIGLCEGALMGFVEMLENEIFPDNFVVPNVCKACGALKWSRFGRGVHGYVVKSGLEDCVFVASSLADMYGKCGVLDDASKVFDEIPDRNAVAWNALMVGYVQNGKNEEAIRLFSDMRKQGVEPTRVTVSTCLSASANMGGVEEGKQSHAIAIVNGMELDNILGTSLLNFYCKVGLIEYAEMVFDRMFEKDVVTWNLIISGYVQQGLVEDAIYMCQLMRLEKLKYDCVTLATLMSAAARTENLKLGKEVQCYCIRHSFESDIVLASTVMDMYAKCGSIVDAKKVFDSTVEKDLILWNTLLAAYAESGLSGEALRLFYGMQLEGVPPNVITWNLIILSLLRNGQVDEAKDMFLQMQSSGIIPNLISWTTMMNGMVQNGCSEEAILFLRKMQESGLRPNAFSITVALSACAHLASLHIGRTIHGYIIRNLQHSSLVSIETSLVDMYAKCGDINKAEKVFGSKLYSELPLSNAMISAYALYGNLKEAIALYRSLEGVGLKPDNITITNVLSACNHAGDINQAIEIFTDIVSKRSMKPCLEHYGLMVDLLASAGETEKALRLIEEMPFKPDARMIQSLVASCNKQRKTELVDYLSRKLLESEPENSGNYVTISNAYAVEGSWDEVVKMREMMKAKGLKKKPGCSWIQITGEEGVHVFVANDKTHTRINEIQMMLALLLYDMGTGSK

SEQ ID NO: 72945 - protein, 672 aa, Arabidopsis thaliana
  peptide (1)..(672): Ceres Seq. ID no. 4951814
  misc_feature (1)..(446): Homolog of NCBI NO: 34912504 NR Description: selenium-binding protein-like [Oryza sativa
  misc_feature (1)..(320): Homolog of NCBI NO: 18394615 NR Description: hypothetical protein; protein id: At1g18485.1
  misc_feature (323)..(663): Homolog of NCBI NO: 18394615 NR Description: hypothetical protein; protein id: At1g18485.1
  misc_feature (1)..(320): Homolog of NCBI NO: 25402861 NR Description: protein F15H18.4 [imported] - Arabidopsis >gi|6714305|gb|AAF26001.1|AC013354_20 F15H18.4 [Arabidopsis
  misc_feature (323)..(663): Homolog of NCBI NO: 25402861 NR Description: protein F15H18.4 [imported] - Arabidopsis >gi|6714305|gb|AAF26001.1|AC013354_20 F15H18.4 [Arabidopsis
  misc_feature (1)..(664): Homolog of NCBI NO: 21741755 NR Description: OSJNBa0060B20.9 [Oryza sativa (japonica
  misc_feature (249)..(660): Homolog of NCBI NO: 38423978 NR Description: PPR-repeat protein-like [Oryza sativa (japonica
  misc_feature (22)..(317): Homolog of NCBI NO: 38423978 NR Description: PPR-repeat protein-like [Oryza sativa (japonica
  misc_feature (256)..(667): Homolog of NCBI NO: 18483237 NR Description: putative vegetative storage protein [Sorghum
  misc_feature (64)..(314): Homolog of NCBI NO: 18483237 NR Description: putative vegetative storage protein [Sorghum
MGFVEMLENEIFPDNFVVPNVCKACGALKWSRFGRGVHGYVVKSGLEDCVFVASSLADMYGKCGVLDDASKVFDEIPDRNAVAWNALMVGYVQNGKNEEAIRLFSDMRKQGVEPTRVTVSTCLSASANMGGVEEGKQSHAIAIVNGMELDNILGTSLLNFYCKVGLIEYAEMVFDRMFEKDVVTWNLIISGYVQQGLVEDAIYMCQLMRLEKLKYDCVTLATLMSAAARTENLKLGKEVQCYCIRHSFESDIVLASTVMDMYAKCGSIVDAKKVFDSTVEKDLILWNTLLAAYAESGLSGEALRLFYGMQLEGVPPNVITWNLIILSLLRNGQVDEAKDMFLQMQSSGIIPNLISWTTMMNGMVQNGCSEEAILFLRKMQESGLRPNAFSITVALSACAHLASLHIGRTIHGYIIRNLQHSSLVSIETSLVDMYAKCGDINKAEKVFGSKLYSELPLSNAMISAYALYGNLKEAIALYRSLEGVGLKPDNITITNVLSACNHAGDINQAIEIFTDIVSKRSMKPCLEHYGLMVDLLASAGETEKALRLIEEMPFKPDARMIQSLVASCNKQRKTELVDYLSRKLLESEPENSGNYVTISNAYAVEGSWDEVVKMREMMKAKGLKKKPGCSWIQITGEEGVHVFVANDKTHTRINEIQMMLALLLYDMGTGSK

SEQ ID NO: 72946 - DNA, 1289 bp, Arabidopsis thaliana
  misc_feature (1)..(1289): Ceres Seq. ID no. 4952061
  misc_feature: MA Experiment ID: 20000173 Result: Down-regulated in Transcription
  misc_feature: MA Experiment 20000173 PARAMETER Experiment Name: At_42deg_Heat_P Parameter: Age (day) Value: 14
  misc_feature: MA Experiment 20000173 PARAMETER Experiment Name: At_42deg_Heat_P Parameter: Organism Value: A. thaliana
  misc_feature: MA Experiment 20000173 PARAMETER Experiment Name: At_42deg_Heat_P Parameter: Plant Line Value: WS
  misc_feature: MA Experiment 20000173 PARAMETER Experiment Name: At_42deg_Heat_P Parameter: Temperature (deg C) Value: 42 vs. 22
  misc_feature: MA Experiment 20000173 PARAMETER Experiment Name: At_42deg_Heat_P Parameter: Timepoint (hr) Value: 6
  misc_feature: MA Experiment 20000173 PARAMETER Experiment Name: At_42deg_Heat_P Parameter: Tissue Value: Aerial
  misc_feature: MA Experiment ID: 20000179 Result: Up-regulated in Transcription
  misc_feature: MA Experiment 20000179 PARAMETER Experiment Name: At_Germinating_Seeds_P Parameter: Age (hr) Value: 6 vs. 0
  misc_feature: MA Experiment 20000179 PARAMETER Experiment Name: At_Germinating_Seeds_P Parameter: Tissue Value: Germinating Seeds
  misc_feature: MA Experiment ID: 20000180 Result: Up-regulated in Transcription
  misc_feature: MA Experiment 20000180 PARAMETER Experiment Name: At_Germinating_Seeds_P Parameter: Age (hr) Value: 24 vs. 0
  misc_feature: MA Experiment 20000180 PARAMETER Experiment Name: At_Germinating_Seeds_P Parameter: Tissue Value: Germinating Seeds
  misc_feature: MA Experiment ID: 20000227 Result: Up-regulated in Transcription
  misc_feature: MA Experiment 20000227 PARAMETER Experiment Name: At_Root-Tips-vs-Tops_P Parameter: Tissue Value: Root Tips vs. Root Tops
  misc_feature: MA Experiment ID: 20000234 Result: Up-regulated in Transcription
  misc_feature: MA Experiment 20000234 PARAMETER Experiment Name: At_Siliques_P Parameter: Age (day) Value: 21
  misc_feature: MA Experiment 20000234 PARAMETER Experiment Name: At_Siliques_P Parameter: Organism Value: A. thaliana
  misc_feature: MA Experiment 20000234 PARAMETER Experiment Name: At_Siliques_P Parameter: Plant Line Value: WS
  misc_feature: MA Experiment 20000234 PARAMETER Experiment Name: At_Siliques_P Parameter: Tissue Value: Less Than 5mm Siliques vs. Whole Plant
  misc_feature: MA Experiment ID: 20000437 Result: Down-regulated in Transcription
  misc_feature: MA Experiment 20000437 PARAMETER Experiment Name: At_Drought_P Parameter: Age (day) Value: 8
  misc_feature: MA Experiment 20000437 PARAMETER Experiment Name: At_Drought_P Parameter: Organism Value: A. thaliana
  misc_feature: MA Experiment 20000437 PARAMETER Experiment Name: At_Drought_P Parameter: Plant Line Value: WS
  misc_feature: MA Experiment 20000437 PARAMETER Experiment Name: At_Drought_P Parameter: Timepoint (hr) Value: 24
  misc_feature: MA Experiment 20000437 PARAMETER Experiment Name: At_Drought_P Parameter: Tissue Value: Whole Plant
  misc_feature: MA Experiment 20000437 PARAMETER Experiment Name: At_Drought_P Parameter: Treatment Value: Drought vs. No Drought
  misc_feature: MA Experiment ID: 20001911 Result: Down-regulated in Transcription
  misc_feature: MA Experiment 20001911 PARAMETER Experiment Name: At_Drought_Reproduction_P Parameter: Age (day) Value: 40
  misc_feature: MA Experiment 20001911 PARAMETER Experiment Name: At_Drought_Reproduction_P Parameter: Organism Value: A. thaliana
  misc_feature: MA Experiment 20001911 PARAMETER Experiment Name: At_Drought_Reproduction_P Parameter: Plant Line Value: WS
  misc_feature: MA Experiment 20001911 PARAMETER Experiment Name: At_Drought_Reproduction_P Parameter: Timepoint (day) Value: 10
  misc_feature: MA Experiment 20001911 PARAMETER Experiment Name: At_Drought_Reproduction_P Parameter: Tissue Value: Flowers
  misc_feature: MA Experiment 20001911 PARAMETER Experiment Name: At_Drought_Reproduction_P Parameter: Treatment Value: Drought vs. No Drought
tttgtatcatgagtaatgttgatatgtttagtgatgaaaagttctcagatgtcagaaacagaatttaaagtgttgcttgagacattcacatttcctgctgattctgctcccttcaagagttgtcatgcctctaccatagttgaggttgttaaagatcatttcttggctgcgtatttcggaggcaccagggaaggagcacctgatgtcaaaatctggttgcagcatttcaaggatggtcaatgggattcaccggttattgttgatgaagagccaggagttccaatgtataaccctgtcttgttcaaacttccatctcatgagctcttattgttctacaaaatcggccaggaggttcaaaaatggagtggttgcatgaaacgatcatatgataaaggtataacttggactgaaagagaacagcttcctcctgggattctcggtcctatcaaaaacaagcccattttgcttgaagacggtactctcctttgcggatcatctgttgagagttggaattcttggggagcatggatggaggtcacttcagatgcgggtagaacatggagaaagaaagggccaatatacattcaaggcaagagtcttagcgtgatccaaccagttccataccaaaccgcagctgggaacttacggattttactcagatcctttactggcattgacagaatctgtatctcagagtctttggatggcggtgagaactggagttttgcagtaccaacggttctcccaaacccaaattcaggtattgatggagtcaagcttaaggatggtaggctagtgcttgcttacaacacagactcaagaggtgtgctcaaattaggagtttctttagacgacggtgattcatggaccgatattttaacgttggaggaatctccgggaatggagtattcgtacccggctgttatacaagccggagacggcaatgtccacgtcacctatacatataacaggacacaaattaagcatgtggtgctcaagactgcgacagatatcgattcgaagccataccgacatggtgaagcaggaggaggacacgtgaacttggatttgtacgaaccaaacattaattaattagctatttgtctcttgaaccatcgatgtggagtgtgacttccttcttacggaagaacaaagaatgttctctttcttgtcttgtaagttattgattgatcgattcttgagtttgtaaaagttgccactagttgatgaatattattgagattgtttataatatatttattgtaatcatataagttagagatttactt

SEQ ID NO: 72947 - protein, 358 aa, Arabidopsis thaliana; identical to SEQ ID NO: 43662
  peptide (1)..(358): Ceres Seq. ID no. 4952062
  misc_feature (7)..(358): Homolog of NCBI NO: 30696915 NR Description: expressed protein [Arabidopsis thaliana]
  misc_feature (148)..(358): Homolog of NCBI NO: 9759267 NR Description: gene_id:MRI1.6~pir||D64592~similar to unknown
  misc_feature (7)..(150): Homolog of NCBI NO: 9759267 NR Description: gene_id:MRI1.6~pir||D64592~similar to unknown
  misc_feature (12)..(358): Homolog of NCBI NO: 30696919 NR Description: expressed protein [Arabidopsis thaliana]
  misc_feature (12)..(358): Homolog of NCBI NO: 21536870 NR Description: unknown [Arabidopsis thaliana]
  misc_feature (12)..(320): Homolog of NCBI NO: 26452755 NR Description: unknown protein [Arabidopsis thaliana]
  misc_feature (15)..(328): Homolog of NCBI NO: 34393670 NR Description: alpha-rhamnosidase-like protein [Oryza sativa
  misc_feature (16)..(327): Homolog of NCBI NO: 23617011 NR Description: hypothetial protein~similar to Arabidopsis
  misc_feature (26)..(327): Homolog of NCBI NO: 21243816 NR Description: conserved hypothetical protein [Xanthomonas pv. citri str. 306] >gi|21109411|gb|AAM37934.1| conserved
  misc_feature (28)..(295): Homolog of NCBI NO: 32475400 NR Description: conserved hypothetical protein [Pirellula sp.]

SEQ ID NO: 72948 - protein, 352 aa, Arabidopsis thaliana; identical to SEQ ID NO: 43663
  peptide (1)..(352): Ceres Seq. ID no. 4952063
  misc_feature (1)..(352): Homolog of NCBI NO: 30696915 NR Description: expressed protein [Arabidopsis thaliana]
  misc_feature (142)..(352): Homolog of NCBI NO: 9759267 NR Description: gene_id:MRI1.6~pir||D64592~similar to unknown
  misc_feature (1)..(144): Homolog of NCBI NO: 9759267 NR Description: gene_id:MRI1.6~pir||D64592~similar to unknown
  misc_feature (6)..(352): Homolog of NCBI NO: 30696919 NR Description: expressed protein [Arabidopsis thaliana]
  misc_feature (6)..(352): Homolog of NCBI NO: 21536870 NR Description: unknown [Arabidopsis thaliana]
  misc_feature (6)..(314): Homolog of NCBI NO: 26452755 NR Description: unknown protein [Arabidopsis thaliana]
  misc_feature (9)..(322): Homolog of NCBI NO: 34393670 NR Description: alpha-rhamnosidase-like protein [Oryza sativa
  misc_feature (10)..(321): Homolog of NCBI NO: 23617011 NR Description: hypothetial protein~similar to Arabidopsis
  misc_feature (20)..(321): Homolog of NCBI NO: 21243816 NR Description: conserved hypothetical protein [Xanthomonas pv. citri str. 306] >gi|21109411|gb|AAM37934.1| conserved
  misc_feature (22)..(289): Homolog of NCBI NO: 32475400 NR Description: conserved hypothetical protein [Pirellula sp.]

SEQ ID NO: 72949 - protein, 347 aa, Arabidopsis thaliana; identical to SEQ ID NO: 35320
  peptide (1)..(347): Ceres Seq. ID no. 4952064
  misc_feature (1)..(347): Homolog of NCBI NO: 30696915 NR Description: expressed protein [Arabidopsis thaliana]
  misc_feature (137)..(347): Homolog of NCBI NO: 9759267 NR Description: gene_id:MRI1.6~pir||D64592~similar to unknown
  misc_feature (1)..(139): Homolog of NCBI NO: 9759267 NR Description: gene_id:MRI1.6~pir||D64592~similar to unknown
  misc_feature (1)..(347): Homolog of NCBI NO: 30696919 NR Description: expressed protein [Arabidopsis thaliana]
  misc_feature (1)..(347): Homolog of NCBI NO: 21536870 NR Description: unknown [Arabidopsis thaliana]
  misc_feature (1)..(309): Homolog of NCBI NO: 26452755 NR Description: unknown protein [Arabidopsis thaliana]
  misc_feature (4)..(317): Homolog of NCBI NO: 34393670 NR Description: alpha-rhamnosidase-like protein [Oryza sativa
  misc_feature (5)..(316): Homolog of NCBI NO: 23617011 NR Description: hypothetial protein~similar to Arabidopsis
  misc_feature (15)..(316): Homolog of NCBI NO: 21243816 NR Description: conserved hypothetical protein [Xanthomonas pv. citri str. 306] >gi|21109411|gb|AAM37934.1| conserved
  misc_feature (17)..(284): Homolog of NCBI NO: 32475400 NR Description: conserved hypothetical protein [Pirellula sp.]

SEQ ID NO: 72950 - DNA, 1770 bp, Arabidopsis thaliana
  misc_feature (1)..(1770): Ceres Seq. ID no. 4952322
  misc_feature: MA Experiment ID: 20000184 Result: Down-regulated in Transcription
  misc_feature: MA Experiment 20000184 PARAMETER Experiment Name: At_Shoots__P Parameter: Age (day) Value: 7
  misc_feature: MA Experiment 20000184 PARAMETER Experiment Name: At_Shoots__P Parameter: Tissue Value: Shoots vs. Whole Plant
  misc_feature: MA Experiment ID: 20000185 Result: Up-regulated in Transcription
  misc_feature: MA Experiment 20000185 PARAMETER Experiment Name: At_Roots__P Parameter: Age (day) Value: 7 vs. 21
  misc_feature: MA Experiment 20000185 PARAMETER Experiment Name: At_Roots__P Parameter: Organism Value: A. thaliana
  misc_feature: MA Experiment 20000185 PARAMETER Experiment Name: At_Roots__P Parameter: Tissue Value: Roots vs. Whole Plant
  misc_feature: MA Experiment ID: 20000265 Result: Down-regulated in Transcription
  misc_feature: MA Experiment 20000265 PARAMETER Experiment Name: At_Open_Flower_P Parameter: Age (day) Value: 21
  misc_feature: MA Experiment 20000265 PARAMETER Experiment Name: At_Open_Flower_P Parameter: Plant Line Value: WS
  misc_feature: MA Experiment 20000265 PARAMETER Experiment Name: At_Open_Flower_P Parameter: Tissue Value: Closed Flower vs. Whole Plant
  misc_feature: MA Experiment ID: 20000437 Result: Up-regulated in Transcription
  misc_feature: MA Experiment 20000437 PARAMETER Experiment Name: At_Drought_P Parameter: Age (day) Value: 8
  misc_feature: MA Experiment 20000437 PARAMETER Experiment Name: At_Drought_P Parameter: Organism Value: A. thaliana
  misc_feature: MA Experiment 20000437 PARAMETER Experiment Name: At_Drought_P Parameter: Plant Line Value: WS
  misc_feature: MA Experiment 20000437 PARAMETER Experiment Name: At_Drought_P Parameter: Timepoint (hr) Value: 24
  misc_feature: MA Experiment 20000437 PARAMETER Experiment Name: At_Drought_P Parameter: Tissue Value: Whole Plant
  misc_feature: MA Experiment 20000437 PARAMETER Experiment Name: At_Drought_P Parameter: Treatment Value: Drought vs. No Drought
  misc_feature: MA Experiment ID: 20000438 Result: Down-regulated in Transcription
  misc_feature: MA Experiment 20000438 PARAMETER Experiment Name: At_Shoots__P Parameter: Age (day) Value: 14
  misc_feature: MA Experiment 20000438 PARAMETER Experiment Name: At_Shoots__P Parameter: Tissue Value: Shoots vs. Whole Plant
  misc_feature: MA Experiment ID: 20000439 Result: Up-regulated in Transcription
  misc_feature: MA Experiment 20000439 PARAMETER Experiment Name: At_Roots__P Parameter: Age (day) Value: 14 vs. 21
  misc_feature: MA Experiment 20000439 PARAMETER Experiment Name: At_Roots__P Parameter: Organism Value: A. thaliana
  misc_feature: MA Experiment 20000439 PARAMETER Experiment Name: At_Roots__P Parameter: Tissue Value: Roots vs. Whole Plant
  misc_feature: MA Experiment ID: 20001247 Result: Up-regulated in Transcription
  misc_feature: MA Experiment 20001247 PARAMETER Experiment Name: At_Far-red-induction_P Parameter: Age (day) Value: 7
  misc_feature: MA Experiment 20001247 PARAMETER Experiment Name: At_Far-red-induction_P Parameter: Light Value: Far-red vs. White
  misc_feature: MA Experiment 20001247 PARAMETER Experiment Name: At_Far-red-induction_P Parameter: Organism Value: A. thaliana
  misc_feature: MA Experiment 20001247 PARAMETER Experiment Name: At_Far-red-induction_P Parameter: Plant Line Value: Columbia
  misc_feature: MA Experiment 20001247 PARAMETER Experiment Name: At_Far-red-induction_P Parameter: Timepoint (hr) Value: 1
  misc_feature: MA Experiment 20001247 PARAMETER Experiment Name: At_Far-red-induction_P Parameter: Tissue Value: Whole Plant
  misc_feature: MA Experiment ID: 20001451 Result: Up-regulated in Transcription
  misc_feature: MA Experiment 20001451 PARAMETER Experiment Name: At_Far-red-induction_P Parameter: Age (day) Value: 7
  misc_feature: MA Experiment 20001451 PARAMETER Experiment Name: At_Far-red-induction_P Parameter: Light Value: Far-red vs. White
  misc_feature: MA Experiment 20001451 PARAMETER Experiment Name: At_Far-red-induction_P Parameter: Organism Value: A. thaliana
  misc_feature: MA Experiment 20001451 PARAMETER Experiment Name: At_Far-red-induction_P Parameter: Plant Line Value: Columbia
  misc_feature: MA Experiment 20001451 PARAMETER Experiment Name: At_Far-red-induction_P Parameter: Timepoint (hr) Value: 24
  misc_feature: MA Experiment 20001451 PARAMETER Experiment Name: At_Far-red-induction_P Parameter: Tissue Value: Whole Plant
  misc_feature: MA Experiment ID: 20001904 Result: Up-regulated in Transcription
  misc_feature: MA Experiment 20001904 PARAMETER Experiment Name: At_Drought_Reproduction_P Parameter: Age (day) Value: 37
  misc_feature: MA Experiment 20001904 PARAMETER Experiment Name: At_Drought_Reproduction_P Parameter: Organism Value: A. thaliana
  misc_feature: MA Experiment 20001904 PARAMETER Experiment Name: At_Drought_Reproduction_P Parameter: Plant Line Value: WS
  misc_feature: MA Experiment 20001904 PARAMETER Experiment Name: At_Drought_Reproduction_P Parameter: Timepoint (day) Value: 7
  misc_feature: MA Experiment 20001904 PARAMETER Experiment Name: At_Drought_Reproduction_P Parameter: Tissue Value: Rosettes
  misc_feature: MA Experiment 20001904 PARAMETER Experiment Name: At_Drought_Reproduction_P Parameter: Treatment Value: Drought vs. No Drought
  misc_feature: MA Experiment ID: 20001905 Result: Up-regulated in Transcription
  misc_feature: MA Experiment 20001905 PARAMETER Experiment Name: At_Drought_Reproduction_P Parameter: Age (day) Value: 40
  misc_feature: MA Experiment 20001905 PARAMETER Experiment Name: At_Drought_Reproduction_P Parameter: Organism Value: A. thaliana
  misc_feature: MA Experiment 20001905 PARAMETER Experiment Name: At_Drought_Reproduction_P Parameter: Plant Line Value: WS
  misc_feature: MA Experiment 20001905 PARAMETER Experiment Name: At_Drought_Reproduction_P Parameter: Timepoint (day) Value: 10
  misc_feature: MA Experiment 20001905 PARAMETER Experiment Name: At_Drought_Reproduction_P Parameter: Tissue Value: Rosettes
  misc_feature: MA Experiment 20001905 PARAMETER Experiment Name: At_Drought_Reproduction_P Parameter: Treatment Value: Drought vs. No Drought
  misc_feature: MA Experiment ID: 20001906 Result: Up-regulated in Transcription
  misc_feature: MA Experiment 20001906 PARAMETER Experiment Name: At_Drought_Reproduction_P Parameter: Age (day) Value: 35
  misc_feature: MA Experiment 20001906 PARAMETER Experiment Name: At_Drought_Reproduction_P Parameter: Organism Value: A. thaliana
  misc_feature: MA Experiment 20001906 PARAMETER Experiment Name: At_Drought_Reproduction_P Parameter: Plant Line Value: WS
  misc_feature: MA Experiment 20001906 PARAMETER Experiment Name: At_Drought_Reproduction_P Parameter: Timepoint (day) Value: 5
  misc_feature: MA Experiment 20001906 PARAMETER Experiment Name: At_Drought_Reproduction_P Parameter: Tissue Value: Siliques
  misc_feature: MA Experiment 20001906 PARAMETER Experiment Name: At_Drought_Reproduction_P Parameter: Treatment Value: Drought vs. No Drought
  misc_feature: MA Experiment ID: 20001911 Result: Up-regulated in Transcription
  misc_feature: MA Experiment 20001911 PARAMETER Experiment Name: At_Drought_Reproduction_P Parameter: Age (day) Value: 40
  misc_feature: MA Experiment 20001911 PARAMETER Experiment Name: At_Drought_Reproduction_P Parameter: Organism Value: A. thaliana
  misc_feature: MA Experiment 20001911 PARAMETER Experiment Name: At_Drought_Reproduction_P Parameter: Plant Line Value: WS
  misc_feature: MA Experiment 20001911 PARAMETER Experiment Name: At_Drought_Reproduction_P Parameter: Timepoint (day) Value: 10
  misc_feature: MA Experiment 20001911 PARAMETER Experiment Name: At_Drought_Reproduction_P Parameter: Tissue Value: Flowers
  misc_feature: MA Experiment 20001911 PARAMETER Experiment Name: At_Drought_Reproduction_P Parameter: Treatment Value: Drought vs. No Drought
atggattatgatctggtacataccaaaaccatcaaaagtttgtctttcttcataccaaaaacaaccgaattctcattcttgattcttgtttttttttttttttgccagcttcgttccaagaagagtatcaaacgcgtagaatccaccaaatcaaatccatggtggtgggatagtcatatcggtctcaaaaattctaagtggcttgagaataatctcgatgagatggaccggagcgtgaaacggatggtgaagttgatagaggaggatgcagattcttttgctaagaaggcagagatgtattaccagtcaagacctgagcttattgctcttgtggatgagtttcaccgtatgtaccgtgctttggcagagcggtacgagaacatcaccggagagttgagaaaaggctctcctttagagcttcagtcacagggctctggtctttctgacatctctgcttctgacctctctgctttatggacctctaatgaggttaataggttaggtcgtcctccttctggtcgacgtgctcctggttttgaatacttccttggcaatggaggacttccttctgatctttatcacaaagatggagatgattctgcttccattactgattctgaacttgaatctgatgattcttctgtgactaattaccctggttatgtgagtataggctctgactttcagtccctaagcaagaggatcatggatcttgagattgagctacgtgaagccaaagaaagacttaggatgcaacttgaagggaacactgagagcttgttgccgagggtgaaaagtgagactaaatttgttgatttcccggcaaaacttgctgcttgtgagcaagaactgaaagatgtaaatgagaagttacagaattcagaagaccaaatctatattttaaagagtcagcttgctagatacttgccatctgggttggatgatgaacagagcgaaggggcagcttcaactcaagaactggacattgagactttgtctgaagagctgagaattacaagcctgaggcttcgggaggcagaaaaacaaaacggtatcatgagaaaagaagtcgagaaaagcaagtctgatgatgcaaaactcaagagtctgcaagacatgcttgagtcggcacagaaagaagctgcagcatggaaaagcaaggctagtgcagataaaagagaggtggtgaagctgcttgatagaatctcaatgttgaagtcgagtttagcaggtagagatcatgagatcagggatttaaagacagcattgtctgacgcagaagagaagattttcccggagaaagcacaggtcaaagccgatatagcaaagctgttggaagaaaaaatacaccgggatgaccaattcaaagagctggaagccaatgtgcgttatcttgaagatgagagaagaaaggtgaacaatgagaaaatagaagaggaggaaaagctgaagagcgaaatcgaggtgctgacactggaaaaggtagagaaagggagatgcatagagacgttaagcagaaaggtgagtgagctagagtcggagataagtcgacttggaagtgaaataaaagcgagagacgataggactatggagatggagaaggaggtggagaagcagaggagggaactagaagaagtagcagaagagaagagggaagtgataagacagctctgtttttcactagactactccagagacgaatacaagagactacgcatagccttttcagggcatccaccaacaagaccatcatccattcttgcttcttaa

SEQ ID NO: 72951 - protein, 589 aa, Arabidopsis thaliana
  peptide (1)..(589): Ceres Seq. ID no. 4952323
  misc_feature (225)..(570): Pfam Name: Myosin tail Pfam Description: Myosin tail
  misc_feature (1)..(589): Homolog of NCBI NO: 8777333 NR Description: contains similarity to unknown
  misc_feature (37)..(589): Homolog of NCBI NO: 30697046 NR Description: contains similarity to unknown protein
  misc_feature (37)..(519): Homolog of NCBI NO: 30697043 NR Description: contains similarity to unknown protein
  misc_feature (194)..(582): Homolog of NCBI NO: 15224515 NR Description: unknown protein; protein id: At2g30500.1
  misc_feature (194)..(582): Homolog of NCBI NO: 28416683 NR Description: At2g30500 [Arabidopsis thaliana]
  misc_feature (41)..(548): Homolog of NCBI NO: 34896156 NR Description: P0701D05.33 [Oryza sativa (japonica >gi|13486675|dbj|BAB39912.1| contains EST to Arabidopsis thaliana chromosome 2, At2g30500~unknown protein
  misc_feature (34)..(496): Homolog of NCBI NO: 15224515 NR Description: unknown protein; protein id: At2g30500.1
  misc_feature (38)..(496): Homolog of NCBI NO: 28416683 NR Description: At2g30500 [Arabidopsis thaliana]
  misc_feature (40)..(451): Homolog of NCBI NO: 34896152 NR Description: P0701D05.31 [Oryza sativa (japonica >gi|13486673|dbj|BAB39910.1| hypothetical protein~similar to thaliana chromosome 5, MCK7.19 [Oryza sativa (japonica sativa
  misc_feature (50)..(570): Homolog of NCBI NO: 22002966 NR Description: putative CENP-E like kinetochore protein [Hordeum
MDYDLVHTKTIKSLSFFIPKTTEFSFLILVFFFFCQLRSKKSIKRVESTKSNPWWWDSHIGLKNSKWLENNLDEMDRSVKRMVKLIEEDADSFAKKAEMYYQSRPELIALVDEFHRMYRALAERYENITGELRKGSPLELQSQGSGLSDISASDLSALWTSNEVNRLGRPPSGRRAPGFEYFLGNGGLPSDLYHKDGDDSASITDSELESDDSSVTNYPGYVSIGSDFQSLSKRIMDLEIELREAKERLRMQLEGNTESLLPRVKSETKFVDFPAKLAACEQELKDVNEKLQNSEDQIYILKSQLARYLPSGLDDEQSEGAASTQELDIETLSEELRITSLRLREAEKQNGIMRKEVEKSKSDDAKLKSLQDMLESAQKEAAAWKSKASADKREVVKLLDRISMLKSSLAGRDHEIRDLKTALSDAEEKIFPEKAQVKADIAKLLEEKIHRDDQFKELEANVRYLEDERRKVNNEKIEEEEKLKSEIEVLTLEKVEKGRCIETLSRKVSELESEISRLGSEIKARDDRTMEMEKEVEKQRRELEEVAEEKREVIRQLCFSLDYSRDEYKRLRIAFSGHPPTRPSSILAS

SEQ ID NO: 72952 - protein, 515 aa, Arabidopsis thaliana; identical to SEQ ID NO: 48338
  peptide (1)..(515): Ceres Seq. ID no. 4952324
  misc_feature (151)..(496): Pfam Name: Myosin tail Pfam Description: Myosin tail
  misc_feature (1)..(515): Homolog of NCBI NO: 8777333 NR Description: contains similarity to unknown
  misc_feature (1)..(515): Homolog of NCBI NO: 30697046 NR Description: contains similarity to unknown protein
  misc_feature (1)..(445): Homolog of NCBI NO: 30697043 NR Description: contains similarity to unknown protein
  misc_feature (120)..(508): Homolog of NCBI NO: 15224515 NR Description: unknown protein; protein id: At2g30500.1
  misc_feature (120)..(508): Homolog of NCBI NO: 28416683 NR Description: At2g30500 [Arabidopsis thaliana]
  misc_feature (1)..(474): Homolog of NCBI NO: 34896156 NR Description: P0701D05.33 [Oryza sativa (japonica >gi|13486675|dbj|BAB39912.1| contains EST to Arabidopsis thaliana chromosome 2, At2g30500~unknown protein
  misc_feature (1)..(422): Homolog of NCBI NO: 15224515 NR Description: unknown protein; protein id: At2g30500.1
  misc_feature (1)..(422): Homolog of NCBI NO: 28416683 NR Description: At2g30500 [Arabidopsis thaliana]
  misc_feature (1)..(377): Homolog of NCBI NO: 34896152 NR Description: P0701D05.31 [Oryza sativa (japonica >gi|13486673|dbj|BAB39910.1| hypothetical protein~similar to thaliana chromosome 5, MCK7.19 [Oryza sativa (japonica sativa
  misc_feature (1)..(496): Homolog of NCBI NO: 22002966 NR Description: putative CENP-E like kinetochore protein [Hordeum

SEQ ID NO: 72953 - protein, 508 aa, Arabidopsis thaliana; identical to SEQ ID NO: 48339
  peptide (1)..(508): Ceres Seq. ID no. 4952325
  misc_feature (144)..(489): Pfam Name: Myosin tail Pfam Description: Myosin tail
  misc_feature (1)..(508): Homolog of NCBI NO: 8777333 NR Description: contains similarity to unknown
  misc_feature (1)..(508): Homolog of NCBI NO: 30697046 NR Description: contains similarity to unknown protein
  misc_feature (1)..(438): Homolog of NCBI NO: 30697043 NR Description: contains similarity to unknown protein
  misc_feature (113)..(501): Homolog of NCBI NO: 15224515 NR Description: unknown protein; protein id: At2g30500.1
  misc_feature (113)..(501): Homolog of NCBI NO: 28416683 NR Description: At2g30500 [Arabidopsis thaliana]
  misc_feature (1)..(467): Homolog of NCBI NO: 34896156 NR Description: P0701D05.33 [Oryza sativa (japonica >gi|13486675|dbj|BAB39912.1| contains EST to Arabidopsis thaliana chromosome 2, At2g30500~unknown protein
  misc_feature (1)..(415): Homolog of NCBI NO: 15224515 NR Description: unknown protein; protein id: At2g30500.1
  misc_feature (1)..(415): Homolog of NCBI NO: 28416683 NR Description: At2g30500 [Arabidopsis thaliana]
  misc_feature (1)..(370): Homolog of NCBI NO: 34896152 NR Description: P0701D05.31 [Oryza sativa (japonica >gi|13486673|dbj|BAB39910.1| hypothetical protein~similar to thaliana chromosome 5, MCK7.19 [Oryza sativa (japonica sativa
  misc_feature (1)..(489): Homolog of NCBI NO: 22002966 NR Description: putative CENP-E like kinetochore protein [Hordeum

SEQ ID NO: 72954 - DNA, 822 bp, Arabidopsis thaliana
  misc_feature (1)..(822): Ceres Seq. ID no. 4952329
atggccatggcctatgaggaagctcgcaagctccgtcttcaagagaatcacaagcgatttcaatccaattttgtagctttaccacaatttcagcttcttcagcagcgtaatcacaaacccatcgataaagccctcttagctactgctgaaccaagacgctcttcccgtgttcgtaccgtaatttcttcctatcgcgatgatgtcgtcgtagacactggtcgtacttcgaatctgaggagatcgcgacatagctctacatgggcgacctacatttctcgacctctccatgagtgcaagtttgcatcttatgaagaaaaggttggagcattcaaggctgcagagaagttccagaggagccttaaatctccacatccttactttgtgaaatctatggttcgctcccatgtttacagttgcttttggctggggcttccttcaagattctgtgcagacaattttcctgaggaaactatggaaatagaactagaggatgaagaaggcgaagtgtatgaagcagtgtacattggtagaagagctggactcagtggtggttggaaaaggtttgctcttgatcataaattggatgatggtgatgctctactctttgaattggttgaaccaaagaagttcaagatctatgtgtttaaaggaaatgagaacgctaatcttacaagcgccagaaagagaggcagagcaacgacgccaagtgaagaagaagaagaagaagaagataaggatgttgaagaatcaggtgatgaggaacacagctcaagagccactaagagatcatccgtaaggttactaaggaagaggaaagcataa

SEQ ID NO: 72955 - protein, 273 aa, Arabidopsis thaliana
  peptide (1)..(273): Ceres Seq. ID no. 4952330
  misc_feature (126)..(220): Pfam Name: B3 DNA binding domain Pfam Description: B3 DNA binding domain
  misc_feature (1)..(273): Homolog of NCBI NO: 15237157 NR Description: unknown protein; protein id: At5g58280.1 thaliana] >gi|10176791|dbj|BAA96919.2| gene_id:MCK7.15~unknown
  misc_feature (3)..(272): Homolog of NCBI NO: 9294620 NR Description: gene_id:MVI11.9~unknown protein [Arabidopsis
  misc_feature (4)..(216): Homolog of NCBI NO: 15217278 NR Description: Unknown protein [Oryza sativa]
  misc_feature (100)..(214): Homolog of NCBI NO: 30694114 NR Description: expressed protein [Arabidopsis thaliana]
  misc_feature (76)..(205): Homolog of NCBI NO: 34904376 NR Description: unnamed protein product [Oryza sativa (japonica group)] >gi|8467994|dbj|BAA96595.1| unnamed protein product
  misc_feature (113)..(233): Homolog of NCBI NO: 34910734 NR Description: P0022F10.13 [Oryza sativa (japonica
MAMAYEEARKLRLQENHKRFQSNFVALPQFQLLQQRNHKPIDKALLATAEPRRSSRVRTVISSYRDDVVVDTGRTSNLRRSRHSSTWATYISRPLHECKFASYEEKVGAFKAAEKFQRSLKSPHPYFVKSMVRSHVYSCFWLGLPSRFCADNFPEETMEIELEDEEGEVYEAVYIGRRAGLSGGWKRFALDHKLDDGDALLFELVEPKKFKIYVFKGNENANLTSARKRGRATTPSEEEEEEEDKDVEESGDEEHSSRATKRSSVRLLRKRKA

SEQ ID NO: 72956 - protein, 271 aa, Arabidopsis thaliana
  peptide (1)..(271): Ceres Seq. ID no. 4952331
  misc_feature (124)..(218): Pfam Name: B3 DNA binding domain Pfam Description: B3 DNA binding domain
  misc_feature (1)..(271): Homolog of NCBI NO: 15237157 NR Description: unknown protein; protein id: At5g58280.1 thaliana] >gi|10176791|dbj|BAA96919.2| gene_id:MCK7.15~unknown
  misc_feature (1)..(270): Homolog of NCBI NO: 9294620 NR Description: gene_id:MVI11.9~unknown protein [Arabidopsis
  misc_feature (2)..(214): Homolog of NCBI NO: 15217278 NR Description: Unknown protein [Oryza sativa]
  misc_feature (98)..(212): Homolog of NCBI NO: 30694114 NR Description: expressed protein [Arabidopsis thaliana]
  misc_feature (74)..(203): Homolog of NCBI NO: 34904376 NR Description: unnamed protein product [Oryza sativa (japonica group)] >gi|8467994|dbj|BAA96595.1| unnamed protein product
  misc_feature (111)..(231): Homolog of NCBI NO: 34910734 NR Description: P0022F10.13 [Oryza sativa (japonica
MAYEEARKLRLQENHKRFQSNFVALPQFQLLQQRNHKPIDKALLATAEPRRSSRVRTVISSYRDDVVVDTGRTSNLRRSRHSSTWATYISRPLHECKFASYEEKVGAFKAAEKFQRSLKSPHPYFVKSMVRSHVYSCFWLGLPSRFCADNFPEETMEIELEDEEGEVYEAVYIGRRAGLSGGWKRFALDHKLDDGDALLFELVEPKKFKIYVFKGNENANLTSARKRGRATTPSEEEEEEEDKDVEESGDEEHSSRATKRSSVRLLRKRKA

SEQ ID NO: 72957 - protein, 143 aa, Arabidopsis thaliana
  peptide (1)..(143): Ceres Seq. ID no. 4952332
  misc_feature (1)..(90): Pfam Name: B3 DNA binding domain Pfam Description: B3 DNA binding domain
  misc_feature (1)..(143): Homolog of NCBI NO: 15237157 NR Description: unknown protein; protein id: At5g58280.1 thaliana] >gi|10176791|dbj|BAA96919.2| gene_id:MCK7.15~unknown
  misc_feature (1)..(142): Homolog of NCBI NO: 9294620 NR Description: gene_id:MVI11.9~unknown protein [Arabidopsis
  misc_feature (1)..(86): Homolog of NCBI NO: 15217278 NR Description: Unknown protein [Oryza sativa]
  misc_feature (1)..(84): Homolog of NCBI NO: 30694114 NR Description: expressed protein [Arabidopsis thaliana]
  misc_feature (1)..(75): Homolog of NCBI NO: 34904376 NR Description: unnamed protein product [Oryza sativa (japonica group)] >gi|8467994|dbj|BAA96595.1| unnamed protein product
  misc_feature (1)..(103): Homolog of NCBI NO: 34910734 NR Description: P0022F10.13 [Oryza sativa (japonica
MVRSHVYSCFWLGLPSRFCADNFPEETMEIELEDEEGEVYEAVYIGRRAGLSGGWKRFALDHKLDDGDALLFELVEPKKFKIYVFKGNENANLTSARKRGRATTPSEEEEEEEDKDVEESGDEEHSSRATKRSSVRLLRKRKA

SEQ ID NO: 72958 - DNA, 1275 bp, Arabidopsis thaliana
  misc_feature (1)..(1275): Ceres Seq. ID no. 4952333
  misc_feature: MA Experiment ID: 108461 Result: Down-regulated in Transcription
  misc_feature: MA Experiment 108461 PARAMETER Experiment Name: At_Germinating_Seeds_cDNA_P Parameter: Age (day) Value: 1 vs. 0
  misc_feature: MA Experiment 108461 PARAMETER Experiment Name: At_Germinating_Seeds_cDNA_P Parameter: Tissue Value: Germinating Seeds
  misc_feature: MA Experiment ID: 108462 Result: Down-regulated in Transcription
  misc_feature: MA Experiment 108462 PARAMETER Experiment Name: At_Germinating_Seeds_cDNA_P Parameter: Age (day) Value: 2 vs. 0
  misc_feature: MA Experiment 108462 PARAMETER Experiment Name: At_Germinating_Seeds_cDNA_P Parameter: Tissue Value: Germinating Seeds
  misc_feature: MA Experiment ID: 108463 Result: Down-regulated in Transcription
  misc_feature: MA Experiment 108463 PARAMETER Experiment Name: At_Germinating_Seeds_cDNA_P Parameter: Age (day) Value: 3 vs. 0
  misc_feature: MA Experiment 108463 PARAMETER Experiment Name: At_Germinating_Seeds_cDNA_P Parameter: Tissue Value: Germinating Seeds
  misc_feature: MA Experiment ID: 108464 Result: Down-regulated in Transcription
  misc_feature: MA Experiment 108464 PARAMETER Experiment Name: At_Germinating_Seeds_cDNA_P Parameter: Age (day) Value: 4 vs. 0
  misc_feature: MA Experiment 108464 PARAMETER Experiment Name: At_Germinating_Seeds_cDNA_P Parameter: Tissue Value: Germinating Seeds
atggggaaagacgaagaggaaatgcgaggtgagatcgaggagcgactaatcaatgaagagtacaagatctggaagaagaacactcctttcctctacgatctcgttattactcacgctctcgagtggccttcacttactgttgaatggcttcctgaccgtgaagaaccttccggtaaagactactccgttcagaagatgattctcggtacccatacctccgagagcgagcccaattacttgatgctagcccaagttcagcttcctcttgacgataccgagagtgaagctcgtcagtacgatgatgaccgctctgaatttggtggctttggctgtgcaactggaaaggtacaaattatccagcagataaatcatgatggtgaggttaatcgagctcgctatatgcctcaaaaccctttcataattgctaccaagacagttaatgcggaggtctatgttttcgattacagtaagcatccatctaagcctcctcttgatggggcttgtaatcctgatttaaagcttagaggtcacagctctgagggatatggtctctcttggagtaagttcaagcagggtcatttgcttagtggctctgatgatgctcagatctgcttgtgggatattaacgctactcctaaaaacaaatctctggacgctcagcagatttttaaggctcatgaaggggttgtggaagatgttgcatggcatctgagacatgagtacctgtttggatcagttggagatgaccaataccttctcatatgggatctgcgttctccatctgccagtaaaccagtacagtctgtggttgctcattcgatggaggttaactgcttagccttcaatccatttaatgagtgggttgtggcaacaggatcaactgacaagactgttaaattattcgatctacggaagctaagcaccgctcttcacacatttgatagccacaaagaggaggtttttcaagttggttggaacccaaagaacgagactattttagcttcatgttgccttggtagaagacttatggtttgggaccttagcaggatcgatgaggaacagacagtggaggacgcagaagacggcccacctgagctgctgtttattcacggtggtcacactagcaaaatttcagatttctcgtggaacccttgtgaagattgggttatttccagtgttgctgaggacaacatactccaaatatggcaaatggctgaaaacatctatcatgatgaggatgacgctccaggggaagaaccatcaaaagcttcttag

SEQ ID NO: 72959 - protein, 424 aa, Arabidopsis thaliana; identical to SEQ ID NO: 23265
  peptide (1)..(424): Ceres Seq. ID no. 4952334
  misc_feature (1)..(424): Homolog of NCBI NO: 15237140 NR Description: WD-40 repeat protein MSI1 (sp|O22467); also
  misc_feature (1)..(422): Homolog of NCBI NO: 3122386 NR Description: WD-40 repeat protein MSI1 >gi|7444288|pir||T04324
  misc_feature (4)..(424): Homolog of NCBI NO: 17017388 NR Description: MSI type nucleosome/chromatin assembly factor C
  misc_feature (1)..(420): Homolog of NCBI NO: 5032027 NR Description: retinoblastoma binding protein 4;
  misc_feature (1)..(420): Homolog of NCBI NO: 6677681 NR Description: retinoblastoma binding protein 4 [Mus musculus]
  misc_feature (4)..(419): Homolog of NCBI NO: 27503223 NR Description: Similar to retinoblastoma binding protein 7
  misc_feature (5)..(413): Homolog of NCBI NO: 9454362 NR Description: Rbap46 polypeptide [Gallus gallus]
  misc_feature (1)..(420): Homolog of NCBI NO: 5163126 NR Description: chromatin assembly factor 1 p48 subunit [Gallus
  misc_feature (5)..(413): Homolog of NCBI NO: 25301665 NR Description: chromatin assembly factor-1 p48 subunit homolog,
  misc_feature (4)..(419): Homolog of NCBI NO: 30354585 NR Description: Similar to retinoblastoma binding protein 4

SEQ ID NO: 72960 - protein, 417 aa, Arabidopsis thaliana; identical to SEQ ID NO: 23266
  peptide (1)..(417): Ceres Seq. ID no. 4952335
  misc_feature (1)..(417): Homolog of NCBI NO: 15237140 NR Description: WD-40 repeat protein MSI1 (sp|O22467); also
  misc_feature (1)..(415): Homolog of NCBI NO: 3122386 NR Description: WD-40 repeat protein MSI1 >gi|7444288|pir||T04324
  misc_feature (1)..(417): Homolog of NCBI NO: 17017388 NR Description: MSI type nucleosome/chromatin assembly factor C
  misc_feature (1)..(413): Homolog of NCBI NO: 5032027 NR Description: retinoblastoma binding protein 4;
  misc_feature (1)..(413): Homolog of NCBI NO: 6677681 NR Description: retinoblastoma binding protein 4 [Mus musculus]
  misc_feature (1)..(412): Homolog of NCBI NO: 27503223 NR Description: Similar to retinoblastoma binding protein 7
  misc_feature (1)..(406): Homolog of NCBI NO: 9454362 NR Description: Rbap46 polypeptide [Gallus gallus]
  misc_feature (1)..(413): Homolog of NCBI NO: 5163126 NR Description: chromatin assembly factor 1 p48 subunit [Gallus
  misc_feature (1)..(406): Homolog of NCBI NO: 25301665 NR Description: chromatin assembly factor-1 p48 subunit homolog,
  misc_feature (1)..(412): Homolog of NCBI NO: 30354585 NR Description: Similar to retinoblastoma binding protein 4

SEQ ID NO: 72961 - protein, 359 aa, Arabidopsis thaliana
  peptide (1)..(359): Ceres Seq. ID no. 4952336
  misc_feature (1)..(359): Homolog of NCBI NO: 15237140 NR Description: WD-40 repeat protein MSI1 (sp|O22467); also
  misc_feature (1)..(357): Homolog of NCBI NO: 3122386 NR Description: WD-40 repeat protein MSI1 >gi|7444288|pir||T04324
  misc_feature (1)..(359): Homolog of NCBI NO: 17017388 NR Description: MSI type nucleosome/chromatin assembly factor C
  misc_feature (1)..(355): Homolog of NCBI NO: 5032027 NR Description: retinoblastoma binding protein 4;
  misc_feature (1)..(355): Homolog of NCBI NO: 6677681 NR Description: retinoblastoma binding protein 4 [Mus musculus]
  misc_feature (1)..(354): Homolog of NCBI NO: 27503223 NR Description: Similar to retinoblastoma binding protein 7
  misc_feature (1)..(348): Homolog of NCBI NO: 9454362 NR Description: Rbap46 polypeptide [Gallus gallus]
  misc_feature (1)..(355): Homolog of NCBI NO: 5163126 NR Description: chromatin assembly factor 1 p48 subunit [Gallus
  misc_feature (1)..(348): Homolog of NCBI NO: 25301665 NR Description: chromatin assembly factor-1 p48 subunit homolog,
  misc_feature (1)..(354): Homolog of NCBI NO: 30354585 NR Description: Similar to retinoblastoma binding protein 4
MILGTHTSESEPNYLMLAQVQLPLDDTESEARQYDDDRSEFGGFGCATGKVQIIQQINHDGEVNRARYMPQNPFIIATKTVNAEVYVFDYSKHPSKPPLDGACNPDLKLRGHSSEGYGLSWSKFKQGHLLSGSDDAQICLWDINATPKNKSLDAQQIFKAHEGVVEDVAWHLRHEYLFGSVGDDQYLLIWDLRSPSASKPVQSVVAHSMEVNCLAFNPFNEWVVATGSTDKTVKLFDLRKLSTALHTFDSHKEEVFQVGWNPKNETILASCCLGRRLMVWDLSRIDEEQTVEDAEDGPPELLFIHGGHTSKISDFSWNPCEDWVISSVAEDNILQIWQMAENIYHDEDDAPGEEPSKAS

SEQ ID NO: 72962 - DNA, 1082 bp, Arabidopsis thaliana
  misc_feature (1)..(1082): Ceres Seq. ID no. 4952511
  misc_feature: MA Experiment ID: 20000179 Result: Down-regulated in Transcription
  misc_feature: MA Experiment 20000179 PARAMETER Experiment Name: At_Germinating_Seeds_P Parameter: Age (hr) Value: 6 vs. 0
  misc_feature: MA Experiment 20000179 PARAMETER Experiment Name: At_Germinating_Seeds_P Parameter: Tissue Value: Germinating Seeds
  misc_feature: MA Experiment ID: 20000180 Result: Down-regulated in Transcription
  misc_feature: MA Experiment 20000180 PARAMETER Experiment Name: At_Germinating_Seeds_P Parameter: Age (hr) Value: 24 vs. 0
  misc_feature: MA Experiment 20000180 PARAMETER Experiment Name: At_Germinating_Seeds_P Parameter: Tissue Value: Germinating Seeds
  misc_feature: MA Experiment ID: 20000437 Result: Up-regulated in Transcription
  misc_feature: MA Experiment 20000437 PARAMETER Experiment Name: At_Drought_P Parameter: Age (day) Value: 8
  misc_feature: MA Experiment 20000437 PARAMETER Experiment Name: At_Drought_P Parameter: Organism Value: A. thaliana
  misc_feature: MA Experiment 20000437 PARAMETER Experiment Name: At_Drought_P Parameter: Plant Line Value: WS
  misc_feature: MA Experiment 20000437 PARAMETER Experiment Name: At_Drought_P Parameter: Timepoint (hr) Value: 24
  misc_feature: MA Experiment 20000437 PARAMETER Experiment Name: At_Drought_P Parameter: Tissue Value: Whole Plant
  misc_feature: MA Experiment 20000437 PARAMETER Experiment Name: At_Drought_P Parameter: Treatment Value: Drought vs. No Drought
  misc_feature: MA Experiment ID: 20001450 Result: Up-regulated in Transcription
  misc_feature: MA Experiment 20001450 PARAMETER Experiment Name: At_Far-red-induction_P Parameter: Age (day) Value: 7
  misc_feature: MA Experiment 20001450 PARAMETER Experiment Name: At_Far-red-induction_P Parameter: Light Value: Far-red vs. White
  misc_feature: MA Experiment 20001450 PARAMETER Experiment Name: At_Far-red-induction_P Parameter: Organism Value: A. thaliana
  misc_feature: MA Experiment 20001450 PARAMETER Experiment Name: At_Far-red-induction_P Parameter: Plant Line Value: Columbia
  misc_feature: MA Experiment 20001450 PARAMETER Experiment Name: At_Far-red-induction_P Parameter: Timepoint (hr) Value: 8
  misc_feature: MA Experiment 20001450 PARAMETER Experiment Name: At_Far-red-induction_P Parameter: Tissue Value: Whole Plant
  misc_feature: MA Experiment ID: 20001451 Result: Up-regulated in Transcription
  misc_feature: MA Experiment 20001451 PARAMETER Experiment Name: At_Far-red-induction_P Parameter: Age (day) Value: 7
  misc_feature: MA Experiment 20001451 PARAMETER Experiment Name: At_Far-red-induction_P Parameter: Light Value: Far-red vs. White
  misc_feature: MA Experiment 20001451 PARAMETER Experiment Name: At_Far-red-induction_P Parameter: Organism Value: A. thaliana
  misc_feature: MA Experiment 20001451 PARAMETER Experiment Name: At_Far-red-induction_P Parameter: Plant Line Value: Columbia
  misc_feature: MA Experiment 20001451 PARAMETER Experiment Name: At_Far-red-induction_P Parameter: Timepoint (hr) Value: 24
  misc_feature: MA Experiment 20001451 PARAMETER Experiment Name: At_Far-red-induction_P Parameter: Tissue Value: Whole Plant
tctctctctctctctctctctctctctctctctctctctcttgtattatttctatctcccccgccgtcgaaagagaaacgtcgatcggagaacctttgaaatgtcgactggattagatatgtctctcgacgacatgatcgccaagaaccgtaagtctcgtggtggagccggccccgctcgtggaaccggatccggatccggaccgggtccgactcgccgcaacaaccctaatcggaaatcaacccgatctgctccataccaatcagccaaggcgccggagtccacctggggtcacgacatgttctccgatagatctgaagatcaccgatcgggacgttcctccgccggaatcgaaactggaaccaagctctacatttccaatttggattacggtgtcatgaacgaagacatcaaggaactgtttgctgaagttggagaacttaaacgctacacagttcattttgatagaagtggaagatcaaagggaactgctgaagtagtgtattctcggcgtggcgatgcactcgcagctgtgaagaagtataatgatgttcagctggatggaaaacccatgaagatagagattgtgggcactaatcttcaaactgctgcagccccgtctggtagacctgcgaatggaaactccaatggtgctccatggagaggaggacaagggagaggaggtcaacaacgaggtggtggacgaggaggcggtggccgaggtggtggtggtcgtggtaggcgtcctggtaagggccctgcagagaagatttctgcggaagatcttgatgcggatcttgataagtaccattctggagatatggagacaaactaaggaacgtgactgatcttctcaaaccggtaggggttttaggaggaagagaatcgagaaaatgtttgccagaggctttaccacttagcgcctttttggctgtgttgttcatttgtttcattagaatgactttacagaattgagaatatgtgttatttaaagttgttgtctatcttaataccctcaagtgaaaggcagaggaaggaataccaatttcgtttacagatcatatgcaggcaaaagagttttc

SEQ ID NO: 72963 - protein, 277 aa, Arabidopsis thaliana
  peptide (1)..(277): Ceres Seq. ID no. 4952512
  misc_feature (123)..(193): Pfam Name: RNA recognition motif. (a.k.a. RRM, RBD, or RNP domain) Pfam Description: RNA recognition motif. (a.k.a. RRM, RBD, or RNP
  misc_feature (34)..(277): Homolog of NCBI NO: 30697310 NR Description: RNA and export factor binding protein, putative
  misc_feature (34)..(277): Homolog of NCBI NO: 30697313 NR Description: RNA and export factor binding protein, putative
  misc_feature (34)..(277): Homolog of NCBI NO: 21555029 NR Description: transcriptional coactivator-like protein
  misc_feature (34)..(277): Homolog of NCBI NO: 9757916 NR Description: RNA and export factor binding protein 2-I-like
  misc_feature (47)..(277): Homolog of NCBI NO: 6755763 NR Description: RNA and export factor binding protein 1; Tcra binding factor interacting protein 1 [Mus musculus]
  misc_feature (34)..(69): Homolog of NCBI NO: 6755763 NR Description: RNA and export factor binding protein 1; Tcra binding factor interacting protein 1 [Mus musculus]
  misc_feature (51)..(277): Homolog of NCBI NO: 30411083 NR Description: Similar to THO complex 4 [Homo sapiens]
  misc_feature (34)..(69): Homolog of NCBI NO: 30411083 NR Description: Similar to THO complex 4 [Homo sapiens]
  misc_feature (51)..(252): Homolog of NCBI NO: 11358209 NR Description: hypothetical protein T22P11.120 - Arabidopsis >gi|7413642|emb|CAB85990.1| putative protein [Arabidopsis
  misc_feature (51)..(252): Homolog of NCBI NO: 30679669 NR Description: RNA and export factor binding protein, putative thaliana] >gi|22655123|gb|AAM98152.1| putative protein thaliana] >gi|30023796|gb|AAP13431.1| At5g02530 [Arabidopsis
LSLSLSLSLSLSLLYYFYLPRRRKRNVDRRTFEMSTGLDMSLDDMIAKNRKSRGGAGPARGTGSGSGPGPTRRNNPNRKSTRSAPYQSAKAPESTWGHDMFSDRSEDHRSGRSSAGIETGTKLYISNLDYGVMNEDIKELFAEVGELKRYTVHFDRSGRSKGTAEVVYSRRGDALAAVKKYNDVQLDGKPMKIEIVGTNLQTAAAPSGRPANGNSNGAPWRGGQGRGGQQRGGGRGGGGRGGGGRGRRPGKGPAEKISAEDLDADLDKYHSGDMETN

SEQ ID NO: 72964 - protein, 244 aa, Arabidopsis thaliana; identical to SEQ ID NO: 20888
  peptide (1)..(244): Ceres Seq. ID no. 4952513
  misc_feature (90)..(160): Pfam Name: RNA recognition motif. (a.k.a. RRM, RBD, or RNP domain) Pfam Description: RNA recognition motif. (a.k.a. RRM, RBD, or RNP
  misc_feature (1)..(244): Homolog of NCBI NO: 30697310 NR Description: RNA and export factor binding protein, putative
  misc_feature (1)..(244): Homolog of NCBI NO: 30697313 NR Description: RNA and export factor binding protein, putative
  misc_feature (1)..(244): Homolog of NCBI NO: 21555029 NR Description: transcriptional coactivator-like protein
  misc_feature (1)..(244): Homolog of NCBI NO: 9757916 NR Description: RNA and export factor binding protein 2-I-like
  misc_feature (14)..(244): Homolog of NCBI NO: 6755763 NR Description: RNA and export factor binding protein 1; Tcra binding factor interacting protein 1 [Mus musculus]
  misc_feature (1)..(36): Homolog of NCBI NO: 6755763 NR Description: RNA and export factor binding protein 1; Tcra binding factor interacting protein 1 [Mus musculus]
  misc_feature (18)..(244): Homolog of NCBI NO: 30411083 NR Description: Similar to THO complex 4 [Homo sapiens]
  misc_feature (1)..(36): Homolog of NCBI NO: 30411083 NR Description: Similar to THO complex 4 [Homo sapiens]
  misc_feature (18)..(219): Homolog of NCBI NO: 11358209 NR Description: hypothetical protein T22P11.120 - Arabidopsis >gi|7413642|emb|CAB85990.1| putative protein [Arabidopsis
  misc_feature (18)..(219): Homolog of NCBI NO: 30679669 NR Description: RNA and export factor binding protein, putative thaliana] >gi|22655123|gb|AAM98152.1| putative protein thaliana] >gi|30023796|gb|AAP13431.1| At5g02530 [Arabidopsis

SEQ ID NO: 72965 - protein, 238 aa, Arabidopsis thaliana; identical to SEQ ID NO: 20889
  peptide (1)..(238): Ceres Seq. ID no. 4952514
  misc_feature (84)..(154): Pfam Name: RNA recognition motif. (a.k.a. RRM, RBD, or RNP domain) Pfam Description: RNA recognition motif. (a.k.a. RRM, RBD, or RNP
  misc_feature (1)..(238): Homolog of NCBI NO: 30697310 NR Description: RNA and export factor binding protein, putative
  misc_feature (1)..(238): Homolog of NCBI NO: 30697313 NR Description: RNA and export factor binding protein, putative
  misc_feature (1)..(238): Homolog of NCBI NO: 21555029 NR Description: transcriptional coactivator-like protein
  misc_feature (1)..(238): Homolog of NCBI NO: 9757916 NR Description: RNA and export factor binding protein 2-I-like
  misc_feature (8)..(238): Homolog of NCBI NO: 6755763 NR Description: RNA and export factor binding protein 1; Tcra binding factor interacting protein 1 [Mus musculus]
  misc_feature (1)..(30): Homolog of NCBI NO: 6755763 NR Description: RNA and export factor binding protein 1; Tcra binding factor interacting protein 1 [Mus musculus]
  misc_feature (12)..(238): Homolog of NCBI NO: 30411083 NR Description: Similar to THO complex 4 [Homo sapiens]
  misc_feature (1)..(30): Homolog of NCBI NO: 30411083 NR Description: Similar to THO complex 4 [Homo sapiens]
  misc_feature (12)..(213): Homolog of NCBI NO: 11358209 NR Description: hypothetical protein T22P11.120 - Arabidopsis >gi|7413642|emb|CAB85990.1| putative protein [Arabidopsis
  misc_feature (12)..(213): Homolog of NCBI NO: 30679669 NR Description: RNA and export factor binding protein, putative thaliana] >gi|22655123|gb|AAM98152.1| putative protein thaliana] >gi|30023796|gb|AAP13431.1| At5g02530 [Arabidopsis

SEQ ID NO: 72966 - DNA, 600 bp, Arabidopsis thaliana
  misc_feature (1)..(600): Ceres Seq. ID no. 4952626
  misc_feature: MA Experiment ID: 20001248 Result: Down-regulated in Transcription
  misc_feature: MA Experiment 20001248 PARAMETER Experiment Name: At_Far-red-induction_P Parameter: Age (day) Value: 7
  misc_feature: MA Experiment 20001248 PARAMETER Experiment Name: At_Far-red-induction_P Parameter: Light Value: Far-red vs. White
  misc_feature: MA Experiment 20001248 PARAMETER Experiment Name: At_Far-red-induction_P Parameter: Organism Value: A. thaliana
  misc_feature: MA Experiment 20001248 PARAMETER Experiment Name: At_Far-red-induction_P Parameter: Plant Line Value: Columbia
  misc_feature: MA Experiment 20001248 PARAMETER Experiment Name: At_Far-red-induction_P Parameter: Timepoint (hr) Value: 4
  misc_feature: MA Experiment 20001248 PARAMETER Experiment Name: At_Far-red-induction_P Parameter: Tissue Value: Whole Plant
atggccacacaaagttgttacgtcactcgaaatcttaaatccgccgtcaaaaatgctattcagacgaagcagccaccaaccactactcgagccgccgtagatccagattccttaacagtagatgtcgccgtttgtgaagttttatctcttcagttacaattttctccaagcttctgcatggttcatcagatttgtgttgttgttctccgcagggcgatttcgcttctgattattcttaacagctttttatcgaacaagacgatcatttctgcttacgcttctgctggattcctgattagtctgtttcaaactgctgctattcttgaagttcttcatggagctattggaattgtcccgagtggattcttgtctccactgatgcaatggagtggaagaactcacttcatattggctattgttggacagatcaaggaggattcgccgtggctgtctataacacttgtggcttggtgtatcggtgaggccgtcctcttggtctacccattcctttggttgaagctttatctccagcttttcaaacaaagaaagtctaagcttggaaaatcgaagaagcttcacggcaagagaaagagaatgtga

SEQ ID NO: 72967 - protein, 199 aa, Arabidopsis thaliana
  peptide (1)..(199): Ceres Seq. ID no. 4952627
  misc_feature (103)..(168): Pfam Name: Protein tyrosine phosphatase-like protein, PTPLA Pfam Description: Protein tyrosine phosphatase-like protein, PTPLA
  misc_feature (1)..(199): Homolog of NCBI NO: 15238517 NR Description: putative protein; protein id: At5g59770.1
  misc_feature (72)..(168): Homolog of NCBI NO: 26453242 NR Description: unknown protein [Arabidopsis thaliana]
  misc_feature (162)..(199): Homolog of NCBI NO: 26453242 NR Description: unknown protein [Arabidopsis thaliana]
  misc_feature (1)..(199): Homolog of NCBI NO: 9758842 NR Description: gene_id:MTH12.2~unknown protein [Arabidopsis
  misc_feature (96)..(199): Homolog of NCBI NO: 9758842 NR Description: gene_id:MTH12.2~unknown protein [Arabidopsis
MATQSCYVTRNLKSAVKNAIQTKQPPTTTRAAVDPDSLTVDVAVCEVLSLQLQFSPSFCMVHQICVVVLRRAISLLIILNSFLSNKTIISAYASAGFLISLFQTAAILEVLHGAIGIVPSGFLSPLMQWSGRTHFILAIVGQIKEDSPWLSITLVAWCIGEAVLLVYPFLWLKLYLQLFKQRKSKLGKSKKLHGKRKRM

SEQ ID NO: 72968 - protein, 140 aa, Arabidopsis thaliana
  peptide (1)..(140): Ceres Seq. ID no. 4952628
  misc_feature (44)..(109): Pfam Name: Protein tyrosine phosphatase-like protein, PTPLA Pfam Description: Protein tyrosine phosphatase-like protein, PTPLA
  misc_feature (1)..(140): Homolog of NCBI NO: 15238517 NR Description: putative protein; protein id: At5g59770.1
  misc_feature (13)..(109): Homolog of NCBI NO: 26453242 NR Description: unknown protein [Arabidopsis thaliana]
  misc_feature (103)..(140): Homolog of NCBI NO: 26453242 NR Description: unknown protein [Arabidopsis thaliana]
  misc_feature (1)..(140): Homolog of NCBI NO: 9758842 NR Description: gene_id:MTH12.2~unknown protein [Arabidopsis
  misc_feature (37)..(140): Homolog of NCBI NO: 9758842 NR Description: gene_id:MTH12.2~unknown protein [Arabidopsis
MVHQICVVVLRRAISLLIILNSFLSNKTIISAYASAGFLISLFQTAAILEVLHGAIGIVPSGFLSPLMQWSGRTHFILAIVGQIKEDSPWLSITLVAWCIGEAVLLVYPFLWLKLYLQLFKQRKSKLGKSKKLHGKRKRM

SEQ ID NO: 72969 - DNA, 1182 bp, Arabidopsis thaliana
  misc_feature (1)..(1182): Ceres Seq. ID no. 4952653
  misc_feature: MA Experiment ID: 20000307 Result: Down-regulated in Transcription
  misc_feature: MA Experiment 20000307 PARAMETER Experiment Name: At_Germinating_Seeds_Sub_P Parameter: Age (hr) Value: 24 vs. 0
  misc_feature: MA Experiment 20000307 PARAMETER Experiment Name: At_Germinating_Seeds_Sub_P Parameter: Organism Value: A. thaliana
  misc_feature: MA Experiment 20000307 PARAMETER Experiment Name: At_Germinating_Seeds_Sub_P Parameter: Plant Line Value: WS
  misc_feature: MA Experiment 20000307 PARAMETER Experiment Name: At_Germinating_Seeds_Sub_P Parameter: Tissue Value: Germinating Seeds
  misc_feature: MA Experiment ID: 20000355 Result: Up-regulated in Transcription
  misc_feature: MA Experiment 20000355 PARAMETER Experiment Name: At_Siliques_Sub_P Parameter: Age (day) Value: 21
  misc_feature: MA Experiment 20000355 PARAMETER Experiment Name: At_Siliques_Sub_P Parameter: Organism Value: A. thaliana
  misc_feature: MA Experiment 20000355 PARAMETER Experiment Name: At_Siliques_Sub_P Parameter: Plant Line Value: WS
  misc_feature: MA Experiment 20000355 PARAMETER Experiment Name: At_Siliques_Sub_P Parameter: Tissue Value: Less Than 5mm Siliques vs. Whole Plant
  misc_feature: MA Experiment ID: 20001807 Result: Up-regulated in Transcription
  misc_feature: MA Experiment 20001807 PARAMETER Experiment Name: At_50mM_NH4NO3_L-to-H_Sub_P Parameter: Timepoint (hr) Value: 6
  misc_feature: MA Experiment 20001807 PARAMETER Experiment Name: At_50mM_NH4NO3_L-to-H_Sub_P Parameter: Tissue Value: Leaf
  misc_feature: MA Experiment 20001807 PARAMETER Experiment Name: At_50mM_NH4NO3_L-to-H_Sub_P Parameter: Treatment Value: 50mM NH4NO3 vs 100mM Mannitol
atggcggctttacttctcctcaatcgtgtttctcgaagtactagctcaatctctctccaccgggtcgcaggaactctgggtttcaattccttcaatgctcaaattcacggtgacagaatctccggaacactctttcgagtgagatcattagctactcttgctgaaggagcttctcattttaatgagatggtatctgtgaatcagcggaagtattatcttctgggtggtaaaggaggtgttgggaaaacgagctgtgctgcttctcttgcggttaagtttgctagccacggtcatcctaccattgtggtttctactgaccctgctcactccttgagcgattctttttcccaggacttgtcaggaggagtcctaaagcccgttcaaggtgttgattctccacttcttgctcttgagatcacacctgagataatgaaggacgagataaaacgtcagacgggcgataaaagtgtgaaaaatatgatggatagcatggggctcggaatgtttgccggcgagttaggggacttaaatcttgaagatatgctcaacgctgcctctcctggtattgacgaaatagcagctatttccaaggcacttatccctctcagaattcccctgaaaaaatacagtaggttcactcgtatagtttttgatactgctcccacggggcatactctgcggcttctttccctcccagacttctatgattcatccattagcaaaataactaagctcaagaagaaaatcactgcagcagcttcagcctttaagttggtctttggcaaaaaagagatacaacaaaaagaacttcctaacgagttagatcaactgaaagagaggatggagaaagttcgaaatgttttccgtgatgtggacactaccgagtttgttattgtaaccatcccaacggttatggcaataaacgagtcttcaaggttacatgcatctttaagaaaagaaaatgtgccagtccaccggcttattgttaatcagcttctacctcaatctgaatccgattgcaaattttgctcaataagacgaaaggaacaaacgcgtgtgcttggacttattcagaatgatacagaactttcggggttaaaattgatccaatcgccattgctagacgcagagataagaggggttcccgcacttaagttcatgggtgatctcatttggaaataa

SEQ ID NO: 72970 - protein, 393 aa, Arabidopsis thaliana
  peptide (1)..(393): Ceres Seq. ID no. 4952654
  misc_feature (69)..(393): Pfam Name: Anion-transporting ATPase Pfam Description: Anion-transporting ATPase
  misc_feature (1)..(393): Homolog of NCBI NO: 30697424 NR Description: ATPase - like protein [Arabidopsis thaliana]
  misc_feature (45)..(393): Homolog of NCBI NO: 9759337 NR Description: arsenite translocating ATPase-like protein
  misc_feature (1)..(73): Homolog of NCBI NO: 9759337 NR Description: arsenite translocating ATPase-like protein
  misc_feature (46)..(393): Homolog of NCBI NO: 30681260 NR Description: ATPase -related [Arabidopsis thaliana]
  misc_feature (208)..(393): Homolog of NCBI NO: 6056208 NR Description: putative ATPase [Arabidopsis thaliana]
  misc_feature (46)..(173): Homolog of NCBI NO: 6056208 NR Description: putative ATPase [Arabidopsis thaliana]
  misc_feature (1)..(366): Homolog of NCBI NO: 5824321 NR Description: ATPase [Solanum tuberosum]
  misc_feature (64)..(392): Homolog of NCBI NO: 20095116 NR Description: Arsenite transporting ATPase [Methanopyrus AV19] >gi|19888411|gb|AAM02893.1| Arsenite transporting ATPase
  misc_feature (70)..(392): Homolog of NCBI NO: 15669329 NR Description: arsenical pump-driving ATPase (arsA)
  misc_feature (178)..(393): Homolog of NCBI NO: 24586297 NR Description: CG1598-PA [Drosophila melanogaster]
MAALLLLNRVSRSTSSISLHRVAGTLGFNSFNAQIHGDRISGTLFRVRSLATLAEGASHFNEMVSVNQRKYYLLGGKGGVGKTSCAASLAVKFASHGHPTIVVSTDPAHSLSDSFSQDLSGGVLKPVQGVDSPLLALEITPEIMKDEIKRQTGDKSVKNMMDSMGLGMFAGELGDLNLEDMLNAASPGIDEIAAISKALIPLRIPLKKYSRFTRIVFDTAPTGHTLRLLSLPDFYDSSISKITKLKKKITAAASAFKLVFGKKEIQQKELPNELDQLKERMEKVRNVFRDVDTTEFVIVTIPTVMAINESSRLHASLRKENVPVHRLIVNQLLPQSESDCKFCSIRRKEQTRVLGLIQNDTELSGLKLIQSPLLDAEIRGVPALKFMGDLIWK

SEQ ID NO: 72971 - protein, 331 aa, Arabidopsis thaliana
  peptide (1)..(331): Ceres Seq. ID no. 4952655
  misc_feature (7)..(331): Pfam Name: Anion-transporting ATPase Pfam Description: Anion-transporting ATPase
  misc_feature (1)..(331): Homolog of NCBI NO: 30697424 NR Description: ATPase - like protein [Arabidopsis thaliana]
  misc_feature (1)..(331): Homolog of NCBI NO: 9759337 NR Description: arsenite translocating ATPase-like protein
  misc_feature (1)..(11): Homolog of NCBI NO: 9759337 NR Description: arsenite translocating ATPase-like protein
  misc_feature (1)..(331): Homolog of NCBI NO: 30681260 NR Description: ATPase -related [Arabidopsis thaliana]
  misc_feature (146)..(331): Homolog of NCBI NO: 6056208 NR Description: putative ATPase [Arabidopsis thaliana]
  misc_feature (1)..(111): Homolog of NCBI NO: 6056208 NR Description: putative ATPase [Arabidopsis thaliana]
  misc_feature (1)..(304): Homolog of NCBI NO: 5824321 NR Description: ATPase [Solanum tuberosum]
  misc_feature (2)..(330): Homolog of NCBI NO: 20095116 NR Description: Arsenite transporting ATPase [Methanopyrus AV19] >gi|19888411|gb|AAM02893.1| Arsenite transporting ATPase
  misc_feature (8)..(330): Homolog of NCBI NO: 15669329 NR Description: arsenical pump-driving ATPase (arsA)
  misc_feature (116)..(331): Homolog of NCBI NO: 24586297 NR Description: CG1598-PA [Drosophila melanogaster]
MVSVNQRKYYLLGGKGGVGKTSCAASLAVKFASHGHPTIVVSTDPAHSLSDSFSQDLSGGVLKPVQGVDSPLLALEITPEIMKDEIKRQTGDKSVKNMMDSMGLGMFAGELGDLNLEDMLNAASPGIDEIAAISKALIPLRIPLKKYSRFTRIVFDTAPTGHTLRLLSLPDFYDSSISKITKLKKKITAAASAFKLVFGKKEIQQKELPNELDQLKERMEKVRNVFRDVDTTEFVIVTIPTVMAINESSRLHASLRKENVPVHRLIVNQLLPQSESDCKFCSIRRKEQTRVLGLIQNDTELSGLKLIQSPLLDAEIRGVPALKFMGDLIWK

SEQ ID NO: 72972 - protein, 250 aa, Arabidopsis thaliana
  peptide (1)..(250): Ceres Seq. ID no. 4952656
  misc_feature (1)..(250): Pfam Name: Anion-transporting ATPase Pfam Description: Anion-transporting ATPase
  misc_feature (1)..(250): Homolog of NCBI NO: 30697424 NR Description: ATPase - like protein [Arabidopsis thaliana]
  misc_feature (1)..(250): Homolog of NCBI NO: 9759337 NR Description: arsenite translocating ATPase-like protein
  misc_feature (1)..(250): Homolog of NCBI NO: 30681260 NR Description: ATPase -related [Arabidopsis thaliana]
  misc_feature (65)..(250): Homolog of NCBI NO: 6056208 NR Description: putative ATPase [Arabidopsis thaliana]
  misc_feature (1)..(30): Homolog of NCBI NO: 6056208 NR Description: putative ATPase [Arabidopsis thaliana]
  misc_feature (1)..(223): Homolog of NCBI NO: 5824321 NR Description: ATPase [Solanum tuberosum]
  misc_feature (1)..(249): Homolog of NCBI NO: 20095116 NR Description: Arsenite transporting ATPase [Methanopyrus AV19] >gi|19888411|gb|AAM02893.1| Arsenite transporting ATPase
  misc_feature (1)..(249): Homolog of NCBI NO: 15669329 NR Description: arsenical pump-driving ATPase (arsA)
  misc_feature (35)..(250): Homolog of NCBI NO: 24586297 NR Description: CG1598-PA [Drosophila melanogaster]
  misc_feature (1)..(56): Homolog of NCBI NO: 24586297 NR Description: CG1598-PA [Drosophila melanogaster]
MKDEIKRQTGDKSVKNMMDSMGLGMFAGELGDLNLEDMLNAASPGIDEIAAISKALIPLRIPLKKYSRFTRIVFDTAPTGHTLRLLSLPDFYDSSISKITKLKKKITAAASAFKLVFGKKEIQQKELPNELDQLKERMEKVRNVFRDVDTTEFVIVTIPTVMAINESSRLHASLRKENVPVHRLIVNQLLPQSESDCKFCSIRRKEQTRVLGLIQNDTELSGLKLIQSPLLDAEIRGVPALKFMGDLIWK

SEQ ID NO: 72973 - DNA, 1215 bp, Arabidopsis thaliana
  misc_feature (1)..(1215): Ceres Seq. ID no. 4952950
  misc_feature: MA Experiment ID: 20000227 Result: Up-regulated in Transcription
  misc_feature: MA Experiment 20000227 PARAMETER Experiment Name: At_Root-Tips-vs-Tops_P Parameter: Tissue Value: Root Tips vs. Root Tops
  misc_feature: MA Experiment ID: 20001558 Result: Up-regulated in Transcription
  misc_feature: MA Experiment 20001558 PARAMETER Experiment Name: At_Drought_Soil_Dry_P Parameter: Age (day) Value: 27
  misc_feature: MA Experiment 20001558 PARAMETER Experiment Name: At_Drought_Soil_Dry_P Parameter: Organism Value: A. thaliana
  misc_feature: MA Experiment 20001558 PARAMETER Experiment Name: At_Drought_Soil_Dry_P Parameter: Plant Line Value: WS
  misc_feature: MA Experiment 20001558 PARAMETER Experiment Name: At_Drought_Soil_Dry_P Parameter: Post Timepoint (hr) Value: 6
  misc_feature: MA Experiment 20001558 PARAMETER Experiment Name: At_Drought_Soil_Dry_P Parameter: Post-Treatment Value: Re-Water vs. No Drought
  misc_feature: MA Experiment 20001558 PARAMETER Experiment Name: At_Drought_Soil_Dry_P Parameter: Timepoint (day) Value: 13
  misc_feature: MA Experiment 20001558 PARAMETER Experiment Name: At_Drought_Soil_Dry_P Parameter: Treatment Value: Drought vs. No Drought
atgtataaccttagtaggatcatttatcgtttctcctcggtttcacttaaccctagcacgagagcatctgggtttctacttgagaacgcttcatcaaaaatcttacaatctgctacgaatcgagcattttctgcaaaatcaggatctgatggagttggaggcgatgataacggctggaatatttcaacaggaggatcatttggtggtacaggatctgctgatcttgattgggacaataaatctatgtggtctactggtttaactaaggagcatttcgatggtgtctccgttggtcgtcagaagaacgcggcgaatccttcttctgataacaccccttctgattcgggtgatgtaatgagcaaattgggtccaaaggaggtagctttggttaatgaaatgaatgagtatgatgatttgcttaaagagattgagcaagataataggcaaggcagggcttttgttgatgggattaaacagagaatgatggagatcagtgtgttgttgaagcaagttaaagagccaggtgctagagggtcttatcttaaggactctgagaagactgagatgtatagattgcacaaagagaatcctgaggtgtatactattgagaggcttgctaaggattataggattatgaggcagcgtgttcacgccattctttttcttaaagaagatgaagaagaagaggagaggaagcttggtcgtcctttggatgattctgttgaccgtttgcttgatgagtaccctgagttcttcatttcgcatgaccgggaatttcatgtggcctcacttaattacaaacccgacttcaaggtcatgccagaaggatgggatggtacaatcaaagatatggatgaagtccattatgagatctcaaagaaagaggatgacatgctttacgaagaatttgtccgaaggtttgagttcaacaaaatgaaatggagaggagaagtgatgtgccacaagtacagcaggagacgttcatcagagggatggaaaatcacggttgagaaattgggtgctaagggcaaacgtggagccggaggtggctggaagtttatgagtcttccagatggatcaagccgaccactcaacgaaatggagaagcattatatcaacggaggtgatgcgttactcgcccgcgaaccagaagcggaggtcgaagcggaaacagaagcggaaggagaggcgcatagcatgtctcaaagccggtaa

SEQ ID NO: 72974 - protein, 404 aa, Arabidopsis thaliana
  peptide (1)..(404): Ceres Seq. ID no. 4952951
  misc_feature (1)..(404): Homolog of NCBI NO: 15241764 NR Description: putative protein; protein id: At5g62270.1
  misc_feature (1)..(372): Homolog of NCBI NO: 8809640 NR Description: gb|AAC32909.1~gene_id:MMI9.10~similar to unknown
  misc_feature (69)..(372): Homolog of NCBI NO: 34908962 NR Description: P0003D09.18 [Oryza sativa (japonica
  misc_feature (143)..(366): Homolog of NCBI NO: 15227059 NR Description: predicted by genscan; protein id: At2g02880.1
  misc_feature (206)..(383): Homolog of NCBI NO: 18071389 NR Description: putative mucin [Oryza sativa]
MYNLSRIIYRFSSVSLNPSTRASGFLLENASSKILQSATNRAFSAKSGSDGVGGDDNGWNISTGGSFGGTGSADLDWDNKSMWSTGLTKEHFDGVSVGRQKNAANPSSDNTPSDSGDVMSKLGPKEVALVNEMNEYDDLLKEIEQDNRQGRAFVDGIKQRMMEISVLLKQVKEPGARGSYLKDSEKTEMYRLHKENPEVYTIERLAKDYRIMRQRVHAILFLKEDEEEEERKLGRPLDDSVDRLLDEYPEFFISHDREFHVASLNYKPDFKVMPEGWDGTIKDMDEVHYEISKKEDDMLYEEFVRRFEFNKMKWRGEVMCHKYSRRRSSEGWKITVEKLGAKGKRGAGGGWKFMSLPDGSSRPLNEMEKHYINGGDALLAREPEAEVEAETEAEGEAHSMSQSR

SEQ ID NO: 72975 - protein, 323 aa, Arabidopsis thaliana
  peptide (1)..(323): Ceres Seq. ID no. 4952952
  misc_feature (1)..(323): Homolog of NCBI NO: 15241764 NR Description: putative protein; protein id: At5g62270.1
  misc_feature (1)..(291): Homolog of NCBI NO: 8809640 NR Description: gb|AAC32909.1~gene_id:MMI9.10~similar to unknown
  misc_feature (1)..(291): Homolog of NCBI NO: 34908962 NR Description: P0003D09.18 [Oryza sativa (japonica
  misc_feature (62)..(285): Homolog of NCBI NO: 15227059 NR Description: predicted by genscan; protein id: At2g02880.1
  misc_feature (125)..(302): Homolog of NCBI NO: 18071389 NR Description: putative mucin [Oryza sativa]
MWSTGLTKEHFDGVSVGRQKNAANPSSDNTPSDSGDVMSKLGPKEVALVNEMNEYDDLLKEIEQDNRQGRAFVDGIKQRMMEISVLLKQVKEPGARGSYLKDSEKTEMYRLHKENPEVYTIERLAKDYRIMRQRVHAILFLKEDEEEEERKLGRPLDDSVDRLLDEYPEFFISHDREFHVASLNYKPDFKVMPEGWDGTIKDMDEVHYEISKKEDDMLYEEFVRRFEFNKMKWRGEVMCHKYSRRRSSEGWKITVEKLGAKGKRGAGGGWKFMSLPDGSSRPLNEMEKHYINGGDALLAREPEAEVEAETEAEGEAHSMSQSR

SEQ ID NO: 72976 - protein, 286 aa, Arabidopsis thaliana
  peptide (1)..(286): Ceres Seq. ID no. 4952953
  misc_feature (1)..(286): Homolog of NCBI NO: 15241764 NR Description: putative protein; protein id: At5g62270.1
  misc_feature (1)..(254): Homolog of NCBI NO: 8809640 NR Description: gb|AAC32909.1~gene_id:MMI9.10~similar to unknown
  misc_feature (1)..(254): Homolog of NCBI NO: 34908962 NR Description: P0003D09.18 [Oryza sativa (japonica
  misc_feature (25)..(248): Homolog of NCBI NO: 15227059 NR Description: predicted by genscan; protein id: At2g02880.1
  misc_feature (88)..(265): Homolog of NCBI NO: 18071389 NR Description: putative mucin [Oryza sativa]
MSKLGPKEVALVNEMNEYDDLLKEIEQDNRQGRAFVDGIKQRMMEISVLLKQVKEPGARGSYLKDSEKTEMYRLHKENPEVYTIERLAKDYRIMRQRVHAILFLKEDEEEEERKLGRPLDDSVDRLLDEYPEFFISHDREFHVASLNYKPDFKVMPEGWDGTIKDMDEVHYEISKKEDDMLYEEFVRRFEFNKMKWRGEVMCHKYSRRRSSEGWKITVEKLGAKGKRGAGGGWKFMSLPDGSSRPLNEMEKHYINGGDALLAREPEAEVEAETEAEGEAHSMSQSR

SEQ ID NO: 72977 - DNA, 1326 bp, Arabidopsis thaliana
  misc_feature (1)..(1326): Ceres Seq. ID no. 4952954
  misc_feature: MA Experiment ID: 20000439 Result: Up-regulated in Transcription
  misc_feature: MA Experiment 20000439 PARAMETER Experiment Name: At_Roots__P Parameter: Age (day) Value: 14 vs. 21
  misc_feature: MA Experiment 20000439 PARAMETER Experiment Name: At_Roots__P Parameter: Organism Value: A. thaliana
  misc_feature: MA Experiment 20000439 PARAMETER Experiment Name: At_Roots__P Parameter: Tissue Value: Roots vs. Whole Plant
  misc_feature: Pfam Name: DUF296 Pfam Description: Domain of unknown function (DUF296)
atggaggagaaaggtgaaataagtccaagtggggtcgtcacagttaagggagatgaagctttggttccaagaacagagtttcaacaaaaccctagttttctccaattcgtgagtcccacaacggtagtgactcctctccctcctccaccagctccgtcttcggctccggtaccaaccaccgtgactcctggctcagccacagcatcaaccggatcagatccgacgaaaaagaagagaggaagaccgaggaagtacgcaccagacggaagcctgaaccctaggtttttgcgaccaactctgtctccaactccaatctcatcttcgattccattgtctggagattatcaatggaaacgaggcaaagctcagcagcagcatcagcctcttgagttcgtcaagaaatctcacaaattcgagtatggaagcccagatgttgggaagtgggaccaacataactggattttgctgggtacacttttgtctgaagaagctattacactcagaccaactaatgcaaactctgttttactatctcttgcagctcctactcctcctcttcctgggctctcatgctatgtgggtgcaaattttacgacccatcaatttactgtcaatggcggtgaggatgtgacaatgaaggttatgccgtattcgcaacaaggatctcgagctatctgcattctttctgcaactggttcgatctctaatgtcactcttggtcaacctaccaatgcaggtggcactcttacatatgagggtcggtttgagatactatcgctatctggttcctttatgcctactgaaaatggaggaacaaaaggtcgggctggtgggatgagcatttctttagccggaccaaatggcaatatatttggtggtggccttgccggtatgcttatagcagctggtcctgttcaggtggtaatgggaagtttcattgtgatgcatcaagcagaacaaaatcagaagaagaaacctagagttatggaggcttttgctccaccacaaccacaagcaccaccacaactgcaacaacaacaacctcctacttttaccataacaaccgtgaattcaacttctccttcggtgaacaccgtagaggagcagaaaccacaagcttatggtggtggtatagtgagaccgatggctcaaatgccttcttctttccaaaacgacaattcaactatgaacaatttcacaccggcctatcatggatacgggaatatgaacactggtactactcacaaagaagaacatgaagacgaagatggtggtgatgatgatgatgattcaggcgatactaggagccaatctcatagtggttga

SEQ ID NO: 72978 - protein, 441 aa, Arabidopsis thaliana
  peptide (1)..(441): Ceres Seq. ID no. 4952955
  misc_feature: Pfam Name: DUF296 Pfam Description: Domain of unknown function (DUF296)
  misc_feature (1)..(441): Homolog of NCBI NO: 15241763 NR Description: putative protein; protein id: At5g62260.1
  misc_feature (181)..(441): Homolog of NCBI NO: 8809639 NR Description: contains similarity to DNA-binding [Arabidopsis thaliana] >gi|26451694|dbj|BAC42942.1| unknown [Arabidopsis thaliana] >gi|28973553|gb|AAO64101.1| unknown
  misc_feature (1)..(143): Homolog of NCBI NO: 8809639 NR Description: contains similarity to DNA-binding [Arabidopsis thaliana] >gi|26451694|dbj|BAC42942.1| unknown [Arabidopsis thaliana] >gi|28973553|gb|AAO64101.1| unknown
  misc_feature (1)..(148): Homolog of NCBI NO: 15235790 NR Description: putative DNA binding protein; protein id: supported by cDNA: 12041. [Arabidopsis thaliana]
  misc_feature (195)..(323): Homolog of NCBI NO: 15235790 NR Description: putative DNA binding protein; protein id: supported by cDNA: 12041. [Arabidopsis thaliana]
  misc_feature (194)..(422): Homolog of NCBI NO: 37537056 NR Description: putative AT-Hook DNA-binding protein [Oryza
  misc_feature (50)..(108): Homolog of NCBI NO: 37537056 NR Description: putative AT-Hook DNA-binding protein [Oryza
  misc_feature (182)..(437): Homolog of NCBI NO: 15242131 NR Description: putative protein; protein id: At5g51590.1
  misc_feature (191)..(325): Homolog of NCBI NO: 22328578 NR Description: putative DNA-binding protein; protein id: supported by cDNA: gi_17979484 [Arabidopsis thaliana] AT4g12080/F16J13_150 [Arabidopsis thaliana]
  misc_feature (194)..(326): Homolog of NCBI NO: 32352210 NR Description: hypothetical protein [Oryza sativa (japonica
MEEKGEISPSGVVTVKGDEALVPRTEFQQNPSFLQFVSPTTVVTPLPPPPAPSSAPVPTTVTPGSATASTGSDPTKKKRGRPRKYAPDGSLNPRFLRPTLSPTPISSSIPLSGDYQWKRGKAQQQHQPLEFVKKSHKFEYGSPDVGKWDQHNWILLGTLLSEEAITLRPTNANSVLLSLAAPTPPLPGLSCYVGANFTTHQFTVNGGEDVTMKVMPYSQQGSRAICILSATGSISNVTLGQPTNAGGTLTYEGRFEILSLSGSFMPTENGGTKGRAGGMSISLAGPNGNIFGGGLAGMLIAAGPVQVVMGSFIVMHQAEQNQKKKPRVMEAFAPPQPQAPPQLQQQQPPTFTITTVNSTSPSVNTVEEQKPQAYGGGIVRPMAQMPSSFQNDNSTMNNFTPAYHGYGNMNTGTTHKEEHEDEDGGDDDDDSGDTRSQSHSG

SEQ ID NO: 72979 - protein, 230 aa, Arabidopsis thaliana
  peptide (1)..(230): Ceres Seq. ID no. 4952956
  misc_feature: Pfam Name: DUF296 Pfam Description: Domain of unknown function (DUF296)
  misc_feature (1)..(230): Homolog of NCBI NO: 15241763 NR Description: putative protein; protein id: At5g62260.1
  misc_feature (1)..(230): Homolog of NCBI NO: 8809639 NR Description: contains similarity to DNA-binding [Arabidopsis thaliana] >gi|26451694|dbj|BAC42942.1| unknown [Arabidopsis thaliana] >gi|28973553|gb|AAO64101.1| unknown
  misc_feature (1)..(112): Homolog of NCBI NO: 15235790 NR Description: putative DNA binding protein; protein id: supported by cDNA: 12041. [Arabidopsis thaliana]
  misc_feature (1)..(211): Homolog of NCBI NO: 37537056 NR Description: putative AT-Hook DNA-binding protein [Oryza
  misc_feature (1)..(226): Homolog of NCBI NO: 15242131 NR Description: putative protein; protein id: At5g51590.1
  misc_feature (1)..(114): Homolog of NCBI NO: 22328578 NR Description: putative DNA-binding protein; protein id: supported by cDNA: gi_17979484 [Arabidopsis thaliana] AT4g12080/F16J13_150 [Arabidopsis thaliana]
  misc_feature (1)..(115): Homolog of NCBI NO: 32352210 NR Description: hypothetical protein [Oryza sativa (japonica
  misc_feature (1)..(115): Homolog of NCBI NO: 38346715 NR Description: OSJNBa0086O06.13 [Oryza sativa (japonica
  misc_feature (1)..(114): Homolog of NCBI NO: 7485570 NR Description: hypothetical protein F16J13.150 - Arabidopsis
  misc_feature (1)..(164): Homolog of NCBI NO: 15236743 NR Description: putative transcription factor; protein id:
MKVMPYSQQGSRAICILSATGSISNVTLGQPTNAGGTLTYEGRFEILSLSGSFMPTENGGTKGRAGGMSISLAGPNGNIFGGGLAGMLIAAGPVQVVMGSFIVMHQAEQNQKKKPRVMEAFAPPQPQAPPQLQQQQPPTFTITTVNSTSPSVNTVEEQKPQAYGGGIVRPMAQMPSSFQNDNSTMNNFTPAYHGYGNMNTGTTHKEEHEDEDGGDDDDDSGDTRSQSHSG

SEQ ID NO: 72980 - protein, 227 aa, Arabidopsis thaliana
  peptide (1)..(227): Ceres Seq. ID no. 4952957
  misc_feature: Pfam Name: DUF296 Pfam Description: Domain of unknown function (DUF296)
  misc_feature (1)..(227): Homolog of NCBI NO: 15241763 NR Description: putative protein; protein id: At5g62260.1
  misc_feature (1)..(227): Homolog of NCBI NO: 8809639 NR Description: contains similarity to DNA-binding [Arabidopsis thaliana] >gi|26451694|dbj|BAC42942.1| unknown [Arabidopsis thaliana] >gi|28973553|gb|AAO64101.1| unknown
  misc_feature (1)..(109): Homolog of NCBI NO: 15235790 NR Description: putative DNA binding protein; protein id: supported by cDNA: 12041. [Arabidopsis thaliana]
  misc_feature (1)..(208): Homolog of NCBI NO: 37537056 NR Description: putative AT-Hook DNA-binding protein [Oryza
  misc_feature (1)..(223): Homolog of NCBI NO: 15242131 NR Description: putative protein; protein id: At5g51590.1
  misc_feature (1)..(111): Homolog of NCBI NO: 22328578 NR Description: putative DNA-binding protein; protein id: supported by cDNA: gi_17979484 [Arabidopsis thaliana] AT4g12080/F16J13_150 [Arabidopsis thaliana]
  misc_feature (1)..(112): Homolog of NCBI NO: 32352210 NR Description: hypothetical protein [Oryza sativa (japonica
  misc_feature (1)..(112): Homolog of NCBI NO: 38346715 NR Description: OSJNBa0086O06.13 [Oryza sativa (japonica
  misc_feature (1)..(111): Homolog of NCBI NO: 7485570 NR Description: hypothetical protein F16J13.150 - Arabidopsis
  misc_feature (1)..(161): Homolog of NCBI NO: 15236743 NR Description: putative transcription factor; protein id:
MPYSQQGSRAICILSATGSISNVTLGQPTNAGGTLTYEGRFEILSLSGSFMPTENGGTKGRAGGMSISLAGPNGNIFGGGLAGMLIAAGPVQVVMGSFIVMHQAEQNQKKKPRVMEAFAPPQPQAPPQLQQQQPPTFTITTVNSTSPSVNTVEEQKPQAYGGGIVRPMAQMPSSFQNDNSTMNNFTPAYHGYGNMNTGTTHKEEHEDEDGGDDDDDSGDTRSQSHSG

SEQ ID NO: 72981 - DNA, 1770 bp, Arabidopsis thaliana
  misc_feature (1)..(1770): Ceres Seq. ID no. 4953063
  misc_feature: MA Experiment ID: 20000171 Result: Up-regulated in Transcription
  misc_feature: MA Experiment 20000171 PARAMETER Experiment Name: At_42deg_Heat_P Parameter: Age (day) Value: 14
  misc_feature: MA Experiment 20000171 PARAMETER Experiment Name: At_42deg_Heat_P Parameter: Organism Value: A. thaliana
  misc_feature: MA Experiment 20000171 PARAMETER Experiment Name: At_42deg_Heat_P Parameter: Plant Line Value: WS
  misc_feature: MA Experiment 20000171 PARAMETER Experiment Name: At_42deg_Heat_P Parameter: Temperature (deg C) Value: 42 vs. 22
  misc_feature: MA Experiment 20000171 PARAMETER Experiment Name: At_42deg_Heat_P Parameter: Timepoint (hr) Value: 1
  misc_feature: MA Experiment 20000171 PARAMETER Experiment Name: At_42deg_Heat_P Parameter: Tissue Value: Aerial
  misc_feature: MA Experiment ID: 20000173 Result: Up-regulated in Transcription
  misc_feature: MA Experiment 20000173 PARAMETER Experiment Name: At_42deg_Heat_P Parameter: Age (day) Value: 14
  misc_feature: MA Experiment 20000173 PARAMETER Experiment Name: At_42deg_Heat_P Parameter: Organism Value: A. thaliana
  misc_feature: MA Experiment 20000173 PARAMETER Experiment Name: At_42deg_Heat_P Parameter: Plant Line Value: WS
  misc_feature: MA Experiment 20000173 PARAMETER Experiment Name: At_42deg_Heat_P Parameter: Temperature (deg C) Value: 42 vs. 22
  misc_feature: MA Experiment 20000173 PARAMETER Experiment Name: At_42deg_Heat_P Parameter: Timepoint (hr) Value: 6
  misc_feature: MA Experiment 20000173 PARAMETER Experiment Name: At_42deg_Heat_P Parameter: Tissue Value: Aerial
  misc_feature: MA Experiment ID: 20000265 Result: Up-regulated in Transcription
  misc_feature: MA Experiment 20000265 PARAMETER Experiment Name: At_Open_Flower_P Parameter: Age (day) Value: 21
  misc_feature: MA Experiment 20000265 PARAMETER Experiment Name: At_Open_Flower_P Parameter: Plant Line Value: WS
  misc_feature: MA Experiment 20000265 PARAMETER Experiment Name: At_Open_Flower_P Parameter: Tissue Value: Closed Flower vs. Whole Plant
  misc_feature: MA Experiment ID: 20001911 Result: Down-regulated in Transcription
  misc_feature: MA Experiment 20001911 PARAMETER Experiment Name: At_Drought_Reproduction_P Parameter: Age (day) Value: 40
  misc_feature: MA Experiment 20001911 PARAMETER Experiment Name: At_Drought_Reproduction_P Parameter: Organism Value: A. thaliana
  misc_feature: MA Experiment 20001911 PARAMETER Experiment Name: At_Drought_Reproduction_P Parameter: Plant Line Value: WS
  misc_feature: MA Experiment 20001911 PARAMETER Experiment Name: At_Drought_Reproduction_P Parameter: Timepoint (day) Value: 10
  misc_feature: MA Experiment 20001911 PARAMETER Experiment Name: At_Drought_Reproduction_P Parameter: Tissue Value: Flowers
  misc_feature: MA Experiment 20001911 PARAMETER Experiment Name: At_Drought_Reproduction_P Parameter: Treatment Value: Drought vs. No Drought
atgtccacaaactatactgccattaatcatatacttcactttcattctccaaacagctgtttcttgatgatcatgtctctggagtttgaacaaatggatgaagcaaacaggttaagcgcgtggaatggttacgtagactggcgaagtagacctgcgttgcgtggccgccatggcggtatgcttgctgcctcgttcgtcttggttgtggaagtgttggagaaccttgcgtttttagcaaacgcgagcaacctagtgctgtatttgtcaacaaagatgggattttcgccgtccggagccgcaaatgccgtaaccgcttttatgggaacggcatttttcttggcccttctcggagggtttttggcagacgccttcttcactactttccatatctatttagtcagcgccgccatagaattcttgggcttgatggtactgacggtccaagcccacgagcactctaccgagccatggtctcgtgtatttctatttgtgggtctatatttagtagctcttggtgtcggaggaataaaaggctcgttgccaccgcacggagcggaacagttcgacgaagaaacatcgagtgggaggagacaaagatctttcttctttaactacttcatatttagcctctcgtgcggtgccttgatagccgtcacggtcgtggtctggctcgaagacaacaaaggctggtcttatggcttcggtgtctccacagccgcgatcctgatctcggtcccggttttcttggccggttctcgcgtttatcgcctcaaggttcctagtggaagtccaatcacgactctgttcaaagtgttaaccgctgctttatacgctaaatataagaaaagaagaacttcaagaattgttgtaacgtgtcacacaagaaatgattgtgatgacagcgtaaccaaacaaaactgtgacggagatgatggatttctcggatctttcctaggtgaagttgtgagagagcgtgaatcactaccacgtccactccgttgtacggaagagcaagtcaaagatgtgaagatagtcatcaagatcctacctattttcatgtctaccattatgcttaactgttgtctagctcagctctcgacgttttccgttcaacaagcttccacaatgaacacaaagctcgggtcctttactgtcccacccgcggcattaccagtttttccagtggtcttcatgatgatcttagctccgacctataaccacctcctcctccctctagcgagaaaatcaacaaaaaccgaaaccggcataacccaccttcaacgcatcggaacagggctagtcctttccatagtcgcaatggcggtggcagccttagtggaaacaaaacgcaagcacgtcgttgttagttgctgctcaaacaacaactcatcttcttattcttcttcgccgcttcctataacgtttctttgggtggctattcaatatgtgtttctcggatcagccgatctattcactctagccggtatgatggagtttttcttcaccgaagctccttctaccatgcgttcccttgcaacctcgctctcatgggcgtctcttgcgatgggatattactttagctctgttctcgtctcggctgttaatttcgtaacaggcttaaaccatcacaatccatggcttttgggggagaatctaaatcagtaccatctcgagagattctactggctcatgtgtgtgcttagtgggattaatttcttgcattatctcttttgggctagtcgttatgtgtaccggtcgaaccaagggtaa

SEQ ID NO: 72982 - protein, 589 aa, Arabidopsis thaliana
  peptide (1)..(589): Ceres Seq. ID no. 4953064
  misc_feature (128)..(520): Pfam Name: POT family Pfam Description: POT family
  misc_feature (1)..(589): Homolog of NCBI NO: 15241938 NR Description: nitrate transporter NTL1 - like protein; protein
  misc_feature (32)..(589): Homolog of NCBI NO: 10177451 NR Description: nitrate transporter NTL1 [Arabidopsis thaliana]
  misc_feature (22)..(275): Homolog of NCBI NO: 25404844 NR Description: nitrate transporter (NTL1), 53025-56402 - Arabidopsis thaliana >gi|12325224|gb|AAG52554.1|AC010675_2
  misc_feature (324)..(586): Homolog of NCBI NO: 18409382 NR Description: nitrate transporter (NTL1); protein id: supported by cDNA: gi_17064753, supported by cDNA: gi_3377516 thaliana] >gi|23397158|gb|AAN31862.1| putative nitrate
  misc_feature (324)..(586): Homolog of NCBI NO: 25404844 NR Description: nitrate transporter (NTL1), 53025-56402 - Arabidopsis thaliana >gi|12325224|gb|AAG52554.1|AC010675_2
  misc_feature (32)..(275): Homolog of NCBI NO: 18409382 NR Description: nitrate transporter (NTL1); protein id: supported by cDNA: gi_17064753, supported by cDNA: gi_3377516 thaliana] >gi|23397158|gb|AAN31862.1| putative nitrate
  misc_feature (324)..(586): Homolog of NCBI NO: 17064754 NR Description: nitrate transporter (NTL1) [Arabidopsis thaliana]
  misc_feature (32)..(275): Homolog of NCBI NO: 17064754 NR Description: nitrate transporter (NTL1) [Arabidopsis thaliana]
  misc_feature (38)..(586): Homolog of NCBI NO: 22329803 NR Description: nitrate transporter, putative; protein id: supported by cDNA: gi_18175947, supported by cDNA: gi_20465362 thaliana] >gi|18175948|gb|AAL59956.1| putative nitrate
  misc_feature (38)..(586): Homolog of NCBI NO: 25403281 NR Description: protein T7N9.10 [imported] - Arabidopsis thaliana
MSTNYTAINHILHFHSPNSCFLMIMSLEFEQMDEANRLSAWNGYVDWRSRPALRGRHGGMLAASFVLVVEVLENLAFLANASNLVLYLSTKMGFSPSGAANAVTAFMGTAFFLALLGGFLADAFFTTFHIYLVSAAIEFLGLMVLTVQAHEHSTEPWSRVFLFVGLYLVALGVGGIKGSLPPHGAEQFDEETSSGRRQRSFFFNYFIFSLSCGALIAVTVVVWLEDNKGWSYGFGVSTAAILISVPVFLAGSRVYRLKVPSGSPITTLFKVLTAALYAKYKKRRTSRIVVTCHTRNDCDDSVTKQNCDGDDGFLGSFLGEVVRERESLPRPLRCTEEQVKDVKIVIKILPIFMSTIMLNCCLAQLSTFSVQQASTMNTKLGSFTVPPAALPVFPVVFMMILAPTYNHLLLPLARKSTKTETGITHLQRIGTGLVLSIVAMAVAALVETKRKHVVVSCCSNNNSSSYSSSPLPITFLWVAIQYVFLGSADLFTLAGMMEFFFTEAPSTMRSLATSLSWASLAMGYYFSSVLVSAVNFVTGLNHHNPWLLGENLNQYHLERFYWLMCVLSGINFLHYLFWASRYVYRSNQG

SEQ ID NO: 72983 - protein, 567 aa, Arabidopsis thaliana
  peptide (1)..(567): Ceres Seq. ID no. 4953065
  misc_feature (106)..(498): Pfam Name: POT family Pfam Description: POT family
  misc_feature (1)..(567): Homolog of NCBI NO: 15241938 NR Description: nitrate transporter NTL1 - like protein; protein
  misc_feature (10)..(567): Homolog of NCBI NO: 10177451 NR Description: nitrate transporter NTL1 [Arabidopsis thaliana]
  misc_feature (1)..(253): Homolog of NCBI NO: 25404844 NR Description: nitrate transporter (NTL1), 53025-56402 - Arabidopsis thaliana >gi|12325224|gb|AAG52554.1|AC010675_2
  misc_feature (302)..(564): Homolog of NCBI NO: 18409382 NR Description: nitrate transporter (NTL1); protein id: supported by cDNA: gi_17064753, supported by cDNA: gi_3377516 thaliana] >gi|23397158|gb|AAN31862.1| putative nitrate
  misc_feature (302)..(564): Homolog of NCBI NO: 25404844 NR Description: nitrate transporter (NTL1), 53025-56402 - Arabidopsis thaliana >gi|12325224|gb|AAG52554.1|AC010675_2
  misc_feature (10)..(253): Homolog of NCBI NO: 18409382 NR Description: nitrate transporter (NTL1); protein id: supported by cDNA: gi_17064753, supported by cDNA: gi_3377516 thaliana] >gi|23397158|gb|AAN31862.1| putative nitrate
  misc_feature (302)..(564): Homolog of NCBI NO: 17064754 NR Description: nitrate transporter (NTL1) [Arabidopsis thaliana]
  misc_feature (10)..(253): Homolog of NCBI NO: 17064754 NR Description: nitrate transporter (NTL1) [Arabidopsis thaliana]
  misc_feature (16)..(564): Homolog of NCBI NO: 22329803 NR Description: nitrate transporter, putative; protein id: supported by cDNA: gi_18175947, supported by cDNA: gi_20465362 thaliana] >gi|18175948|gb|AAL59956.1| putative nitrate
  misc_feature (16)..(564): Homolog of NCBI NO: 25403281 NR Description: protein T7N9.10 [imported] - Arabidopsis thaliana
MIMSLEFEQMDEANRLSAWNGYVDWRSRPALRGRHGGMLAASFVLVVEVLENLAFLANASNLVLYLSTKMGFSPSGAANAVTAFMGTAFFLALLGGFLADAFFTTFHIYLVSAAIEFLGLMVLTVQAHEHSTEPWSRVFLFVGLYLVALGVGGIKGSLPPHGAEQFDEETSSGRRQRSFFFNYFIFSLSCGALIAVTVVVWLEDNKGWSYGFGVSTAAILISVPVFLAGSRVYRLKVPSGSPITTLFKVLTAALYAKYKKRRTSRIVVTCHTRNDCDDSVTKQNCDGDDGFLGSFLGEVVRERESLPRPLRCTEEQVKDVKIVIKILPIFMSTIMLNCCLAQLSTFSVQQASTMNTKLGSFTVPPAALPVFPVVFMMILAPTYNHLLLPLARKSTKTETGITHLQRIGTGLVLSIVAMAVAALVETKRKHVVVSCCSNNNSSSYSSSPLPITFLWVAIQYVFLGSADLFTLAGMMEFFFTEAPSTMRSLATSLSWASLAMGYYFSSVLVSAVNFVTGLNHHNPWLLGENLNQYHLERFYWLMCVLSGINFLHYLFWASRYVYRSNQG

SEQ ID NO: 72984 - protein, 565 aa, Arabidopsis thaliana
  peptide (1)..(565): Ceres Seq. ID no. 4953066
  misc_feature (104)..(496): Pfam Name: POT family Pfam Description: POT family
  misc_feature (1)..(565): Homolog of NCBI NO: 15241938 NR Description: nitrate transporter NTL1 - like protein; protein
  misc_feature (8)..(565): Homolog of NCBI NO: 10177451 NR Description: nitrate transporter NTL1 [Arabidopsis thaliana]
  misc_feature (1)..(251): Homolog of NCBI NO: 25404844 NR Description: nitrate transporter (NTL1), 53025-56402 - Arabidopsis thaliana >gi|12325224|gb|AAG52554.1|AC010675_2
  misc_feature (300)..(562): Homolog of NCBI NO: 18409382 NR Description: nitrate transporter (NTL1); protein id: supported by cDNA: gi_17064753, supported by cDNA: gi_3377516 thaliana] >gi|23397158|gb|AAN31862.1| putative nitrate
  misc_feature (300)..(562): Homolog of NCBI NO: 25404844 NR Description: nitrate transporter (NTL1), 53025-56402 - Arabidopsis thaliana >gi|12325224|gb|AAG52554.1|AC010675_2
  misc_feature (8)..(251): Homolog of NCBI NO: 18409382 NR Description: nitrate transporter (NTL1); protein id: supported by cDNA: gi_17064753, supported by cDNA: gi_3377516 thaliana] >gi|23397158|gb|AAN31862.1| putative nitrate
  misc_feature (300)..(562): Homolog of NCBI NO: 17064754 NR Description: nitrate transporter (NTL1) [Arabidopsis thaliana]
  misc_feature (8)..(251): Homolog of NCBI NO: 17064754 NR Description: nitrate transporter (NTL1) [Arabidopsis thaliana]
  misc_feature (14)..(562): Homolog of NCBI NO: 22329803 NR Description: nitrate transporter, putative; protein id: supported by cDNA: gi_18175947, supported by cDNA: gi_20465362 thaliana] >gi|18175948|gb|AAL59956.1| putative nitrate
  misc_feature (14)..(562): Homolog of NCBI NO: 25403281 NR Description: protein T7N9.10 [imported] - Arabidopsis thaliana
MSLEFEQMDEANRLSAWNGYVDWRSRPALRGRHGGMLAASFVLVVEVLENLAFLANASNLVLYLSTKMGFSPSGAANAVTAFMGTAFFLALLGGFLADAFFTTFHIYLVSAAIEFLGLMVLTVQAHEHSTEPWSRVFLFVGLYLVALGVGGIKGSLPPHGAEQFDEETSSGRRQRSFFFNYFIFSLSCGALIAVTVVVWLEDNKGWSYGFGVSTAAILISVPVFLAGSRVYRLKVPSGSPITTLFKVLTAALYAKYKKRRTSRIVVTCHTRNDCDDSVTKQNCDGDDGFLGSFLGEVVRERESLPRPLRCTEEQVKDVKIVIKILPIFMSTIMLNCCLAQLSTFSVQQASTMNTKLGSFTVPPAALPVFPVVFMMILAPTYNHLLLPLARKSTKTETGITHLQRIGTGLVLSIVAMAVAALVETKRKHVVVSCCSNNNSSSYSSSPLPITFLWVAIQYVFLGSADLFTLAGMMEFFFTEAPSTMRSLATSLSWASLAMGYYFSSVLVSAVNFVTGLNHHNPWLLGENLNQYHLERFYWLMCVLSGINFLHYLFWASRYVYRSNQG

SEQ ID NO: 72985 - DNA, 993 bp, Arabidopsis thaliana
  misc_feature (1)..(993): Ceres Seq. ID no. 4953277
  misc_feature: MA Experiment ID: 20000169 Result: Down-regulated in Transcription
  misc_feature: MA Experiment 20000169 PARAMETER Experiment Name: At_100uM_ABA_P Parameter: Age (day) Value: 14
  misc_feature: MA Experiment 20000169 PARAMETER Experiment Name: At_100uM_ABA_P Parameter: Organism Value: A. thaliana
  misc_feature: MA Experiment 20000169 PARAMETER Experiment Name: At_100uM_ABA_P Parameter: Plant Line Value: WS
  misc_feature: MA Experiment 20000169 PARAMETER Experiment Name: At_100uM_ABA_P Parameter: Timepoint (hr) Value: 6
  misc_feature: MA Experiment 20000169 PARAMETER Experiment Name: At_100uM_ABA_P Parameter: Tissue Value: Aerial
  misc_feature: MA Experiment 20000169 PARAMETER Experiment Name: At_100uM_ABA_P Parameter: Treatment Value: 100uM ABA vs. No Treatment
  misc_feature: MA Experiment ID: 20000173 Result: Down-regulated in Transcription
  misc_feature: MA Experiment 20000173 PARAMETER Experiment Name: At_42deg_Heat_P Parameter: Age (day) Value: 14
  misc_feature: MA Experiment 20000173 PARAMETER Experiment Name: At_42deg_Heat_P Parameter: Organism Value: A. thaliana
  misc_feature: MA Experiment 20000173 PARAMETER Experiment Name: At_42deg_Heat_P Parameter: Plant Line Value: WS
  misc_feature: MA Experiment 20000173 PARAMETER Experiment Name: At_42deg_Heat_P Parameter: Temperature (deg C) Value: 42 vs. 22
  misc_feature: MA Experiment 20000173 PARAMETER Experiment Name: At_42deg_Heat_P Parameter: Timepoint (hr) Value: 6
  misc_feature: MA Experiment 20000173 PARAMETER Experiment Name: At_42deg_Heat_P Parameter: Tissue Value: Aerial
  misc_feature: MA Experiment ID: 20000182 Result: Down-regulated in Transcription
  misc_feature: MA Experiment 20000182 PARAMETER Experiment Name: At_2mM_SA_P Parameter: Age (day) Value: 14
  misc_feature: MA Experiment 20000182 PARAMETER Experiment Name: At_2mM_SA_P Parameter: Organism Value: A. thaliana
  misc_feature: MA Experiment 20000182 PARAMETER Experiment Name: At_2mM_SA_P Parameter: Plant Line Value: WS
  misc_feature: MA Experiment 20000182 PARAMETER Experiment Name: At_2mM_SA_P Parameter: Timepoint (hr) Value: 6
  misc_feature: MA Experiment 20000182 PARAMETER Experiment Name: At_2mM_SA_P Parameter: Tissue Value: Aerial
  misc_feature: MA Experiment 20000182 PARAMETER Experiment Name: At_2mM_SA_P Parameter: Treatment Value: 2mM SA vs. No Treatment
  misc_feature: MA Experiment ID: 20000184 Result: Down-regulated in Transcription
  misc_feature: MA Experiment 20000184 PARAMETER Experiment Name: At_Shoots__P Parameter: Age (day) Value: 7
  misc_feature: MA Experiment 20000184 PARAMETER Experiment Name: At_Shoots__P Parameter: Tissue Value: Shoots vs. Whole Plant
  misc_feature: MA Experiment ID: 20000185 Result: Down-regulated in Transcription
  misc_feature: MA Experiment 20000185 PARAMETER Experiment Name: At_Roots__P Parameter: Age (day) Value: 7 vs. 21
  misc_feature: MA Experiment 20000185 PARAMETER Experiment Name: At_Roots__P Parameter: Organism Value: A. thaliana
  misc_feature: MA Experiment 20000185 PARAMETER Experiment Name: At_Roots__P Parameter: Tissue Value: Roots vs. Whole Plant
  misc_feature: MA Experiment ID: 20000437 Result: Down-regulated in Transcription
  misc_feature: MA Experiment 20000437 PARAMETER Experiment Name: At_Drought_P Parameter: Age (day) Value: 8
  misc_feature: MA Experiment 20000437 PARAMETER Experiment Name: At_Drought_P Parameter: Organism Value: A. thaliana
  misc_feature: MA Experiment 20000437 PARAMETER Experiment Name: At_Drought_P Parameter: Plant Line Value: WS
  misc_feature: MA Experiment 20000437 PARAMETER Experiment Name: At_Drought_P Parameter: Timepoint (hr) Value: 24
  misc_feature: MA Experiment 20000437 PARAMETER Experiment Name: At_Drought_P Parameter: Tissue Value: Whole Plant
  misc_feature: MA Experiment 20000437 PARAMETER Experiment Name: At_Drought_P Parameter: Treatment Value: Drought vs. No Drought
  misc_feature: MA Experiment ID: 20000439 Result: Down-regulated in Transcription
  misc_feature: MA Experiment 20000439 PARAMETER Experiment Name: At_Roots__P Parameter: Age (day) Value: 14 vs. 21
  misc_feature: MA Experiment 20000439 PARAMETER Experiment Name: At_Roots__P Parameter: Organism Value: A. thaliana
  misc_feature: MA Experiment 20000439 PARAMETER Experiment Name: At_Roots__P Parameter: Tissue Value: Roots vs. Whole Plant
  misc_feature: MA Experiment ID: 20000794 Result: Down-regulated in Transcription
  misc_feature: MA Experiment 20000794 PARAMETER Experiment Name: At_Petals_P Parameter: Age (day) Value: 23-25 days
  misc_feature: MA Experiment 20000794 PARAMETER Experiment Name: At_Petals_P Parameter: Plant Line Value: WS
  misc_feature: MA Experiment 20000794 PARAMETER Experiment Name: At_Petals_P Parameter: Tissue Value: Petals vs. Whole plant
  misc_feature: MA Experiment ID: 20001247 Result: Down-regulated in Transcription
  misc_feature: MA Experiment 20001247 PARAMETER Experiment Name: At_Far-red-induction_P Parameter: Age (day) Value: 7
  misc_feature: MA Experiment 20001247 PARAMETER Experiment Name: At_Far-red-induction_P Parameter: Light Value: Far-red vs. White
  misc_feature: MA Experiment 20001247 PARAMETER Experiment Name: At_Far-red-induction_P Parameter: Organism Value: A. thaliana
  misc_feature: MA Experiment 20001247 PARAMETER Experiment Name: At_Far-red-induction_P Parameter: Plant Line Value: Columbia
  misc_feature: MA Experiment 20001247 PARAMETER Experiment Name: At_Far-red-induction_P Parameter: Timepoint (hr) Value: 1
  misc_feature: MA Experiment 20001247 PARAMETER Experiment Name: At_Far-red-induction_P Parameter: Tissue Value: Whole Plant
  misc_feature: MA Experiment ID: 20001556 Result: Up-regulated in Transcription
  misc_feature: MA Experiment 20001556 PARAMETER Experiment Name: At_Drought_Soil_Dry_P Parameter: Age (day) Value: 26
  misc_feature: MA Experiment 20001556 PARAMETER Experiment Name: At_Drought_Soil_Dry_P Parameter: Organism Value: A. thaliana
  misc_feature: MA Experiment 20001556 PARAMETER Experiment Name: At_Drought_Soil_Dry_P Parameter: Plant Line Value: WS
  misc_feature: MA Experiment 20001556 PARAMETER Experiment Name: At_Drought_Soil_Dry_P Parameter: Post Timepoint (hr) Value: None
  misc_feature: MA Experiment 20001556 PARAMETER Experiment Name: At_Drought_Soil_Dry_P Parameter: Post-Treatment Value: None
  misc_feature: MA Experiment 20001556 PARAMETER Experiment Name: At_Drought_Soil_Dry_P Parameter: Timepoint (day) Value: 12
  misc_feature: MA Experiment 20001556 PARAMETER Experiment Name: At_Drought_Soil_Dry_P Parameter: Treatment Value: Drought vs. No Drought
  misc_feature: MA Experiment ID: 20001558 Result: Up-regulated in Transcription
  misc_feature: MA Experiment 20001558 PARAMETER Experiment Name: At_Drought_Soil_Dry_P Parameter: Age (day) Value: 27
  misc_feature: MA Experiment 20001558 PARAMETER Experiment Name: At_Drought_Soil_Dry_P Parameter: Organism Value: A. thaliana
  misc_feature: MA Experiment 20001558 PARAMETER Experiment Name: At_Drought_Soil_Dry_P Parameter: Plant Line Value: WS
  misc_feature: MA Experiment 20001558 PARAMETER Experiment Name: At_Drought_Soil_Dry_P Parameter: Post Timepoint (hr) Value: 6
  misc_feature: MA Experiment 20001558 PARAMETER Experiment Name: At_Drought_Soil_Dry_P Parameter: Post-Treatment Value: Re-Water vs. No Drought
  misc_feature: MA Experiment 20001558 PARAMETER Experiment Name: At_Drought_Soil_Dry_P Parameter: Timepoint (day) Value: 13
  misc_feature: MA Experiment 20001558 PARAMETER Experiment Name: At_Drought_Soil_Dry_P Parameter: Treatment Value: Drought vs. No Drought
atggagatcatgcgtccaggggtctcagaaaacactttgaaaggaaaaataagaatcacaacgcggtgcatgtggcttgacaaaggaagacttttagatgcacttcacaaagcagctcatgctgctctatcaagttgtcctgtgacatgtcccttgtctcacatggaaagaacagtctccgaagtcctgaggaagattgtaaggaagtacagtggtaaaaggcctgaagtcatcgctatagccactgagaatccaatggctgtccgagctgatgaggtcagtgcgagactgtctggtgatccaagtgttggttctggagttgcagctttaaggaaagttgttgaaggaaatgacaaaagaagtcgggcgaagaaagcaccttcacaagaagcttcccccaaagaagtagatcgcactttggaagatgatatcattgatagtgcaagactactggctgaagaagaaactgcggcatcaacatacacggaagaagttgatacgcccgttgggagttcttcagaagagtcagacgatttttggaaatcattcatcaatccatcatcgtcaccttcaccgagtgaaacagaaaatatgaataaggtagctgatacggagcctaaagcagagggtaaggaaaacagcagagacgacgatgaattagctgatgcttcagattctgaaaccaagtcatcaccaaaacgtgtgaggaagaacaaatggaaaccggaggagataaagaaggtaatcagaatgcgaggagagctgcacagtagatttcaagtggtgaaaggtagaatggcattgtgggaagagatctcttcaaatctatcagctgaaggaatcaatcgaagcccgggacaatgcaaatctctctgggcatcacttattcagaaatacgaggagagcaaggctgatgagagaagcaagacgagttggccacattttgaggatatgaacaacattttgtcagagctaggcacacctgcgtcttaa

SEQ ID NO: 72986 - protein, 330 aa, Arabidopsis thaliana
  peptide (1)..(330): Ceres Seq. ID no. 4953278
  misc_feature (240)..(296): Pfam Name: Myb-like DNA-binding domain Pfam Description: Myb-like DNA-binding domain
  misc_feature (1)..(330): Homolog of NCBI NO: 15242756 NR Description: putative protein; protein id: At5g63430.1 thaliana] >gi|9758284|dbj|BAB08808.1|
  misc_feature (1)..(330): Homolog of NCBI NO: 28393617 NR Description: unknown protein [Arabidopsis thaliana]
  misc_feature (230)..(323): Homolog of NCBI NO: 15224473 NR Description: putative GT-1-like transcription factor; protein At2g38250.1, supported by cDNA: gi_17981039 [Arabidopsis
  misc_feature (230)..(323): Homolog of NCBI NO: 30060337 NR Description: transcription factor GT-3b [Arabidopsis thaliana]
  misc_feature (187)..(311): Homolog of NCBI NO: 15230958 NR Description: putative DNA-binding protein, GT-1; protein id:
MEIMRPGVSENTLKGKIRITTRCMWLDKGRLLDALHKAAHAALSSCPVTCPLSHMERTVSEVLRKIVRKYSGKRPEVIAIATENPMAVRADEVSARLSGDPSVGSGVAALRKVVEGNDKRSRAKKAPSQEASPKEVDRTLEDDIIDSARLLAEEETAASTYTEEVDTPVGSSSEESDDFWKSFINPSSSPSPSETENMNKVADTEPKAEGKENSRDDDELADASDSETKSSPKRVRKNKWKPEEIKKVIRMRGELHSRFQVVKGRMALWEEISSNLSAEGINRSPGQCKSLWASLIQKYEESKADERSKTSWPHFEDMNNILSELGTPAS

SEQ ID NO: 72987 - protein, 327 aa, Arabidopsis thaliana
  peptide (1)..(327): Ceres Seq. ID no. 4953279
  misc_feature (237)..(293): Pfam Name: Myb-like DNA-binding domain Pfam Description: Myb-like DNA-binding domain
  misc_feature (1)..(327): Homolog of NCBI NO: 15242756 NR Description: putative protein; protein id: At5g63430.1 thaliana] >gi|9758284|dbj|BAB08808.1|
  misc_feature (1)..(327): Homolog of NCBI NO: 28393617 NR Description: unknown protein [Arabidopsis thaliana]
  misc_feature (227)..(320): Homolog of NCBI NO: 15224473 NR Description: putative GT-1-like transcription factor; protein At2g38250.1, supported by cDNA: gi_17981039 [Arabidopsis
  misc_feature (227)..(320): Homolog of NCBI NO: 30060337 NR Description: transcription factor GT-3b [Arabidopsis thaliana]
  misc_feature (184)..(308): Homolog of NCBI NO: 15230958 NR Description: putative DNA-binding protein, GT-1; protein id:
MRPGVSENTLKGKIRITTRCMWLDKGRLLDALHKAAHAALSSCPVTCPLSHMERTVSEVLRKIVRKYSGKRPEVIAIATENPMAVRADEVSARLSGDPSVGSGVAALRKVVEGNDKRSRAKKAPSQEASPKEVDRTLEDDIIDSARLLAEEETAASTYTEEVDTPVGSSSEESDDFWKSFINPSSSPSPSETENMNKVADTEPKAEGKENSRDDDELADASDSETKSSPKRVRKNKWKPEEIKKVIRMRGELHSRFQVVKGRMALWEEISSNLSAEGINRSPGQCKSLWASLIQKYEESKADERSKTSWPHFEDMNNILSELGTPAS

SEQ ID NO: 72988 - protein, 307 aa, Arabidopsis thaliana
  peptide (1)..(307): Ceres Seq. ID no. 4953280
  misc_feature (217)..(273): Pfam Name: Myb-like DNA-binding domain Pfam Description: Myb-like DNA-binding domain
  misc_feature (1)..(307): Homolog of NCBI NO: 15242756 NR Description: putative protein; protein id: At5g63430.1 thaliana] >gi|9758284|dbj|BAB08808.1|
  misc_feature (1)..(307): Homolog of NCBI NO: 28393617 NR Description: unknown protein [Arabidopsis thaliana]
  misc_feature (207)..(300): Homolog of NCBI NO: 15224473 NR Description: putative GT-1-like transcription factor; protein At2g38250.1, supported by cDNA: gi_17981039 [Arabidopsis
  misc_feature (207)..(300): Homolog of NCBI NO: 30060337 NR Description: transcription factor GT-3b [Arabidopsis thaliana]
  misc_feature (164)..(288): Homolog of NCBI NO: 15230958 NR Description: putative DNA-binding protein, GT-1; protein id:
MWLDKGRLLDALHKAAHAALSSCPVTCPLSHMERTVSEVLRKIVRKYSGKRPEVIAIATENPMAVRADEVSARLSGDPSVGSGVAALRKVVEGNDKRSRAKKAPSQEASPKEVDRTLEDDIIDSARLLAEEETAASTYTEEVDTPVGSSSEESDDFWKSFINPSSSPSPSETENMNKVADTEPKAEGKENSRDDDELADASDSETKSSPKRVRKNKWKPEEIKKVIRMRGELHSRFQVVKGRMALWEEISSNLSAEGINRSPGQCKSLWASLIQKYEESKADERSKTSWPHFEDMNNILSELGTPAS

SEQ ID NO: 72989 - DNA, 1032 bp, Arabidopsis thaliana
  misc_feature (1)..(1032): Ceres Seq. ID no. 4953346
  misc_feature: MA Experiment ID: 20000180 Result: Down-regulated in Transcription
  misc_feature: MA Experiment 20000180 PARAMETER Experiment Name: At_Germinating_Seeds_P Parameter: Age (hr) Value: 24 vs. 0
  misc_feature: MA Experiment 20000180 PARAMETER Experiment Name: At_Germinating_Seeds_P Parameter: Tissue Value: Germinating Seeds
  misc_feature: MA Experiment ID: 20000438 Result: Down-regulated in Transcription
  misc_feature: MA Experiment 20000438 PARAMETER Experiment Name: At_Shoots__P Parameter: Age (day) Value: 14
  misc_feature: MA Experiment 20000438 PARAMETER Experiment Name: At_Shoots__P Parameter: Tissue Value: Shoots vs. Whole Plant
  misc_feature: MA Experiment ID: 20001248 Result: Up-regulated in Transcription
  misc_feature: MA Experiment 20001248 PARAMETER Experiment Name: At_Far-red-induction_P Parameter: Age (day) Value: 7
  misc_feature: MA Experiment 20001248 PARAMETER Experiment Name: At_Far-red-induction_P Parameter: Light Value: Far-red vs. White
  misc_feature: MA Experiment 20001248 PARAMETER Experiment Name: At_Far-red-induction_P Parameter: Organism Value: A. thaliana
  misc_feature: MA Experiment 20001248 PARAMETER Experiment Name: At_Far-red-induction_P Parameter: Plant Line Value: Columbia
  misc_feature: MA Experiment 20001248 PARAMETER Experiment Name: At_Far-red-induction_P Parameter: Timepoint (hr) Value: 4
  misc_feature: MA Experiment 20001248 PARAMETER Experiment Name: At_Far-red-induction_P Parameter: Tissue Value: Whole Plant
  misc_feature: MA Experiment ID: 20001458 Result: Up-regulated in Transcription
  misc_feature: MA Experiment 20001458 PARAMETER Experiment Name: At_50mM_NH4NO3_L-to-H_P Parameter: Age (day) Value: Undefined
  misc_feature: MA Experiment 20001458 PARAMETER Experiment Name: At_50mM_NH4NO3_L-to-H_P Parameter: Organism Value: Undefined
  misc_feature: MA Experiment 20001458 PARAMETER Experiment Name: At_50mM_NH4NO3_L-to-H_P Parameter: Plant Line Value: Undefined
  misc_feature: MA Experiment 20001458 PARAMETER Experiment Name: At_50mM_NH4NO3_L-to-H_P Parameter: Timepoint (hr) Value: 2
  misc_feature: MA Experiment 20001458 PARAMETER Experiment Name: At_50mM_NH4NO3_L-to-H_P Parameter: Tissue Value: Siliques
  misc_feature: MA Experiment 20001458 PARAMETER Experiment Name: At_50mM_NH4NO3_L-to-H_P Parameter: Treatment Value: 50mM NH4NO3 vs. 100mM Manitol
  misc_feature: MA Experiment ID: 20001557 Result: Up-regulated in Transcription
  misc_feature: MA Experiment 20001557 PARAMETER Experiment Name: At_Drought_Soil_Dry_P Parameter: Age (day) Value: 27
  misc_feature: MA Experiment 20001557 PARAMETER Experiment Name: At_Drought_Soil_Dry_P Parameter: Organism Value: A. thaliana
  misc_feature: MA Experiment 20001557 PARAMETER Experiment Name: At_Drought_Soil_Dry_P Parameter: Plant Line Value: WS
  misc_feature: MA Experiment 20001557 PARAMETER Experiment Name: At_Drought_Soil_Dry_P Parameter: Post Timepoint (hr) Value: 3
  misc_feature: MA Experiment 20001557 PARAMETER Experiment Name: At_Drought_Soil_Dry_P Parameter: Post-Treatment Value: Re-Water vs. No Drought
  misc_feature: MA Experiment 20001557 PARAMETER Experiment Name: At_Drought_Soil_Dry_P Parameter: Timepoint (day) Value: 13
  misc_feature: MA Experiment 20001557 PARAMETER Experiment Name: At_Drought_Soil_Dry_P Parameter: Treatment Value: Drought vs. No Drought
atgagagataatgtaaacgatgaattgaagcaagttcgatctgatgatcaaacgaaaaggaagatgctcgaaattttgaaaaggtttcacgaagaagaagaggaagatgatgggggaattgatagcatcacggatgatgaaggtttgagcttaccggaggagattattcagaagataatgaacggagatgaagtgagtcttgatgatttgagcttagaagagagaaaaggattccaaagagccttagcttctggagaattaagcaaaatgatccaaccatgggatccttggtggttacttgcttcagctcgaacgatcaatcttggactcggaggtacacaacttgttcaatgcgttgaagacgaagaagagaccacagttgtgagtgaaatcccacgagggcctgatacacctttgatctcactaagcaagcttacctccacgaatccatctcctctcttaccaatccatttgattgacattgcatatagttattgctttacgctccgtatctataatggagagtggcaatctgattcgcttggtgcagcaacaatggtgttgactgtttcatcagttttgggtcacaatggacaaccagagaccataaaggaagtgttgtccttttgcttggaacagacatgctcttcagcttataaaaaccttggtggtggtctgaagttcggattgaatctggtggatgatgtgatttgttttctttctcttggctctggagctatggtatgtctgctcggtgatctccaaaggttgattcttggtgcaataaaggaagtaaaatcatcatcagggcgtgatctgaagaagaaactaaagcttgcagagaggaaagtgttctacatgatgtgttgggtcaatgagcagaattctgaagtatgggaagctctggaaccatctgtaagggcagagaagaactcggtggttgagctcaacgattacagagggtttccagaaatgaagaagaaagatcaatttcgaaaaggtggtggcgtggtgattgaggagatagaatga

SEQ ID NO: 72990 - protein, 343 aa, Arabidopsis thaliana
  peptide (1)..(343): Ceres Seq. ID no. 4953347
  misc_feature (1)..(343): Homolog of NCBI NO: 15237537 NR Description: unknown protein; protein id: At5g63830.1 thaliana] >gi|10177671|dbj|BAB11031.1| gene_id:MGI19.3~unknown
  misc_feature (224)..(342): Homolog of NCBI NO: 37536148 NR Description: hypothetical protein [Oryza sativa (japonica group)] >gi|10122047|gb|AAG13436.1| hypothetical protein [Oryza
MRDNVNDELKQVRSDDQTKRKMLEILKRFHEEEEEDDGGIDSITDDEGLSLPEEIIQKIMNGDEVSLDDLSLEERKGFQRALASGELSKMIQPWDPWWLLASARTINLGLGGTQLVQCVEDEEETTVVSEIPRGPDTPLISLSKLTSTNPSPLLPIHLIDIAYSYCFTLRIYNGEWQSDSLGAATMVLTVSSVLGHNGQPETIKEVLSFCLEQTCSSAYKNLGGGLKFGLNLVDDVICFLSLGSGAMVCLLGDLQRLILGAIKEVKSSSGRDLKKKLKLAERKVFYMMCWVNEQNSEVWEALEPSVRAEKNSVVELNDYRGFPEMKKKDQFRKGGGVVIEEIE

SEQ ID NO: 72991 - protein, 322 aa, Arabidopsis thaliana
  peptide (1)..(322): Ceres Seq. ID no. 4953348
  misc_feature (1)..(322): Homolog of NCBI NO: 15237537 NR Description: unknown protein; protein id: At5g63830.1 thaliana] >gi|10177671|dbj|BAB11031.1| gene_id:MGI19.3~unknown
  misc_feature (203)..(321): Homolog of NCBI NO: 37536148 NR Description: hypothetical protein [Oryza sativa (japonica group)] >gi|10122047|gb|AAG13436.1| hypothetical protein [Oryza
MLEILKRFHEEEEEDDGGIDSITDDEGLSLPEEIIQKIMNGDEVSLDDLSLEERKGFQRALASGELSKMIQPWDPWWLLASARTINLGLGGTQLVQCVEDEEETTVVSEIPRGPDTPLISLSKLTSTNPSPLLPIHLIDIAYSYCFTLRIYNGEWQSDSLGAATMVLTVSSVLGHNGQPETIKEVLSFCLEQTCSSAYKNLGGGLKFGLNLVDDVICFLSLGSGAMVCLLGDLQRLILGAIKEVKSSSGRDLKKKLKLAERKVFYMMCWVNEQNSEVWEALEPSVRAEKNSVVELNDYRGFPEMKKKDQFRKGGGVVIEEIE

SEQ ID NO: 72992 - protein, 284 aa, Arabidopsis thaliana
  peptide (1)..(284): Ceres Seq. ID no. 4953349
  misc_feature (1)..(284): Homolog of NCBI NO: 15237537 NR Description: unknown protein; protein id: At5g63830.1 thaliana] >gi|10177671|dbj|BAB11031.1| gene_id:MGI19.3~unknown
  misc_feature (165)..(283): Homolog of NCBI NO: 37536148 NR Description: hypothetical protein [Oryza sativa (japonica group)] >gi|10122047|gb|AAG13436.1| hypothetical protein [Oryza
MNGDEVSLDDLSLEERKGFQRALASGELSKMIQPWDPWWLLASARTINLGLGGTQLVQCVEDEEETTVVSEIPRGPDTPLISLSKLTSTNPSPLLPIHLIDIAYSYCFTLRIYNGEWQSDSLGAATMVLTVSSVLGHNGQPETIKEVLSFCLEQTCSSAYKNLGGGLKFGLNLVDDVICFLSLGSGAMVCLLGDLQRLILGAIKEVKSSSGRDLKKKLKLAERKVFYMMCWVNEQNSEVWEALEPSVRAEKNSVVELNDYRGFPEMKKKDQFRKGGGVVIEEIE

SEQ ID NO: 72993 - DNA, 1221 bp, Arabidopsis thaliana
  misc_feature (1)..(1221): Ceres Seq. ID no. 4953444
  misc_feature: MA Experiment ID: 20000180 Result: Down-regulated in Transcription
  misc_feature: MA Experiment 20000180 PARAMETER Experiment Name: At_Germinating_Seeds_P Parameter: Age (hr) Value: 24 vs. 0
  misc_feature: MA Experiment 20000180 PARAMETER Experiment Name: At_Germinating_Seeds_P Parameter: Tissue Value: Germinating Seeds
  misc_feature: MA Experiment ID: 20000438 Result: Down-regulated in Transcription
  misc_feature: MA Experiment 20000438 PARAMETER Experiment Name: At_Shoots__P Parameter: Age (day) Value: 14
  misc_feature: MA Experiment 20000438 PARAMETER Experiment Name: At_Shoots__P Parameter: Tissue Value: Shoots vs. Whole Plant
  misc_feature: MA Experiment ID: 20001248 Result: Up-regulated in Transcription
  misc_feature: MA Experiment 20001248 PARAMETER Experiment Name: At_Far-red-induction_P Parameter: Age (day) Value: 7
  misc_feature: MA Experiment 20001248 PARAMETER Experiment Name: At_Far-red-induction_P Parameter: Light Value: Far-red vs. White
  misc_feature: MA Experiment 20001248 PARAMETER Experiment Name: At_Far-red-induction_P Parameter: Organism Value: A. thaliana
  misc_feature: MA Experiment 20001248 PARAMETER Experiment Name: At_Far-red-induction_P Parameter: Plant Line Value: Columbia
  misc_feature: MA Experiment 20001248 PARAMETER Experiment Name: At_Far-red-induction_P Parameter: Timepoint (hr) Value: 4
  misc_feature: MA Experiment 20001248 PARAMETER Experiment Name: At_Far-red-induction_P Parameter: Tissue Value: Whole Plant
  misc_feature: MA Experiment ID: 20001458 Result: Up-regulated in Transcription
  misc_feature: MA Experiment 20001458 PARAMETER Experiment Name: At_50mM_NH4NO3_L-to-H_P Parameter: Age (day) Value: Undefined
  misc_feature: MA Experiment 20001458 PARAMETER Experiment Name: At_50mM_NH4NO3_L-to-H_P Parameter: Organism Value: Undefined
  misc_feature: MA Experiment 20001458 PARAMETER Experiment Name: At_50mM_NH4NO3_L-to-H_P Parameter: Plant Line Value: Undefined
  misc_feature: MA Experiment 20001458 PARAMETER Experiment Name: At_50mM_NH4NO3_L-to-H_P Parameter: Timepoint (hr) Value: 2
  misc_feature: MA Experiment 20001458 PARAMETER Experiment Name: At_50mM_NH4NO3_L-to-H_P Parameter: Tissue Value: Siliques
  misc_feature: MA Experiment 20001458 PARAMETER Experiment Name: At_50mM_NH4NO3_L-to-H_P Parameter: Treatment Value: 50mM NH4NO3 vs. 100mM Manitol
  misc_feature: MA Experiment ID: 20001557 Result: Up-regulated in Transcription
  misc_feature: MA Experiment 20001557 PARAMETER Experiment Name: At_Drought_Soil_Dry_P Parameter: Age (day) Value: 27
  misc_feature: MA Experiment 20001557 PARAMETER Experiment Name: At_Drought_Soil_Dry_P Parameter: Organism Value: A. thaliana
  misc_feature: MA Experiment 20001557 PARAMETER Experiment Name: At_Drought_Soil_Dry_P Parameter: Plant Line Value: WS
  misc_feature: MA Experiment 20001557 PARAMETER Experiment Name: At_Drought_Soil_Dry_P Parameter: Post Timepoint (hr) Value: 3
  misc_feature: MA Experiment 20001557 PARAMETER Experiment Name: At_Drought_Soil_Dry_P Parameter: Post-Treatment Value: Re-Water vs. No Drought
  misc_feature: MA Experiment 20001557 PARAMETER Experiment Name: At_Drought_Soil_Dry_P Parameter: Timepoint (day) Value: 13
  misc_feature: MA Experiment 20001557 PARAMETER Experiment Name: At_Drought_Soil_Dry_P Parameter: Treatment Value: Drought vs. No Drought
atgatgccggagaagacgattatttcgtcggagagttcaaattcgtctccgttaaacccttcttctacgcggattatctgccatgtatgtaataagcagttctcgcagtacacttgtcctcgctgcaacttccggtactgttcccttccttgttacaaatctcacagtgtccaatgtactgaatcattcatgagagataatgtaaacgatgaattgaagcaagttcgatctgatgatcaaacgaaaaggaagatgctcgaaattttgaaaaggtttcacgaagaagaagaggaagatgatgggggaattgatagcatcacggatgatgaaggtttgagcttaccggaggagattattcagaagataatgaacggagatgaagtgagtcttgatgatttgagcttagaagagagaaaaggattccaaagagccttagcttctggagaattaagcaaaatgatccaaccatgggatccttggtggttacttgcttcagctcgaacgatcaatcttggactcggaggtacacaacttgttcaatgcgttgaagacgaagaagagaccacagttgtgagtgaaatcccacgagggcctgatacacctttgatctcactaagcaagcttacctccacgaatccatctcctctcttaccaatccatttgattgacattgcatatagttattgctttacgctccgtatctataatggagagtggcaatctgattcgcttggtgcagcaacaatggtgttgactgtttcatcagttttgggtcacaatggacaaccagagaccataaaggaagtgttgtccttttgcttggaacagacatgctcttcagcttataaaaaccttggtggtggtctgaagttcggattgaatctggtggatgatgtgatttgttttctttctcttggctctggagctatggtatgtctgctcggtgatctccaaaggttgattcttggtgcaataaaggaagtaaaatcatcatcagggcgtgatctgaagaagaaactaaagcttgcagagaggaaagtgttctacatgatgtgttgggtcaatgagcagaattctgaagtatgggaagctctggaaccatctgtaagggcagagaagaactcggtggttgagctcaacgattacagagggtttccagaaatgaagaagaaagatcaatttcgaaaaggtggtggcgtggtgattgaggagatagaatga

SEQ ID NO: 72994 - protein, 406 aa, Arabidopsis thaliana
  peptide (1)..(406): Ceres Seq. ID no. 4953445
  misc_feature (23)..(53): Pfam Name: HIT zinc finger Pfam Description: HIT zinc finger
  misc_feature (1)..(406): Homolog of NCBI NO: 15237537 NR Description: unknown protein; protein id: At5g63830.1 thaliana] >gi|10177671|dbj|BAB11031.1| gene_id:MGI19.3~unknown
  misc_feature (287)..(405): Homolog of NCBI NO: 37536148 NR Description: hypothetical protein [Oryza sativa (japonica group)] >gi|10122047|gb|AAG13436.1| hypothetical protein [Oryza
  misc_feature (1)..(85): Homolog of NCBI NO: 37536148 NR Description: hypothetical protein [Oryza sativa (japonica group)] >gi|10122047|gb|AAG13436.1| hypothetical protein [Oryza
  misc_feature (18)..(377): Homolog of NCBI NO: 7656936 NR Description: chromosome 11 open reading frame 5 [Homo sapiens] Protein C11orf5 (Protein FON)
  misc_feature (35)..(377): Homolog of NCBI NO: 18044459 NR Description: open reading frame 6 [Mus musculus]
  misc_feature (35)..(377): Homolog of NCBI NO: 7305357 NR Description: open reading frame 6; Chromosome 11 open reading homolog (Protein FON) >gi|6684461|gb|AAF23592.1|AF119498_1
  misc_feature (35)..(377): Homolog of NCBI NO: 26352237 NR Description: unnamed protein product [Mus musculus]
  misc_feature (18)..(161): Homolog of NCBI NO: 27469505 NR Description: Similar to chromosome 11 open reading frame 5
  misc_feature (27)..(134): Homolog of NCBI NO: 31242905 NR Description: ENSANGP00000013952 [Anopheles gambiae]
  misc_feature (35)..(161): Homolog of NCBI NO: 34861831 NR Description: similar to Protein C11orf5 homolog (Protein FON)
MMPEKTIISSESSNSSPLNPSSTRIICHVCNKQFSQYTCPRCNFRYCSLPCYKSHSVQCTESFMRDNVNDELKQVRSDDQTKRKMLEILKRFHEEEEEDDGGIDSITDDEGLSLPEEIIQKIMNGDEVSLDDLSLEERKGFQRALASGELSKMIQPWDPWWLLASARTINLGLGGTQLVQCVEDEEETTVVSEIPRGPDTPLISLSKLTSTNPSPLLPIHLIDIAYSYCFTLRIYNGEWQSDSLGAATMVLTVSSVLGHNGQPETIKEVLSFCLEQTCSSAYKNLGGGLKFGLNLVDDVICFLSLGSGAMVCLLGDLQRLILGAIKEVKSSSGRDLKKKLKLAERKVFYMMCWVNEQNSEVWEALEPSVRAEKNSVVELNDYRGFPEMKKKDQFRKGGGVVIEEIE

SEQ ID NO: 72995 - protein, 405 aa, Arabidopsis thaliana
  peptide (1)..(405): Ceres Seq. ID no. 4953446
  misc_feature (22)..(52): Pfam Name: HIT zinc finger Pfam Description: HIT zinc finger
  misc_feature (1)..(405): Homolog of NCBI NO: 15237537 NR Description: unknown protein; protein id: At5g63830.1 thaliana] >gi|10177671|dbj|BAB11031.1| gene_id:MGI19.3~unknown
  misc_feature (286)..(404): Homolog of NCBI NO: 37536148 NR Description: hypothetical protein [Oryza sativa (japonica group)] >gi|10122047|gb|AAG13436.1| hypothetical protein [Oryza
  misc_feature (1)..(84): Homolog of NCBI NO: 37536148 NR Description: hypothetical protein [Oryza sativa (japonica group)] >gi|10122047|gb|AAG13436.1| hypothetical protein [Oryza
  misc_feature (17)..(376): Homolog of NCBI NO: 7656936 NR Description: chromosome 11 open reading frame 5 [Homo sapiens] Protein C11orf5 (Protein FON)
  misc_feature (34)..(376): Homolog of NCBI NO: 18044459 NR Description: open reading frame 6 [Mus musculus]
  misc_feature (34)..(376): Homolog of NCBI NO: 7305357 NR Description: open reading frame 6; Chromosome 11 open reading homolog (Protein FON) >gi|6684461|gb|AAF23592.1|AF119498_1
  misc_feature (34)..(376): Homolog of NCBI NO: 26352237 NR Description: unnamed protein product [Mus musculus]
  misc_feature (17)..(160): Homolog of NCBI NO: 27469505 NR Description: Similar to chromosome 11 open reading frame 5
  misc_feature (26)..(133): Homolog of NCBI NO: 31242905 NR Description: ENSANGP00000013952 [Anopheles gambiae]
  misc_feature (34)..(160): Homolog of NCBI NO: 34861831 NR Description: similar to Protein C11orf5 homolog (Protein FON)
MPEKTIISSESSNSSPLNPSSTRIICHVCNKQFSQYTCPRCNFRYCSLPCYKSHSVQCTESFMRDNVNDELKQVRSDDQTKRKMLEILKRFHEEEEEDDGGIDSITDDEGLSLPEEIIQKIMNGDEVSLDDLSLEERKGFQRALASGELSKMIQPWDPWWLLASARTINLGLGGTQLVQCVEDEEETTVVSEIPRGPDTPLISLSKLTSTNPSPLLPIHLIDIAYSYCFTLRIYNGEWQSDSLGAATMVLTVSSVLGHNGQPETIKEVLSFCLEQTCSSAYKNLGGGLKFGLNLVDDVICFLSLGSGAMVCLLGDLQRLILGAIKEVKSSSGRDLKKKLKLAERKVFYMMCWVNEQNSEVWEALEPSVRAEKNSVVELNDYRGFPEMKKKDQFRKGGGVVIEEIE

SEQ ID NO: 72996 - protein, 343 aa, Arabidopsis thaliana; identical to SEQ ID NO: 72990
  peptide (1)..(343): Ceres Seq. ID no. 4953447
  misc_feature (1)..(343): Homolog of NCBI NO: 15237537 NR Description: unknown protein; protein id: At5g63830.1 thaliana] >gi|10177671|dbj|BAB11031.1| gene_id:MGI19.3~unknown
  misc_feature (224)..(342): Homolog of NCBI NO: 37536148 NR Description: hypothetical protein [Oryza sativa (japonica group)] >gi|10122047|gb|AAG13436.1| hypothetical protein [Oryza
  misc_feature (1)..(22): Homolog of NCBI NO: 37536148 NR Description: hypothetical protein [Oryza sativa (japonica group)] >gi|10122047|gb|AAG13436.1| hypothetical protein [Oryza
  misc_feature (1)..(314): Homolog of NCBI NO: 7656936 NR Description: chromosome 11 open reading frame 5 [Homo sapiens] Protein C11orf5 (Protein FON)
  misc_feature (1)..(314): Homolog of NCBI NO: 18044459 NR Description: open reading frame 6 [Mus musculus]
  misc_feature (1)..(314): Homolog of NCBI NO: 7305357 NR Description: open reading frame 6; Chromosome 11 open reading homolog (Protein FON) >gi|6684461|gb|AAF23592.1|AF119498_1
  misc_feature (1)..(314): Homolog of NCBI NO: 26352237 NR Description: unnamed protein product [Mus musculus]
  misc_feature (1)..(98): Homolog of NCBI NO: 27469505 NR Description: Similar to chromosome 11 open reading frame 5
  misc_feature (1)..(71): Homolog of NCBI NO: 31242905 NR Description: ENSANGP00000013952 [Anopheles gambiae]
  misc_feature (1)..(98): Homolog of NCBI NO: 34861831 NR Description: similar to Protein C11orf5 homolog (Protein FON)

SEQ ID NO: 72997 - DNA, 1098 bp, Arabidopsis thaliana
  misc_feature (1)..(1098): Ceres Seq. ID no. 4953452
  misc_feature: MA Experiment ID: 20000307 Result: Up-regulated in Transcription
  misc_feature: MA Experiment 20000307 PARAMETER Experiment Name: At_Germinating_Seeds_Sub_P Parameter: Age (hr) Value: 24 vs. 0
  misc_feature: MA Experiment 20000307 PARAMETER Experiment Name: At_Germinating_Seeds_Sub_P Parameter: Organism Value: A. thaliana
  misc_feature: MA Experiment 20000307 PARAMETER Experiment Name: At_Germinating_Seeds_Sub_P Parameter: Plant Line Value: WS
  misc_feature: MA Experiment 20000307 PARAMETER Experiment Name: At_Germinating_Seeds_Sub_P Parameter: Tissue Value: Germinating Seeds
  misc_feature: MA Experiment ID: 20000327 Result: Down-regulated in Transcription
  misc_feature: MA Experiment 20000327 PARAMETER Experiment Name: At_42deg_Heat_Sub_P Parameter: Age (day) Value: 14
  misc_feature: MA Experiment 20000327 PARAMETER Experiment Name: At_42deg_Heat_Sub_P Parameter: Organism Value: A. thaliana
  misc_feature: MA Experiment 20000327 PARAMETER Experiment Name: At_42deg_Heat_Sub_P Parameter: Plant Line Value: WS
  misc_feature: MA Experiment 20000327 PARAMETER Experiment Name: At_42deg_Heat_Sub_P Parameter: Temperature (deg C) Value: 42 vs. 22
  misc_feature: MA Experiment 20000327 PARAMETER Experiment Name: At_42deg_Heat_Sub_P Parameter: Timepoint (hr) Value: 1
  misc_feature: MA Experiment 20000327 PARAMETER Experiment Name: At_42deg_Heat_Sub_P Parameter: Tissue Value: Aerial
  misc_feature: MA Experiment ID: 20000328 Result: Down-regulated in Transcription
  misc_feature: MA Experiment 20000328 PARAMETER Experiment Name: At_42deg_Heat_Sub_P Parameter: Age (day) Value: 14
  misc_feature: MA Experiment 20000328 PARAMETER Experiment Name: At_42deg_Heat_Sub_P Parameter: Organism Value: A. thaliana
  misc_feature: MA Experiment 20000328 PARAMETER Experiment Name: At_42deg_Heat_Sub_P Parameter: Plant Line Value: WS
  misc_feature: MA Experiment 20000328 PARAMETER Experiment Name: At_42deg_Heat_Sub_P Parameter: Temperature (deg C) Value: 42 vs. 22
  misc_feature: MA Experiment 20000328 PARAMETER Experiment Name: At_42deg_Heat_Sub_P Parameter: Timepoint (hr) Value: 6
  misc_feature: MA Experiment 20000328 PARAMETER Experiment Name: At_42deg_Heat_Sub_P Parameter: Tissue Value: Aerial
  misc_feature: MA Experiment ID: 20000347 Result: Down-regulated in Transcription
  misc_feature: MA Experiment 20000347 PARAMETER Experiment Name: At_2mM_SA_Sub_P Parameter: Age (day) Value: 14
  misc_feature: MA Experiment 20000347 PARAMETER Experiment Name: At_2mM_SA_Sub_P Parameter: Organism Value: A. thaliana
  misc_feature: MA Experiment 20000347 PARAMETER Experiment Name: At_2mM_SA_Sub_P Parameter: Plant Line Value: WS
  misc_feature: MA Experiment 20000347 PARAMETER Experiment Name: At_2mM_SA_Sub_P Parameter: Timepoint (hr) Value: 6
  misc_feature: MA Experiment 20000347 PARAMETER Experiment Name: At_2mM_SA_Sub_P Parameter: Tissue Value: Aerial
  misc_feature: MA Experiment 20000347 PARAMETER Experiment Name: At_2mM_SA_Sub_P Parameter: Treatment Value: 2mM SA vs. No Treatment
  misc_feature: MA Experiment ID: 20001807 Result: Up-regulated in Transcription
  misc_feature: MA Experiment 20001807 PARAMETER Experiment Name: At_50mM_NH4NO3_L-to-H_Sub_P Parameter: Timepoint (hr) Value: 6
  misc_feature: MA Experiment 20001807 PARAMETER Experiment Name: At_50mM_NH4NO3_L-to-H_Sub_P Parameter: Tissue Value: Leaf
  misc_feature: MA Experiment 20001807 PARAMETER Experiment Name: At_50mM_NH4NO3_L-to-H_Sub_P Parameter: Treatment Value: 50mM NH4NO3 vs 100mM Mannitol
atgggtaaagagaatcagttggagacaacaaattgtggagtcaatgatcacgattgtccacccgtcaagaacgaggaactagcagctgaggcgcgttatagtacagacagtgactcgggtttgccaacctgtcgtgtatgccattctgcagaatccgacagacgaggagataccgccttggggtttttggggattacccctccggttccagaagctcgtaaaagcaatgtagatggaaccgctgatgatgtcagcaaagctacagagtctgagctgaagaattctgttgtcaaaagcaatggaagggaatctggcttcatcgaattaacaagtcctgatgcggaagttttcatttgcacaaatgatatagaaatgggaatccagcagcatcaggatgcattgcttgagcttggatgttcttgcaaaaacgagcttgctttggtacactacgcttgcgcgctcaagtggtttctcaaccatggatccaccgtgtgtgaaatctgtggacatcctgcagaaaatataaagactgctgatttcaacaaagtggtcattgccttgagagattacacagcaataagagaaagaactgctgatggaggagatcaaatccctgtattaccggtgaatacagattcaaccattgattcagatgaagttgctgtcattcgaaggcaacgacttagtgagataacgtcatggtttggtccccattccctgaacaacaacaacaacaacaatagttctgttgcggctatccctgaccaacctttaggtgttgtgaacttcgacatcttacctatggaaaaccgtgcaactaaatgggctgtggaaggtactgggattctacttgctacaggtttactcactgttactttggtctggctcattgcccctcgtgttggaaaggtatgccatcgatctaaccttgtatatctaagcctctctgactggtatatcgataacgtttatttggttaacggttgttttgaatttgtacagaaaactgctaggagcggacttcacatacttcttggtggtctctgtgctttaacaatagtcatcttcttcagatttgtaagtaaatctctcaagtga

SEQ ID NO: 72998 - protein, 365 aa, Arabidopsis thaliana
  peptide (1)..(365): Ceres Seq. ID no. 4953453
  misc_feature (118)..(168): Pfam Name: Zinc finger, C3HC4 type (RING finger) Pfam Description: Zinc finger, C3HC4 type (RING finger)
  misc_feature (1)..(365): Homolog of NCBI NO: 10177059 NR Description: gb|AAD32776.1~gene_id:MBK5.26~similar to unknown
  misc_feature (1)..(310): Homolog of NCBI NO: 30697894 NR Description: zinc finger (C3HC4-type RING finger) protein [Arabidopsis thaliana] >gi|27311831|gb|AAO00881.1| putative [Arabidopsis thaliana] >gi|30725586|gb|AAP37815.1| At5g63780
  misc_feature (334)..(360): Homolog of NCBI NO: 30697894 NR Description: zinc finger (C3HC4-type RING finger) protein [Arabidopsis thaliana] >gi|27311831|gb|AAO00881.1| putative [Arabidopsis thaliana] >gi|30725586|gb|AAP37815.1| At5g63780
  misc_feature (1)..(310): Homolog of NCBI NO: 18415916 NR Description: Expressed protein; protein id: At5g08750.1, by cDNA: gi_16209721 [Arabidopsis thaliana] putative protein [Arabidopsis thaliana]
  misc_feature (1)..(310): Homolog of NCBI NO: 16209722 NR Description: AT5g63780/MBK5_26 [Arabidopsis thaliana]
  misc_feature (38)..(303): Homolog of NCBI NO: 38567835 NR Description: OSJNBb0020J19.13 [Oryza sativa (japonica
  misc_feature (334)..(361): Homolog of NCBI NO: 38567835 NR Description: OSJNBb0020J19.13 [Oryza sativa (japonica
  misc_feature (81)..(200): Homolog of NCBI NO: 29725746 NR Description: hypothetical protein [Arabidopsis thaliana]
  misc_feature (89)..(200): Homolog of NCBI NO: 15224415 NR Description: unknown protein; protein id: At2g37950.1
MGKENQLETTNCGVNDHDCPPVKNEELAAEARYSTDSDSGLPTCRVCHSAESDRRGDTALGFLGITPPVPEARKSNVDGTADDVSKATESELKNSVVKSNGRESGFIELTSPDAEVFICTNDIEMGIQQHQDALLELGCSCKNELALVHYACALKWFLNHGSTVCEICGHPAENIKTADFNKVVIALRDYTAIRERTADGGDQIPVLPVNTDSTIDSDEVAVIRRQRLSEITSWFGPHSLNNNNNNNSSVAAIPDQPLGVVNFDILPMENRATKWAVEGTGILLATGLLTVTLVWLIAPRVGKVCHRSNLVYLSLSDWYIDNVYLVNGCFEFVQKTARSGLHILLGGLCALTIVIFFRFVSKSLK

SEQ ID NO: 72999 - protein, 241 aa, Arabidopsis thaliana
  peptide (1)..(241): Ceres Seq. ID no. 4953454
  misc_feature (1)..(44): Pfam Name: Zinc finger, C3HC4 type (RING finger) Pfam Description: Zinc finger, C3HC4 type (RING finger)
  misc_feature (1)..(241): Homolog of NCBI NO: 10177059 NR Description: gb|AAD32776.1~gene_id:MBK5.26~similar to unknown
  misc_feature (1)..(186): Homolog of NCBI NO: 30697894 NR Description: zinc finger (C3HC4-type RING finger) protein [Arabidopsis thaliana] >gi|27311831|gb|AAO00881.1| putative [Arabidopsis thaliana] >gi|30725586|gb|AAP37815.1| At5g63780
  misc_feature (210)..(236): Homolog of NCBI NO: 30697894 NR Description: zinc finger (C3HC4-type RING finger) protein [Arabidopsis thaliana] >gi|27311831|gb|AAO00881.1| putative [Arabidopsis thaliana] >gi|30725586|gb|AAP37815.1| At5g63780
  misc_feature (1)..(186): Homolog of NCBI NO: 18415916 NR Description: Expressed protein; protein id: At5g08750.1, by cDNA: gi_16209721 [Arabidopsis thaliana] putative protein [Arabidopsis thaliana]
  misc_feature (1)..(186): Homolog of NCBI NO: 16209722 NR Description: AT5g63780/MBK5_26 [Arabidopsis thaliana]
  misc_feature (1)..(179): Homolog of NCBI NO: 38567835 NR Description: OSJNBb0020J19.13 [Oryza sativa (japonica
  misc_feature (210)..(237): Homolog of NCBI NO: 38567835 NR Description: OSJNBb0020J19.13 [Oryza sativa (japonica
  misc_feature (1)..(76): Homolog of NCBI NO: 29725746 NR Description: hypothetical protein [Arabidopsis thaliana]
  misc_feature (1)..(76): Homolog of NCBI NO: 15224415 NR Description: unknown protein; protein id: At2g37950.1
MGIQQHQDALLELGCSCKNELALVHYACALKWFLNHGSTVCEICGHPAENIKTADFNKVVIALRDYTAIRERTADGGDQIPVLPVNTDSTIDSDEVAVIRRQRLSEITSWFGPHSLNNNNNNNSSVAAIPDQPLGVVNFDILPMENRATKWAVEGTGILLATGLLTVTLVWLIAPRVGKVCHRSNLVYLSLSDWYIDNVYLVNGCFEFVQKTARSGLHILLGGLCALTIVIFFRFVSKSLK

SEQ ID NO: 73000 - DNA, 2616 bp, Arabidopsis thaliana
  misc_feature (1)..(2616): Ceres Seq. ID no. 4953518
  misc_feature: MA Experiment ID: 20000234 Result: Up-regulated in Transcription
  misc_feature: MA Experiment 20000234 PARAMETER Experiment Name: At_Siliques_P Parameter: Age (day) Value: 21
  misc_feature: MA Experiment 20000234 PARAMETER Experiment Name: At_Siliques_P Parameter: Organism Value: A. thaliana
  misc_feature: MA Experiment 20000234 PARAMETER Experiment Name: At_Siliques_P Parameter: Plant Line Value: WS
  misc_feature: MA Experiment 20000234 PARAMETER Experiment Name: At_Siliques_P Parameter: Tissue Value: Less Than 5mm Siliques vs. Whole Plant
  misc_feature: MA Experiment ID: 20000264 Result: Up-regulated in Transcription
  misc_feature: MA Experiment 20000264 PARAMETER Experiment Name: At_Open_Flower_P Parameter: Age (day) Value: 21
  misc_feature: MA Experiment 20000264 PARAMETER Experiment Name: At_Open_Flower_P Parameter: Plant Line Value: WS
  misc_feature: MA Experiment 20000264 PARAMETER Experiment Name: At_Open_Flower_P Parameter: Tissue Value: Open Flower vs. Whole Plant
  misc_feature: MA Experiment ID: 20000265 Result: Up-regulated in Transcription
  misc_feature: MA Experiment 20000265 PARAMETER Experiment Name: At_Open_Flower_P Parameter: Age (day) Value: 21
  misc_feature: MA Experiment 20000265 PARAMETER Experiment Name: At_Open_Flower_P Parameter: Plant Line Value: WS
  misc_feature: MA Experiment 20000265 PARAMETER Experiment Name: At_Open_Flower_P Parameter: Tissue Value: Closed Flower vs. Whole Plant
  misc_feature: MA Experiment ID: 20000438 Result: Up-regulated in Transcription
  misc_feature: MA Experiment 20000438 PARAMETER Experiment Name: At_Shoots__P Parameter: Age (day) Value: 14
  misc_feature: MA Experiment 20000438 PARAMETER Experiment Name: At_Shoots__P Parameter: Tissue Value: Shoots vs. Whole Plant
  misc_feature: MA Experiment ID: 20001247 Result: Down-regulated in Transcription
  misc_feature: MA Experiment 20001247 PARAMETER Experiment Name: At_Far-red-induction_P Parameter: Age (day) Value: 7
  misc_feature: MA Experiment 20001247 PARAMETER Experiment Name: At_Far-red-induction_P Parameter: Light Value: Far-red vs. White
  misc_feature: MA Experiment 20001247 PARAMETER Experiment Name: At_Far-red-induction_P Parameter: Organism Value: A. thaliana
  misc_feature: MA Experiment 20001247 PARAMETER Experiment Name: At_Far-red-induction_P Parameter: Plant Line Value: Columbia
  misc_feature: MA Experiment 20001247 PARAMETER Experiment Name: At_Far-red-induction_P Parameter: Timepoint (hr) Value: 1
  misc_feature: MA Experiment 20001247 PARAMETER Experiment Name: At_Far-red-induction_P Parameter: Tissue Value: Whole Plant
  misc_feature: MA Experiment ID: 20001248 Result: Down-regulated in Transcription
  misc_feature: MA Experiment 20001248 PARAMETER Experiment Name: At_Far-red-induction_P Parameter: Age (day) Value: 7
  misc_feature: MA Experiment 20001248 PARAMETER Experiment Name: At_Far-red-induction_P Parameter: Light Value: Far-red vs. White
  misc_feature: MA Experiment 20001248 PARAMETER Experiment Name: At_Far-red-induction_P Parameter: Organism Value: A. thaliana
  misc_feature: MA Experiment 20001248 PARAMETER Experiment Name: At_Far-red-induction_P Parameter: Plant Line Value: Columbia
  misc_feature: MA Experiment 20001248 PARAMETER Experiment Name: At_Far-red-induction_P Parameter: Timepoint (hr) Value: 4
  misc_feature: MA Experiment 20001248 PARAMETER Experiment Name: At_Far-red-induction_P Parameter: Tissue Value: Whole Plant
  misc_feature: MA Experiment ID: 20001450 Result: Down-regulated in Transcription
  misc_feature: MA Experiment 20001450 PARAMETER Experiment Name: At_Far-red-induction_P Parameter: Age (day) Value: 7
  misc_feature: MA Experiment 20001450 PARAMETER Experiment Name: At_Far-red-induction_P Parameter: Light Value: Far-red vs. White
  misc_feature: MA Experiment 20001450 PARAMETER Experiment Name: At_Far-red-induction_P Parameter: Organism Value: A. thaliana
  misc_feature: MA Experiment 20001450 PARAMETER Experiment Name: At_Far-red-induction_P Parameter: Plant Line Value: Columbia
  misc_feature: MA Experiment 20001450 PARAMETER Experiment Name: At_Far-red-induction_P Parameter: Timepoint (hr) Value: 8
  misc_feature: MA Experiment 20001450 PARAMETER Experiment Name: At_Far-red-induction_P Parameter: Tissue Value: Whole Plant
  misc_feature: MA Experiment ID: 20001451 Result: Down-regulated in Transcription
  misc_feature: MA Experiment 20001451 PARAMETER Experiment Name: At_Far-red-induction_P Parameter: Age (day) Value: 7
  misc_feature: MA Experiment 20001451 PARAMETER Experiment Name: At_Far-red-induction_P Parameter: Light Value: Far-red vs. White
  misc_feature: MA Experiment 20001451 PARAMETER Experiment Name: At_Far-red-induction_P Parameter: Organism Value: A. thaliana
  misc_feature: MA Experiment 20001451 PARAMETER Experiment Name: At_Far-red-induction_P Parameter: Plant Line Value: Columbia
  misc_feature: MA Experiment 20001451 PARAMETER Experiment Name: At_Far-red-induction_P Parameter: Timepoint (hr) Value: 24
  misc_feature: MA Experiment 20001451 PARAMETER Experiment Name: At_Far-red-induction_P Parameter: Tissue Value: Whole Plant
atgacgttttatatctcgagctcgttaactccaacccatttctcgaaacccttaaacccttctaataccctcttccccagtcaatttcgaggttctctgtctagtttcgtccgtcgaagaaaaccaacggaagctaaattaagctccaaattcaatctttttccttcacgaagaaatggtttgattacttgttgcagtacatcgagctttgagtctactgagtcttcagtttcacaggaagaagatgctgagtccaatcgtctatttgagaagttacgagaaactgaaagagaacgacttagcaacatggaagagctcgagagaaaggctaatgtacaattagaaaggcagcttgttatggcatcagattggagtagaacattgttaaccatgcgtggcaagttaaaaggaacagaatgggatcctgaaacctctcaccgtatcaattttagtgattttatgaagctcttagattccaacagtgttcaatacatggaatattcaaattacggacagacgatatcagtgatattgccttattataaagatggggagcccctaggagaagaagaagattcgaaaaaggagataattttccgtcgtcacattgtggaccgaatgccaattgatggttggaatgatgtatggaagaagttgcatcagcagatagtaaacgtagaggttttcaatgtagatgtggttccagctgaagtctatactacagttgccacttttgtggtttggtctatgagacttgccctctttgtttcgctttatgtttggatcgacagtatcacgaggccaatctatgccaaactaatcccttgtgatctcggaacccctaccaaaaagataaggcagcccctcaagcgccaagcactcggttccctaggcaagagtcgggcaaaatttatatcagcagaggagaaaactggtgttacttttgatgattttgcgggtcaggagtatataaagagggaattacaagaaattgtgcgaattttaaagaatgatgaggaatttcagaataaaggcatttattgtccgaaaggtgttctgcttcatggacctcccggaacggggaaaactttgttagccaaagctattgctggagaagctggtttacctttcttcgcggcaaatggaaccgactttgttgagatgtttgtaggagtggctgcatctcgtgttaaagatctttttgctagctctcggtcatatgcgccatctataatcttcattgatgagattgatgcaattggaagtaagcgaggtggacccgatattggcgggggaggagcagagagagaacaaggtttgcttcaaatattgactgagatggatggatttaaagttactacatcacaagtattagtcataggtgcaacaaatagattagatatccttgatcctgctctattgagaaaaggtcgttttgacaaaatcataagagttggtttaccgtcaaaagatggtagattggcgatattaaaggtacatgctagaaataaattctttcgatctgaggatgagaaggaggagttgctgcaagaagtagctgagaacacggaagattttaccggagcagaactgcaaaacgttctaaatgaagctggaatcttgacagctagaaaagatttggattacattggaagagaagaactccttgaggcgcttaagcggcaaaaagggacatttgagactggacaagaagatagtactgaagttccagaggaactgaagttgagattggcttaccgagaagcagctgttgctgttcttgcttgttatctcccagatcaatatcgtccaatcagcgagactgacataaactcgattagaagccaaccaaatatgcgttactctgaaacttcaggaagagtttttgcgagaaagtcagattatgtgaactcaataatccgtgcatgtgctcctagagtagttgaagaagagatgtttggaatagaaaacctgtgttggatctctgctaagtctactttagaagcttcacagcgagcggaatttctgattcttcagacgggaatgactgcttttggaaaagcttattaccgaaaccaaagagacctcgttcctaatcttgttccgaaacttgaggcattacgcgatgagtacatgaggtttgctgttgagaaatgctcatcaatcttacaagagtatcaatcagcccttgaagaaatcacagatatcaccatacactcaacaatcttaaagagtgtaataatattttcagatgtgcttcttgagaaaggagaaatcaaagccgatgaaatctggaacatttacaacacagctccaaggattcctcaaaaacccgtgagacctgtcgatgagtatggagctttaatctatgcgggaagatggggaattcacggtgtatcgcttcctggaagagtaacattttcaccaggaaacattggttttgcaacatttggagctcctcgtcccatggagacacaaatcatcagcgatgacacatggaaactagtggatgagatttgggataaaaaggttgaagaaatcaaagcagaagctgttattcaaattgaagaagaaaagaagaaacctcagattttgatggcaacccatttcttttaa

SEQ ID NO: 73001 - protein, 871 aa, Arabidopsis thaliana
  peptide (1)..(871): Ceres Seq. ID no. 4953519
  misc_feature (351)..(544): Pfam Name: ATPase family associated with various cellular Pfam Description: ATPase family associated with various cellular
  misc_feature (517)..(871): Homolog of NCBI NO: 19347916 NR Description: unknown protein [Arabidopsis thaliana]
  misc_feature (296)..(767): Homolog of NCBI NO: 11465515 NR Description: cell division protein [Cyanidium caldarium]
  misc_feature (292)..(777): Homolog of NCBI NO: 23123765 NR Description: hypothetical protein [Nostoc punctiforme]
  misc_feature (292)..(777): Homolog of NCBI NO: 17231134 NR Description: cell division protein [Nostoc sp. PCC 7120]
  misc_feature (292)..(777): Homolog of NCBI NO: 22298276 NR Description: cell division protein [Thermosynechococcus BP-1] >gi|22294455|dbj|BAC08285.1| cell division protein
  misc_feature (292)..(777): Homolog of NCBI NO: 37522147 NR Description: cell division protein [Gloeobacter violaceus]
  misc_feature (292)..(777): Homolog of NCBI NO: 11465793 NR Description: ORF25 [Porphyra purpurea] Cell division protein ftsH homolog >gi|2147534|pir||S73248
  misc_feature (292)..(777): Homolog of NCBI NO: 11467752 NR Description: hypothetical chloroplast RF25 [Guillardia theta] Cell division protein ftsH homolog >gi|3603077|gb|AAC35738.1|
  misc_feature (292)..(777): Homolog of NCBI NO: 33240371 NR Description: Cell division protein FtsH [Prochlorococcus subsp. marinus str. CCMP1375] >gi|33237898|gb|AAP99965.1| Cell protein FtsH [Prochlorococcus marinus subsp. marinus str.
  misc_feature (296)..(747): Homolog of NCBI NO: 30468153 NR Description: cell division protein ftsH homolog merolae] >gi|14423723|sp|Q9TJ83|FTSH_CYAME Cell division protein homolog (FtsHCP) >gi|6539506|dbj|BAA88165.1| FtsH (FtsHcp)
MTFYISSSLTPTHFSKPLNPSNTLFPSQFRGSLSSFVRRRKPTEAKLSSKFNLFPSRRNGLITCCSTSSFESTESSVSQEEDAESNRLFEKLRETERERLSNMEELERKANVQLERQLVMASDWSRTLLTMRGKLKGTEWDPETSHRINFSDFMKLLDSNSVQYMEYSNYGQTISVILPYYKDGEPLGEEEDSKKEIIFRRHIVDRMPIDGWNDVWKKLHQQIVNVEVFNVDVVPAEVYTTVATFVVWSMRLALFVSLYVWIDSITRPIYAKLIPCDLGTPTKKIRQPLKRQALGSLGKSRAKFISAEEKTGVTFDDFAGQEYIKRELQEIVRILKNDEEFQNKGIYCPKGVLLHGPPGTGKTLLAKAIAGEAGLPFFAANGTDFVEMFVGVAASRVKDLFASSRSYAPSIIFIDEIDAIGSKRGGPDIGGGGAEREQGLLQILTEMDGFKVTTSQVLVIGATNRLDILDPALLRKGRFDKIIRVGLPSKDGRLAILKVHARNKFFRSEDEKEELLQEVAENTEDFTGAELQNVLNEAGILTARKDLDYIGREELLEALKRQKGTFETGQEDSTEVPEELKLRLAYREAAVAVLACYLPDQYRPISETDINSIRSQPNMRYSETSGRVFARKSDYVNSIIRACAPRVVEEEMFGIENLCWISAKSTLEASQRAEFLILQTGMTAFGKAYYRNQRDLVPNLVPKLEALRDEYMRFAVEKCSSILQEYQSALEEITDITIHSTILKSVIIFSDVLLEKGEIKADEIWNIYNTAPRIPQKPVRPVDEYGALIYAGRWGIHGVSLPGRVTFSPGNIGFATFGAPRPMETQIISDDTWKLVDEIWDKKVEEIKAEAVIQIEEEKKKPQILMATHFF

SEQ ID NO: 73002 - protein, 769 aa, Arabidopsis thaliana
  peptide (1)..(769): Ceres Seq. ID no. 4953520
  misc_feature (249)..(442): Pfam Name: ATPase family associated with various cellular Pfam Description: ATPase family associated with various cellular
  misc_feature (415)..(769): Homolog of NCBI NO: 19347916 NR Description: unknown protein [Arabidopsis thaliana]
  misc_feature (194)..(665): Homolog of NCBI NO: 11465515 NR Description: cell division protein [Cyanidium caldarium]
  misc_feature (190)..(675): Homolog of NCBI NO: 23123765 NR Description: hypothetical protein [Nostoc punctiforme]
  misc_feature (190)..(675): Homolog of NCBI NO: 17231134 NR Description: cell division protein [Nostoc sp. PCC 7120]
  misc_feature (190)..(675): Homolog of NCBI NO: 22298276 NR Description: cell division protein [Thermosynechococcus BP-1] >gi|22294455|dbj|BAC08285.1| cell division protein
  misc_feature (190)..(675): Homolog of NCBI NO: 37522147 NR Description: cell division protein [Gloeobacter violaceus]
  misc_feature (190)..(675): Homolog of NCBI NO: 11465793 NR Description: ORF25 [Porphyra purpurea] Cell division protein ftsH homolog >gi|2147534|pir||S73248
  misc_feature (190)..(675): Homolog of NCBI NO: 11467752 NR Description: hypothetical chloroplast RF25 [Guillardia theta] Cell division protein ftsH homolog >gi|3603077|gb|AAC35738.1|
  misc_feature (190)..(675): Homolog of NCBI NO: 33240371 NR Description: Cell division protein FtsH [Prochlorococcus subsp. marinus str. CCMP1375] >gi|33237898|gb|AAP99965.1| Cell protein FtsH [Prochlorococcus marinus subsp. marinus str.
  misc_feature (194)..(645): Homolog of NCBI NO: 30468153 NR Description: cell division protein ftsH homolog merolae] >gi|14423723|sp|Q9TJ83|FTSH_CYAME Cell division protein homolog (FtsHCP) >gi|6539506|dbj|BAA88165.1| FtsH (FtsHcp)
MEELERKANVQLERQLVMASDWSRTLLTMRGKLKGTEWDPETSHRINFSDFMKLLDSNSVQYMEYSNYGQTISVILPYYKDGEPLGEEEDSKKEIIFRRHIVDRMPIDGWNDVWKKLHQQIVNVEVFNVDVVPAEVYTTVATFVVWSMRLALFVSLYVWIDSITRPIYAKLIPCDLGTPTKKIRQPLKRQALGSLGKSRAKFISAEEKTGVTFDDFAGQEYIKRELQEIVRILKNDEEFQNKGIYCPKGVLLHGPPGTGKTLLAKAIAGEAGLPFFAANGTDFVEMFVGVAASRVKDLFASSRSYAPSIIFIDEIDAIGSKRGGPDIGGGGAEREQGLLQILTEMDGFKVTTSQVLVIGATNRLDILDPALLRKGRFDKIIRVGLPSKDGRLAILKVHARNKFFRSEDEKEELLQEVAENTEDFTGAELQNVLNEAGILTARKDLDYIGREELLEALKRQKGTFETGQEDSTEVPEELKLRLAYREAAVAVLACYLPDQYRPISETDINSIRSQPNMRYSETSGRVFARKSDYVNSIIRACAPRVVEEEMFGIENLCWISAKSTLEASQRAEFLILQTGMTAFGKAYYRNQRDLVPNLVPKLEALRDEYMRFAVEKCSSILQEYQSALEEITDITIHSTILKSVIIFSDVLLEKGEIKADEIWNIYNTAPRIPQKPVRPVDEYGALIYAGRWGIHGVSLPGRVTFSPGNIGFATFGAPRPMETQIISDDTWKLVDEIWDKKVEEIKAEAVIQIEEEKKKPQILMATHFF

SEQ ID NO: 73003 - protein, 752 aa, Arabidopsis thaliana
  peptide (1)..(752): Ceres Seq. ID no. 4953521
  misc_feature (232)..(425): Pfam Name: ATPase family associated with various cellular Pfam Description: ATPase family associated with various cellular
  misc_feature (398)..(752): Homolog of NCBI NO: 19347916 NR Description: unknown protein [Arabidopsis thaliana]
  misc_feature (177)..(648): Homolog of NCBI NO: 11465515 NR Description: cell division protein [Cyanidium caldarium]
  misc_feature (173)..(658): Homolog of NCBI NO: 23123765 NR Description: hypothetical protein [Nostoc punctiforme]
  misc_feature (173)..(658): Homolog of NCBI NO: 17231134 NR Description: cell division protein [Nostoc sp. PCC 7120]
  misc_feature (173)..(658): Homolog of NCBI NO: 22298276 NR Description: cell division protein [Thermosynechococcus BP-1] >gi|22294455|dbj|BAC08285.1| cell division protein
  misc_feature (173)..(658): Homolog of NCBI NO: 37522147 NR Description: cell division protein [Gloeobacter violaceus]
  misc_feature (173)..(658): Homolog of NCBI NO: 11465793 NR Description: ORF25 [Porphyra purpurea] Cell division protein ftsH homolog >gi|2147534|pir||S73248
  misc_feature (173)..(658): Homolog of NCBI NO: 11467752 NR Description: hypothetical chloroplast RF25 [Guillardia theta] Cell division protein ftsH homolog >gi|3603077|gb|AAC35738.1|
  misc_feature (173)..(658): Homolog of NCBI NO: 33240371 NR Description: Cell division protein FtsH [Prochlorococcus subsp. marinus str. CCMP1375] >gi|33237898|gb|AAP99965.1| Cell protein FtsH [Prochlorococcus marinus subsp. marinus str.
  misc_feature (177)..(628): Homolog of NCBI NO: 30468153 NR Description: cell division protein ftsH homolog merolae] >gi|14423723|sp|Q9TJ83|FTSH_CYAME Cell division protein homolog (FtsHCP) >gi|6539506|dbj|BAA88165.1| FtsH (FtsHcp)
MASDWSRTLLTMRGKLKGTEWDPETSHRINFSDFMKLLDSNSVQYMEYSNYGQTISVILPYYKDGEPLGEEEDSKKEIIFRRHIVDRMPIDGWNDVWKKLHQQIVNVEVFNVDVVPAEVYTTVATFVVWSMRLALFVSLYVWIDSITRPIYAKLIPCDLGTPTKKIRQPLKRQALGSLGKSRAKFISAEEKTGVTFDDFAGQEYIKRELQEIVRILKNDEEFQNKGIYCPKGVLLHGPPGTGKTLLAKAIAGEAGLPFFAANGTDFVEMFVGVAASRVKDLFASSRSYAPSIIFIDEIDAIGSKRGGPDIGGGGAEREQGLLQILTEMDGFKVTTSQVLVIGATNRLDILDPALLRKGRFDKIIRVGLPSKDGRLAILKVHARNKFFRSEDEKEELLQEVAENTEDFTGAELQNVLNEAGILTARKDLDYIGREELLEALKRQKGTFETGQEDSTEVPEELKLRLAYREAAVAVLACYLPDQYRPISETDINSIRSQPNMRYSETSGRVFARKSDYVNSIIRACAPRVVEEEMFGIENLCWISAKSTLEASQRAEFLILQTGMTAFGKAYYRNQRDLVPNLVPKLEALRDEYMRFAVEKCSSILQEYQSALEEITDITIHSTILKSVIIFSDVLLEKGEIKADEIWNIYNTAPRIPQKPVRPVDEYGALIYAGRWGIHGVSLPGRVTFSPGNIGFATFGAPRPMETQIISDDTWKLVDEIWDKKVEEIKAEAVIQIEEEKKKPQILMATHFF

SEQ ID NO: 73004 - DNA, 2028 bp, Arabidopsis thaliana
  misc_feature (1)..(2028): Ceres Seq. ID no. 4953705
  misc_feature: MA Experiment ID: 20000182 Result: Up-regulated in Transcription
  misc_feature: MA Experiment 20000182 PARAMETER Experiment Name: At_2mM_SA_P Parameter: Age (day) Value: 14
  misc_feature: MA Experiment 20000182 PARAMETER Experiment Name: At_2mM_SA_P Parameter: Organism Value: A. thaliana
  misc_feature: MA Experiment 20000182 PARAMETER Experiment Name: At_2mM_SA_P Parameter: Plant Line Value: WS
  misc_feature: MA Experiment 20000182 PARAMETER Experiment Name: At_2mM_SA_P Parameter: Timepoint (hr) Value: 6
  misc_feature: MA Experiment 20000182 PARAMETER Experiment Name: At_2mM_SA_P Parameter: Tissue Value: Aerial
  misc_feature: MA Experiment 20000182 PARAMETER Experiment Name: At_2mM_SA_P Parameter: Treatment Value: 2mM SA vs. No Treatment
  misc_feature: MA Experiment ID: 20000185 Result: Down-regulated in Transcription
  misc_feature: MA Experiment 20000185 PARAMETER Experiment Name: At_Roots__P Parameter: Age (day) Value: 7 vs. 21
  misc_feature: MA Experiment 20000185 PARAMETER Experiment Name: At_Roots__P Parameter: Organism Value: A. thaliana
  misc_feature: MA Experiment 20000185 PARAMETER Experiment Name: At_Roots__P Parameter: Tissue Value: Roots vs. Whole Plant
  misc_feature: MA Experiment ID: 20000227 Result: Down-regulated in Transcription
  misc_feature: MA Experiment 20000227 PARAMETER Experiment Name: At_Root-Tips-vs-Tops_P Parameter: Tissue Value: Root Tips vs. Root Tops
  misc_feature: MA Experiment ID: 20000234 Result: Down-regulated in Transcription
  misc_feature: MA Experiment 20000234 PARAMETER Experiment Name: At_Siliques_P Parameter: Age (day) Value: 21
  misc_feature: MA Experiment 20000234 PARAMETER Experiment Name: At_Siliques_P Parameter: Organism Value: A. thaliana
  misc_feature: MA Experiment 20000234 PARAMETER Experiment Name: At_Siliques_P Parameter: Plant Line Value: WS
  misc_feature: MA Experiment 20000234 PARAMETER Experiment Name: At_Siliques_P Parameter: Tissue Value: Less Than 5mm Siliques vs. Whole Plant
  misc_feature: MA Experiment ID: 20000235 Result: Down-regulated in Transcription
  misc_feature: MA Experiment 20000235 PARAMETER Experiment Name: At_Siliques_P Parameter: Age (day) Value: 21
  misc_feature: MA Experiment 20000235 PARAMETER Experiment Name: At_Siliques_P Parameter: Organism Value: A. thaliana
  misc_feature: MA Experiment 20000235 PARAMETER Experiment Name: At_Siliques_P Parameter: Plant Line Value: WS
  misc_feature: MA Experiment 20000235 PARAMETER Experiment Name: At_Siliques_P Parameter: Tissue Value: 5-10mm Siliques vs. Whole Plant
  misc_feature: MA Experiment ID: 20000438 Result: Down-regulated in Transcription
  misc_feature: MA Experiment 20000438 PARAMETER Experiment Name: At_Shoots__P Parameter: Age (day) Value: 14
  misc_feature: MA Experiment 20000438 PARAMETER Experiment Name: At_Shoots__P Parameter: Tissue Value: Shoots vs. Whole Plant
  misc_feature: MA Experiment ID: 20000439 Result: Down-regulated in Transcription
  misc_feature: MA Experiment 20000439 PARAMETER Experiment Name: At_Roots__P Parameter: Age (day) Value: 14 vs. 21
  misc_feature: MA Experiment 20000439 PARAMETER Experiment Name: At_Roots__P Parameter: Organism Value: A. thaliana
  misc_feature: MA Experiment 20000439 PARAMETER Experiment Name: At_Roots__P Parameter: Tissue Value: Roots vs. Whole Plant
  misc_feature: MA Experiment ID: 20000794 Result: Down-regulated in Transcription
  misc_feature: MA Experiment 20000794 PARAMETER Experiment Name: At_Petals_P Parameter: Age (day) Value: 23-25 days
  misc_feature: MA Experiment 20000794 PARAMETER Experiment Name: At_Petals_P Parameter: Plant Line Value: WS
  misc_feature: MA Experiment 20000794 PARAMETER Experiment Name: At_Petals_P Parameter: Tissue Value: Petals vs. Whole plant
  misc_feature: MA Experiment ID: 20001904 Result: Down-regulated in Transcription
  misc_feature: MA Experiment 20001904 PARAMETER Experiment Name: At_Drought_Reproduction_P Parameter: Age (day) Value: 37
  misc_feature: MA Experiment 20001904 PARAMETER Experiment Name: At_Drought_Reproduction_P Parameter: Organism Value: A. thaliana
  misc_feature: MA Experiment 20001904 PARAMETER Experiment Name: At_Drought_Reproduction_P Parameter: Plant Line Value: WS
  misc_feature: MA Experiment 20001904 PARAMETER Experiment Name: At_Drought_Reproduction_P Parameter: Timepoint (day) Value: 7
  misc_feature: MA Experiment 20001904 PARAMETER Experiment Name: At_Drought_Reproduction_P Parameter: Tissue Value: Rosettes
  misc_feature: MA Experiment 20001904 PARAMETER Experiment Name: At_Drought_Reproduction_P Parameter: Treatment Value: Drought vs. No Drought
  misc_feature: Pfam Name: Lectin_legB Pfam Description: Legume lectin domain
atgctttatttcattttctgtcaaaatctttcttcttcctcctctatgtctaattcaatcttgttcctttcccttttcctcttcctcccttttgttgttgattcactttacttcaactttacaagttttcgacaaggtgatcccggggacatattttaccacggggatgcaactcccgatgaagatggaacagtgaacttcaacaacgctgaacaaacatctcaggttggttggattacttattcaaagaaggtgcctatatggagtcataaaactggtaaggcttcagatttcagcaccagtttctccttcaaaatcgatgctcgtaatctttcagcagatggtcatggaatctgtttctttcttgctcctatgggagctcaactacctgcatactcagttggtggtttcttgaatttgttcactcggaagaataattactcatcttcgtttccgctagttcatgttgaatttgacacgtttaacaatccaggatgggatcctaatgatgttggatctcatgttgggatcaataacaactctcttgtttcttccaactacacttcttggaatgcaagctctcacagccaagatatttgtcatgcaaagatctcttatgattccgtgaccaagaatttaagtgtgacttgggcttatgagctaacagcaacctctgatcctaaggagagttcaagcctttcttacatcatcgacctcgctaaggttctgccatcagatgttatgttcgggtttatagctgccgctgggacaaacacagaggaacatagacttttatcatgggagctcagttcaagtttggacagcgacaaagccgatagcaggataggactagtaattggcatttcggcttccgggtttgtttttctgacgtttatggtcatcacaaccgtggtggtttggtcacggaagcaaagaaagaagaaagaaagagatatagaaaacatgatatcgataaacaaagaccttgaaagggaagcaggaccaagaaagttttcttataaggatcttgtgtcagcaaccaacagattctcaagccatagaaagctaggtgaaggaggatttggagcagtttatgaaggaaacttgaaagaaatcaatacaatggttgcggtgaagaaactatccggtgattcaaggcagggaaagaacgagtttttaaacgaagttaagatcatcagcaaactgagacatcgaaacctcgtgcagctcatcggttggtgtaatgagaaaaatgagttcttgctgatatatgagttagttccaaatggtagcttgaactctcacctctttgggaaaagacccaatttactttcttgggacataaggtacaagataggtcttggtttagcctctgctctgctttatcttcatgaagaatgggatcaatgtgtactgcacagagacatcaaggcaagtaatataatgcttgacagtgaattcaatgtaaagttaggtgatttcgggttggctcggctaatgaaccatgaacttggttcccatacaacggggttggctggaacttttgggtacatggcacctgaatatgtaatgaaaggaagtgcgagtaaagaatctgatatatatagctttggaattgttttactagagattgtcacagggagaaaatcgctggaacgtacacaagaagataacagtgatacagagagtgatgatgagaagagtctagtggagaaagtttgggagctttatggaaaacaagaactgatcacttcatgtgttgatgacaaattgggtgaggatttcgacaagaaagaagctgaatgtcttctggttttagggttatggtgtgctcatcctgataaaaactcgagaccttcgataaaacaagggatccaagtcatgaattttgagtcaccattgcctgatcttccattgaagaggcctgttgctatgtattacatctcgactactacttcttcttcttctccctcagttaactcaaatggagtttctgtaacgttctcaggcatcgagtatggtcgttaa

SEQ ID NO: 73005 - protein, 675 aa, Arabidopsis thaliana
  peptide (1)..(675): Ceres Seq. ID no. 4953706
  misc_feature: Pfam Name: Lectin_legB Pfam Description: Legume lectin domain
  misc_feature (16)..(675): Homolog of NCBI NO: 15238190 NR Description: lectin-like protein kinase - like; protein id:
  misc_feature (21)..(663): Homolog of NCBI NO: 33146777 NR Description: putative lectin-like protein kinase [Oryza sativa
  misc_feature (20)..(670): Homolog of NCBI NO: 15289871 NR Description: putative receptor protein kinase-like protein
  misc_feature (18)..(661): Homolog of NCBI NO: 38112431 NR Description: lectin-like receptor kinase 1;1 [Medicago
  misc_feature (135)..(670): Homolog of NCBI NO: 33146780 NR Description: putative lectin-like protein kinase [Oryza sativa
  misc_feature (146)..(646): Homolog of NCBI NO: 21743149 NR Description: OSJNBb0096E05.1 [Oryza sativa (japonica
  misc_feature (146)..(646): Homolog of NCBI NO: 38568031 NR Description: OSJNBa0065J03.1 [Oryza sativa (japonica
  misc_feature (270)..(651): Homolog of NCBI NO: 15242646 NR Description: receptor like protein kinase; protein id: supported by cDNA: gi_20260625 [Arabidopsis thaliana]
  misc_feature (55)..(274): Homolog of NCBI NO: 15242646 NR Description: receptor like protein kinase; protein id: supported by cDNA: gi_20260625 [Arabidopsis thaliana]
  misc_feature (24)..(636): Homolog of NCBI NO: 38112425 NR Description: lectin-like receptor kinase 7;1 [Medicago
MLYFIFCQNLSSSSSMSNSILFLSLFLFLPFVVDSLYFNFTSFRQGDPGDIFYHGDATPDEDGTVNFNNAEQTSQVGWITYSKKVPIWSHKTGKASDFSTSFSFKIDARNLSADGHGICFFLAPMGAQLPAYSVGGFLNLFTRKNNYSSSFPLVHVEFDTFNNPGWDPNDVGSHVGINNNSLVSSNYTSWNASSHSQDICHAKISYDSVTKNLSVTWAYELTATSDPKESSSLSYIIDLAKVLPSDVMFGFIAAAGTNTEEHRLLSWELSSSLDSDKADSRIGLVIGISASGFVFLTFMVITTVVVWSRKQRKKKERDIENMISINKDLEREAGPRKFSYKDLVSATNRFSSHRKLGEGGFGAVYEGNLKEINTMVAVKKLSGDSRQGKNEFLNEVKIISKLRHRNLVQLIGWCNEKNEFLLIYELVPNGSLNSHLFGKRPNLLSWDIRYKIGLGLASALLYLHEEWDQCVLHRDIKASNIMLDSEFNVKLGDFGLARLMNHELGSHTTGLAGTFGYMAPEYVMKGSASKESDIYSFGIVLLEIVTGRKSLERTQEDNSDTESDDEKSLVEKVWELYGKQELITSCVDDKLGEDFDKKEAECLLVLGLWCAHPDKNSRPSIKQGIQVMNFESPLPDLPLKRPVAMYYISTTTSSSSPSVNSNGVSVTFSGIEYGR

SEQ ID NO: 73006 - protein, 660 aa, Arabidopsis thaliana
  peptide (1)..(660): Ceres Seq. ID no. 4953707
  misc_feature: Pfam Name: Lectin_legB Pfam Description: Legume lectin domain
  misc_feature (1)..(660): Homolog of NCBI NO: 15238190 NR Description: lectin-like protein kinase - like; protein id:
  misc_feature (6)..(648): Homolog of NCBI NO: 33146777 NR Description: putative lectin-like protein kinase [Oryza sativa
  misc_feature (5)..(655): Homolog of NCBI NO: 15289871 NR Description: putative receptor protein kinase-like protein
  misc_feature (3)..(646): Homolog of NCBI NO: 38112431 NR Description: lectin-like receptor kinase 1;1 [Medicago
  misc_feature (120)..(655): Homolog of NCBI NO: 33146780 NR Description: putative lectin-like protein kinase [Oryza sativa
  misc_feature (131)..(631): Homolog of NCBI NO: 21743149 NR Description: OSJNBb0096E05.1 [Oryza sativa (japonica
  misc_feature (131)..(631): Homolog of NCBI NO: 38568031 NR Description: OSJNBa0065J03.1 [Oryza sativa (japonica
  misc_feature (255)..(636): Homolog of NCBI NO: 15242646 NR Description: receptor like protein kinase; protein id: supported by cDNA: gi_20260625 [Arabidopsis thaliana]
  misc_feature (40)..(259): Homolog of NCBI NO: 15242646 NR Description: receptor like protein kinase; protein id: supported by cDNA: gi_20260625 [Arabidopsis thaliana]
  misc_feature (9)..(621): Homolog of NCBI NO: 38112425 NR Description: lectin-like receptor kinase 7;1 [Medicago
MSNSILFLSLFLFLPFVVDSLYFNFTSFRQGDPGDIFYHGDATPDEDGTVNFNNAEQTSQVGWITYSKKVPIWSHKTGKASDFSTSFSFKIDARNLSADGHGICFFLAPMGAQLPAYSVGGFLNLFTRKNNYSSSFPLVHVEFDTFNNPGWDPNDVGSHVGINNNSLVSSNYTSWNASSHSQDICHAKISYDSVTKNLSVTWAYELTATSDPKESSSLSYIIDLAKVLPSDVMFGFIAAAGTNTEEHRLLSWELSSSLDSDKADSRIGLVIGISASGFVFLTFMVITTVVVWSRKQRKKKERDIENMISINKDLEREAGPRKFSYKDLVSATNRFSSHRKLGEGGFGAVYEGNLKEINTMVAVKKLSGDSRQGKNEFLNEVKIISKLRHRNLVQLIGWCNEKNEFLLIYELVPNGSLNSHLFGKRPNLLSWDIRYKIGLGLASALLYLHEEWDQCVLHRDIKASNIMLDSEFNVKLGDFGLARLMNHELGSHTTGLAGTFGYMAPEYVMKGSASKESDIYSFGIVLLEIVTGRKSLERTQEDNSDTESDDEKSLVEKVWELYGKQELITSCVDDKLGEDFDKKEAECLLVLGLWCAHPDKNSRPSIKQGIQVMNFESPLPDLPLKRPVAMYYISTTTSSSSPSVNSNGVSVTFSGIEYGR

SEQ ID NO: 73007 - protein, 551 aa, Arabidopsis thaliana
  peptide (1)..(551): Ceres Seq. ID no. 4953708
  misc_feature: Pfam Name: Lectin_legB Pfam Description: Legume lectin domain
  misc_feature (1)..(551): Homolog of NCBI NO: 15238190 NR Description: lectin-like protein kinase - like; protein id:
  misc_feature (1)..(539): Homolog of NCBI NO: 33146777 NR Description: putative lectin-like protein kinase [Oryza sativa
  misc_feature (1)..(546): Homolog of NCBI NO: 15289871 NR Description: putative receptor protein kinase-like protein
  misc_feature (1)..(537): Homolog of NCBI NO: 38112431 NR Description: lectin-like receptor kinase 1;1 [Medicago
  misc_feature (11)..(546): Homolog of NCBI NO: 33146780 NR Description: putative lectin-like protein kinase [Oryza sativa
  misc_feature (22)..(522): Homolog of NCBI NO: 21743149 NR Description: OSJNBb0096E05.1 [Oryza sativa (japonica
  misc_feature (22)..(522): Homolog of NCBI NO: 38568031 NR Description: OSJNBa0065J03.1 [Oryza sativa (japonica
  misc_feature (146)..(527): Homolog of NCBI NO: 15242646 NR Description: receptor like protein kinase; protein id: supported by cDNA: gi_20260625 [Arabidopsis thaliana]
  misc_feature (1)..(150): Homolog of NCBI NO: 15242646 NR Description: receptor like protein kinase; protein id: supported by cDNA: gi_20260625 [Arabidopsis thaliana]
  misc_feature (1)..(512): Homolog of NCBI NO: 38112425 NR Description: lectin-like receptor kinase 7;1 [Medicago
MGAQLPAYSVGGFLNLFTRKNNYSSSFPLVHVEFDTFNNPGWDPNDVGSHVGINNNSLVSSNYTSWNASSHSQDICHAKISYDSVTKNLSVTWAYELTATSDPKESSSLSYIIDLAKVLPSDVMFGFIAAAGTNTEEHRLLSWELSSSLDSDKADSRIGLVIGISASGFVFLTFMVITTVVVWSRKQRKKKERDIENMISINKDLEREAGPRKFSYKDLVSATNRFSSHRKLGEGGFGAVYEGNLKEINTMVAVKKLSGDSRQGKNEFLNEVKIISKLRHRNLVQLIGWCNEKNEFLLIYELVPNGSLNSHLFGKRPNLLSWDIRYKIGLGLASALLYLHEEWDQCVLHRDIKASNIMLDSEFNVKLGDFGLARLMNHELGSHTTGLAGTFGYMAPEYVMKGSASKESDIYSFGIVLLEIVTGRKSLERTQEDNSDTESDDEKSLVEKVWELYGKQELITSCVDDKLGEDFDKKEAECLLVLGLWCAHPDKNSRPSIKQGIQVMNFESPLPDLPLKRPVAMYYISTTTSSSSPSVNSNGVSVTFSGIEYGR

SEQ ID NO: 73008 - DNA, 868 bp, Arabidopsis thaliana
  misc_feature (1)..(868): Ceres Seq. ID no. 4953740
  misc_feature: MA Experiment ID: 108434 Result: Up-regulated in Transcription
  misc_feature: MA Experiment 108434 PARAMETER Experiment Name: At_Root_Tips_cDNA_P Parameter: Tissue Value: Root Tips
  misc_feature: MA Experiment ID: 108573 Result: Up-regulated in Transcription
  misc_feature: MA Experiment 108573 PARAMETER Experiment Name: At_Drought_cDNA_P Parameter: Timepoint (hr) Value: 6
  misc_feature: MA Experiment 108573 PARAMETER Experiment Name: At_Drought_cDNA_P Parameter: Tissue Value: Aerial
  misc_feature: MA Experiment 108573 PARAMETER Experiment Name: At_Drought_cDNA_P Parameter: Treatment Value: Drought vs. No Drought
  misc_feature: MA Experiment ID: 108579 Result: Down-regulated in Transcription
  misc_feature: MA Experiment 108579 PARAMETER Experiment Name: At_4deg_Cold_cDNA_P Parameter: Temperature (deg C) Value: 4 vs. 22
  misc_feature: MA Experiment 108579 PARAMETER Experiment Name: At_4deg_Cold_cDNA_P Parameter: Timepoint (hr) Value: 6
  misc_feature: MA Experiment 108579 PARAMETER Experiment Name: At_4deg_Cold_cDNA_P Parameter: Tissue Value: Aerial
  misc_feature: MA Experiment ID: 20000111 Result: Down-regulated in Transcription
  misc_feature: MA Experiment 20000111 PARAMETER Experiment Name: At_42deg_Heat_cDNA_P Parameter: Temperature (deg C) Value: 42 vs. 22
  misc_feature: MA Experiment 20000111 PARAMETER Experiment Name: At_42deg_Heat_cDNA_P Parameter: Timepoint (hr) Value: 6
  misc_feature: MA Experiment 20000111 PARAMETER Experiment Name: At_42deg_Heat_cDNA_P Parameter: Tissue Value: Aerial
  misc_feature: MA Experiment ID: 20000112 Result: Down-regulated in Transcription
  misc_feature: MA Experiment 20000112 PARAMETER Experiment Name: At_42deg_Heat_cDNA_P Parameter: Temperature (deg C) Value: 42 vs. 22
  misc_feature: MA Experiment 20000112 PARAMETER Experiment Name: At_42deg_Heat_cDNA_P Parameter: Timepoint (hr) Value: 2
  misc_feature: MA Experiment 20000112 PARAMETER Experiment Name: At_42deg_Heat_cDNA_P Parameter: Tissue Value: Aerial
  misc_feature: MA Experiment ID: 20000113 Result: Down-regulated in Transcription
  misc_feature: MA Experiment 20000113 PARAMETER Experiment Name: At_42deg_Heat_cDNA_P Parameter: Temperature (deg C) Value: 42 vs. 22
  misc_feature: MA Experiment 20000113 PARAMETER Experiment Name: At_42deg_Heat_cDNA_P Parameter: Timepoint (hr) Value: 8
  misc_feature: MA Experiment 20000113 PARAMETER Experiment Name: At_42deg_Heat_cDNA_P Parameter: Tissue Value: Aerial
  misc_feature: MA Experiment ID: 20000234 Result: Up-regulated in Transcription
  misc_feature: MA Experiment 20000234 PARAMETER Experiment Name: At_Siliques_P Parameter: Age (day) Value: 21
  misc_feature: MA Experiment 20000234 PARAMETER Experiment Name: At_Siliques_P Parameter: Organism Value: A. thaliana
  misc_feature: MA Experiment 20000234 PARAMETER Experiment Name: At_Siliques_P Parameter: Plant Line Value: WS
  misc_feature: MA Experiment 20000234 PARAMETER Experiment Name: At_Siliques_P Parameter: Tissue Value: Less Than 5mm Siliques vs. Whole Plant
  misc_feature: MA Experiment ID: 20000235 Result: Up-regulated in Transcription
  misc_feature: MA Experiment 20000235 PARAMETER Experiment Name: At_Siliques_P Parameter: Age (day) Value: 21
  misc_feature: MA Experiment 20000235 PARAMETER Experiment Name: At_Siliques_P Parameter: Organism Value: A. thaliana
  misc_feature: MA Experiment 20000235 PARAMETER Experiment Name: At_Siliques_P Parameter: Plant Line Value: WS
  misc_feature: MA Experiment 20000235 PARAMETER Experiment Name: At_Siliques_P Parameter: Tissue Value: 5-10mm Siliques vs. Whole Plant
  misc_feature: MA Experiment ID: 20000264 Result: Up-regulated in Transcription
  misc_feature: MA Experiment 20000264 PARAMETER Experiment Name: At_Open_Flower_P Parameter: Age (day) Value: 21
  misc_feature: MA Experiment 20000264 PARAMETER Experiment Name: At_Open_Flower_P Parameter: Plant Line Value: WS
  misc_feature: MA Experiment 20000264 PARAMETER Experiment Name: At_Open_Flower_P Parameter: Tissue Value: Open Flower vs. Whole Plant
  misc_feature: MA Experiment ID: 20000265 Result: Up-regulated in Transcription
  misc_feature: MA Experiment 20000265 PARAMETER Experiment Name: At_Open_Flower_P Parameter: Age (day) Value: 21
  misc_feature: MA Experiment 20000265 PARAMETER Experiment Name: At_Open_Flower_P Parameter: Plant Line Value: WS
  misc_feature: MA Experiment 20000265 PARAMETER Experiment Name: At_Open_Flower_P Parameter: Tissue Value: Closed Flower vs. Whole Plant
  misc_feature: MA Experiment ID: 20000286 Result: Up-regulated in Transcription
  misc_feature: MA Experiment 20000286 PARAMETER Experiment Name: At_Open_Flower_P Parameter: Age (day) Value: 21
  misc_feature: MA Experiment 20000286 PARAMETER Experiment Name: At_Open_Flower_P Parameter: Plant Line Value: WS
  misc_feature: MA Experiment 20000286 PARAMETER Experiment Name: At_Open_Flower_P Parameter: Tissue Value: Half Open vs. Whole Plant
  misc_feature: MA Experiment ID: 20000451 Result: Down-regulated in Transcription
  misc_feature: MA Experiment 20000451 PARAMETER Experiment Name: At_CS6879_Shoots-Roots_P Parameter: Age (day) Value: 14
  misc_feature: MA Experiment 20000451 PARAMETER Experiment Name: At_CS6879_Shoots-Roots_P Parameter: Organism Value: A. thaliana
  misc_feature: MA Experiment 20000451 PARAMETER Experiment Name: At_CS6879_Shoots-Roots_P Parameter: Plant Line Value: CS6879 vs. WS
  misc_feature: MA Experiment 20000451 PARAMETER Experiment Name: At_CS6879_Shoots-Roots_P Parameter: Tissue Value: Roots
atctccgatttagatagaaacaacaatcctccggtggtcactcgctaatctccgtttgatctcgccgacactcgagccttttaccgatgaaggatggagattccttaccaataagcacttcttccgtcgcggcgacgacggtgaccggaaagaaggaaaccggttattccgctctcttctcgaaaggccggtacaagttttgggccttagctgcgattctgttactcgctttctggtcaatgctcactggcacggtcaatctccgttggtctgccggtaacattaaccatttcaccgacgatctcgtctttcccatccacgaggatctcgatgttcttgaaatggaggagagggagaaagtggtgaagcacatgtgggatgtgtataacaatggccgtcgtatcagattacctaggttttggcaagaggccttcgaggctgcttacgaggagcttaccagtgatgtacctgatgtggttgaggctgccatttccgagatcgctaggatgtctattcgctccattgttatagatccgcctccgcttcattccacgaatgtacgagaattgacaaagactctaaaacttgcggacaaaggaagagcaactcaaatatcaaaaccaagcagccgtcgattgaaatagctatggaggctttacgaaaaaggtagtgtagcagtcagccgtcgtggcgtgaccatacatatacttgatgtcagaaagatcaatcaacctcatccctagaatatatgtccatcattagtgttattttttcttccactaggggcattaatcctttcactatcatcatcatctcttctataaacaaaattttgaggaagctttttatccacaccttattagctctg

SEQ ID NO: 73009 - protein, 185 aa, Arabidopsis thaliana; identical to SEQ ID NO: 41028
  peptide (1)..(185): Ceres Seq. ID no. 4953741
  misc_feature (1)..(185): Homolog of NCBI NO: 18424975 NR Description: putative protein; protein id: At5g65650.1, by cDNA: 118150. [Arabidopsis thaliana] unknown [Arabidopsis thaliana] >gi|27754375|gb|AAO22636.1|
  misc_feature (1)..(156): Homolog of NCBI NO: 9858772 NR Description: BAC19.4 [Lycopersicon esculentum]
  misc_feature (1)..(155): Homolog of NCBI NO: 15234477 NR Description: hypothetical protein; protein id: At4g36660.1
  misc_feature (31)..(151): Homolog of NCBI NO: 28209490 NR Description: unknown protein [Oryza sativa (japonica
  misc_feature (36)..(143): Homolog of NCBI NO: 15222008 NR Description: hypothetical protein; protein id: At1g19380.1 thaliana] >gi|8778415|gb|AAF79423.1|AC025808_5 F18O14.10

SEQ ID NO: 73010 - protein, 134 aa, Arabidopsis thaliana; identical to SEQ ID NO: 41029
  peptide (1)..(134): Ceres Seq. ID no. 4953742
  misc_feature (1)..(134): Homolog of NCBI NO: 18424975 NR Description: putative protein; protein id: At5g65650.1, by cDNA: 118150. [Arabidopsis thaliana] unknown [Arabidopsis thaliana] >gi|27754375|gb|AAO22636.1|
  misc_feature (1)..(105): Homolog of NCBI NO: 9858772 NR Description: BAC19.4 [Lycopersicon esculentum]
  misc_feature (1)..(104): Homolog of NCBI NO: 15234477 NR Description: hypothetical protein; protein id: At4g36660.1
  misc_feature (1)..(100): Homolog of NCBI NO: 28209490 NR Description: unknown protein [Oryza sativa (japonica
  misc_feature (1)..(92): Homolog of NCBI NO: 15222008 NR Description: hypothetical protein; protein id: At1g19380.1 thaliana] >gi|8778415|gb|AAF79423.1|AC025808_5 F18O14.10

SEQ ID NO: 73011 - protein, 100 aa, Arabidopsis thaliana; identical to SEQ ID NO: 37003
  peptide (1)..(100): Ceres Seq. ID no. 4953743
  misc_feature (1)..(100): Homolog of NCBI NO: 18424975 NR Description: putative protein; protein id: At5g65650.1, by cDNA: 118150. [Arabidopsis thaliana] unknown [Arabidopsis thaliana] >gi|27754375|gb|AAO22636.1|
  misc_feature (1)..(71): Homolog of NCBI NO: 9858772 NR Description: BAC19.4 [Lycopersicon esculentum]
  misc_feature (1)..(70): Homolog of NCBI NO: 15234477 NR Description: hypothetical protein; protein id: At4g36660.1
  misc_feature (1)..(66): Homolog of NCBI NO: 28209490 NR Description: unknown protein [Oryza sativa (japonica
  misc_feature (1)..(58): Homolog of NCBI NO: 15222008 NR Description: hypothetical protein; protein id: At1g19380.1 thaliana] >gi|8778415|gb|AAF79423.1|AC025808_5 F18O14.10

SEQ ID NO: 73012 - DNA, 1314 bp, Arabidopsis thaliana
  misc_feature (1)..(1314): Ceres Seq. ID no. 4953786
  misc_feature: MA Experiment ID: 20000180 Result: Down-regulated in Transcription
  misc_feature: MA Experiment 20000180 PARAMETER Experiment Name: At_Germinating_Seeds_P Parameter: Age (hr) Value: 24 vs. 0
  misc_feature: MA Experiment 20000180 PARAMETER Experiment Name: At_Germinating_Seeds_P Parameter: Tissue Value: Germinating Seeds
atggcggattcaacaaccttatctacttttttcgatcattctcagactcagattccaaagctggaagatttcctcggtgattcctttgtccgttactctgataaccaaacagagacccaagactcttcttctctcactccattctacgatccacgtcaccgcaccgttgccgaaggagttacagggttcttctctgatcatcatcagccagatttcaagacgataaactcgggaccagaaatcttcgatgactcaacaacttccaacatcggtggtactcatctctccagtcacgtggtggagtcatcaacgacggcgaagttagggtttaacggtgattgcaccaccaccggaggagttttgtctctaggggttaacaacacatcagatcaacctttgagctgtaacaatggcgagagaggtggaaacagtaacaagaagaaaacagtttctaagaaggaaacatcagatgattcaaagaagaagattgtcgaaacattgggacaaagaacttcaatttatcgtggagtcacccgacatagatggactggaagatacgaagcgcatctatgggataacagctgtaggagggaaggtcaagccagaaaaggacgtcaaggtggatatgacaaggaagatagagcagctagagcctatgacttggcagctttaaaatactggggttctactgctactacaaattttccggtctcgagttattcaaaagaacttgaggaaatgaatcacatgaccaagcaagagtttattgcatctcttaggaggaaaagtagcggtttttcgagaggagcttcaatatatagaggtgtcacaaggcatcatcaacaaggtcgctggcaagcaagaatcggccgtgtcgcaggaaacaaagatctttacctcggaacctttgcaaccgaagaggaagcagcagaggcttatgacattgcagccataaagttcagaggaatcaacgcagtaactaactttgagatgaacaggtatgacattgaagctgtcatgaatagttctttacctgtaggaggagcagctgcgaaacgccacaaactcaaactcgctcttgaatctccttcttcatcatcctctgaccataacctccaacaacaacagttgcttccgtcctcttctccctcggatcaaaaccctaactcaatcccatgtggcattccatttgagccttcagttctctattaccaccagaacttctttcagcattatcctttggtctctgactctacaattcaagctcctatgaaccaagctgagtttttcttgtggcctaaccagtcttactaa

SEQ ID NO: 73013 - protein, 437 aa, Arabidopsis thaliana
  peptide (1)..(437): Ceres Seq. ID no. 4953787
  misc_feature (171)..(241): Pfam Name: AP2 domain Pfam Description: AP2 domain
  misc_feature (1)..(437): Homolog of NCBI NO: 15238491 NR Description: ovule development protein, putative; protein id:
  misc_feature (1)..(393): Homolog of NCBI NO: 15238174 NR Description: ovule development protein, putative; protein id:
  misc_feature (121)..(362): Homolog of NCBI NO: 9294411 NR Description: contains similarity to unknown
  misc_feature (121)..(362): Homolog of NCBI NO: 15232375 NR Description: ovule development protein, putative; protein id:
  misc_feature (143)..(406): Homolog of NCBI NO: 15223777 NR Description: ovule development protein, putative; protein id:
  misc_feature (143)..(406): Homolog of NCBI NO: 25405447 NR Description: hypothetical protein F11M15.6 [imported] - thaliana >gi|4836931|gb|AAD30633.1|AC006085_6 Hypothetical
  misc_feature (141)..(389): Homolog of NCBI NO: 15242120 NR Description: ovule development protein, putative; protein id: [Arabidopsis thaliana] >gi|9757933|dbj|BAB08476.1| contains to unknown protein~gb|AAD30633.1~gene_id:MSF19.5 [Arabidopsis
  misc_feature (160)..(369): Homolog of NCBI NO: 21304225 NR Description: aintegumenta-like protein [Oryza sativa]
  misc_feature (121)..(412): Homolog of NCBI NO: 21069051 NR Description: AP2/EREBP transcription factor BABY BOOM1 napus] >gi|21069055|gb|AAM33802.1| AP2/EREBP transcription factor
  misc_feature (93)..(355): Homolog of NCBI NO: 15237965 NR Description: ovule development protein, putative; protein id: [Arabidopsis thaliana] >gi|11358596|pir||T51580 ovule development
MADSTTLSTFFDHSQTQIPKLEDFLGDSFVRYSDNQTETQDSSSLTPFYDPRHRTVAEGVTGFFSDHHQPDFKTINSGPEIFDDSTTSNIGGTHLSSHVVESSTTAKLGFNGDCTTTGGVLSLGVNNTSDQPLSCNNGERGGNSNKKKTVSKKETSDDSKKKIVETLGQRTSIYRGVTRHRWTGRYEAHLWDNSCRREGQARKGRQGGYDKEDRAARAYDLAALKYWGSTATTNFPVSSYSKELEEMNHMTKQEFIASLRRKSSGFSRGASIYRGVTRHHQQGRWQARIGRVAGNKDLYLGTFATEEEAAEAYDIAAIKFRGINAVTNFEMNRYDIEAVMNSSLPVGGAAAKRHKLKLALESPSSSSSDHNLQQQQLLPSSSPSDQNPNSIPCGIPFEPSVLYYHQNFFQHYPLVSDSTIQAPMNQAEFFLWPNQSY

SEQ ID NO: 73014 - DNA, 3192 bp, Arabidopsis thaliana
  misc_feature (1)..(3192): Ceres Seq. ID no. 4953852
  misc_feature: MA Experiment ID: 20000307 Result: Up-regulated in Transcription
  misc_feature: MA Experiment 20000307 PARAMETER Experiment Name: At_Germinating_Seeds_Sub_P Parameter: Age (hr) Value: 24 vs. 0
  misc_feature: MA Experiment 20000307 PARAMETER Experiment Name: At_Germinating_Seeds_Sub_P Parameter: Organism Value: A. thaliana
  misc_feature: MA Experiment 20000307 PARAMETER Experiment Name: At_Germinating_Seeds_Sub_P Parameter: Plant Line Value: WS
  misc_feature: MA Experiment 20000307 PARAMETER Experiment Name: At_Germinating_Seeds_Sub_P Parameter: Tissue Value: Germinating Seeds
  misc_feature: MA Experiment ID: 20000440 Result: Up-regulated in Transcription
  misc_feature: MA Experiment 20000440 PARAMETER Experiment Name: At_Closed-Flower__Sub_P Parameter: Tissue Value: Closed Flower vs. Whole Plant
atgactacagaagatgatgatcagatgctaggaccaagcggcacccaggaaaagatctatgtttctgttcgtatgcgacctttaaacgacaaggaaaagtttaggaatgatgtccctgactgggagtgcatcaacaatactaccatcatttacaggagtcatctttctatctccgagcgttccatgtatccttctgcttacacatttgacagagtgtttagccctgagtgttgtacaaggcaggtgtatgaacaaggggcaaaggaagtcgctttctctgttgtcagtggcgttaatgctagtgtattcgcatatgggcaaacaagcagtggaaagacgtacactatgagcggaattactgactgcgccttggttgatatatatggctacattgacaagcacaaggaaagagaattcattcttaagttctctgctatggagatctacaatgagtctgtaagagatctcttaagtacagatactagtccactcagacttttagatgaccctgagaaagggacagttgttgagaaactcacagaggaaactctgcgagactggaatcatttcaaggagctcctatctgtctgcaaagcacaaaggcaaattggtgagacagctctaaatgaagttagctcccggtctcatcagattttgagattgacagtagaaagcatagctcgtgaattttctaccaatgataagtttagtactctaacagcgacagtgaacttcattgatcttgctggaagtgaacgtgcgtctcaatcattatcagccggcacaaggttaaaagaaggttgtcatataaaccgaagtttgttaacactgggaactgtgatccgtaagctaagtaaagaaaaaactgggcacattccattcagagattcaaaactgacacgcatacttcagtcttctttgggaggaaatgcaagaactgccataatttgcactatgagtcctgcgagaatccatgttgaacaatcaagaaacacactgttatttgcaagctgcgcaaaggaggtgacaacaaatgcacaagtcaatgttgtcatgtctgataaagctttagtaaagcacttgcagagggagttggctaaactggaaagtgagttgagaagccctagtcaggcttcaattgtttctgacacaactgcattactgacggagaaagaccttgaggttgaaaagcttaagaaagaggtattccaactagcacaacaactagagcaagctcgttccgagattaaggatcttcgacgaatggttgaagaagaaaaaaaccaagaaaaagagacgctatcaacagaaacagaagggttaaatgttctgatggaacatcaataccccaagctgcgggtgcgcaggacatgggactctgagaatacaacaccactgagccctatatcagctcaccgttccagtatatctccacgatcaactgaatatagttatgaagagaatgtctttcagctatcagatttcaggatagattctgcatcaagtagtccgcaacagcttgcgtttgtaactcctttccttaaggttccacttgatgatattcacgtgacagatactgtagaccaatctcatgttcacaaagaggaagctatagaagaacctcatgttcaggaggaacggttttatgaaatggctgaacacactgacggaaattctgaggataactgcagggaagttcggtgcatagaaacagagaagtcagatattagtataggtccagtggaaaatatgccggagagcagtccagacaaatacgaggctgtaactgcagaagaaccagtatctgtgacagagccaaagaacttacaacatccgacagaagaagcagtatgtgtgacagagacaaagaacttacaacatcccacagaagctgaaaacgaagaagaagaagaagaagaaagagtaaaggaagtcagtggtgcttctcctgaaccaaaacaagaaagcaacctcacaaaaaatcctgcattgtgtgatttggaatgttcacctgatgagtttgatacaagcatgtctaacctgagtagaatctcaacacctccagcccttatcactccctctcctgaaaagcctttctcttggattatggagagagattcacaacttttcagaggaatgaagctgactagaagtcgaagctgccgaccaagcttattatcgagcccttcctcctcttggttagagaaagatgctgatacaccgccaagctggtacgacaaagaatttatcaaaacagctgagagaaacttgacaatgtgcgacatcaagaaccagagattgttgcaggatgagtttagtgggaggagcatgccaacaacttggttcgagagaagcttgagtgacactcaaacggtggatgctgcttcacatggtgtcagcaacgaaatgtcgccaaatgaatcaccatttcggccatctgatgcttctgtgtttgagctccagacaagtggtagagcttcaataagccaggacagaacagaggagactgctgctcaaaaagacaagcaaatcattcatcgatcgatggaggaaagggaacagaagttcttggcctcgaattcaacgaagagtttcaaggacgcagcaatggacccaatacaagactacttagacacggccttgaattggccagtggagttcaagaggctacagagggagataatagagctatggcacgtgtgtaaagtctcaatggcacacagaagctacttcttccttctgttcagaggagatcagaaagattgcttgtacttggaggtagagctccgtagacttaagtacatcagagaatctttcgcccaaaatagcaacgatggcaacaatatgaccctaatctcctgcacgagggcattgacgagggagaggtataagctgagcaagctgatgcagaggaaactgtcgaaagaagagagagagaacttgttcttgagatggggcattgggctcaacacgaatcacagacgggtccagctggcgcgtcgtctctggtcggattacaaagacatgggtcatgtccgagagagcgcctccctcgttggtaagctcaatgggttcgtggacatgaagttgacttccacagagatgtttggcgtcaactatgctttcagaccaccacgtcccaagaaatctagtctttggaaacgcagcgttttgtccctctcctttttgtaa

SEQ ID NO: 73015 - protein, 1063 aa, Arabidopsis thaliana
  peptide (1)..(1063): Ceres Seq. ID no. 4953853
  misc_feature (6)..(673): Homolog of NCBI NO: 11357626 NR Description: hypothetical protein F24M12.190 - Arabidopsis >gi|6562267|emb|CAB62637.1| putative protein [Arabidopsis
  misc_feature (1)..(425): Homolog of NCBI NO: 13937153 NR Description: AT5g66310/K1L20_9 [Arabidopsis thaliana]
  misc_feature (6)..(673): Homolog of NCBI NO: 30693419 NR Description: expressed protein [Arabidopsis thaliana]
  misc_feature (14)..(664): Homolog of NCBI NO: 18416291 NR Description: putative protein; protein id: At4g24170.1
  misc_feature (886)..(1056): Homolog of NCBI NO: 18416291 NR Description: putative protein; protein id: At4g24170.1
  misc_feature (14)..(664): Homolog of NCBI NO: 7487172 NR Description: hypothetical protein T19F6.160 - Arabidopsis >gi|5668645|emb|CAB51660.1| putative protein [Arabidopsis >gi|7269267|emb|CAB79327.1| putative protein [Arabidopsis
  misc_feature (886)..(1035): Homolog of NCBI NO: 7487172 NR Description: hypothetical protein T19F6.160 - Arabidopsis >gi|5668645|emb|CAB51660.1| putative protein [Arabidopsis >gi|7269267|emb|CAB79327.1| putative protein [Arabidopsis
  misc_feature (25)..(562): Homolog of NCBI NO: 15208467 NR Description: kinesin heavy chain [Zea mays]
  misc_feature (864)..(1060): Homolog of NCBI NO: 15208467 NR Description: kinesin heavy chain [Zea mays]
  misc_feature (12)..(424): Homolog of NCBI NO: 15234898 NR Description: kinesin like protein; protein id: At4g38950.1
MTTEDDDQMLGPSGTQEKIYVSVRMRPLNDKEKFRNDVPDWECINNTTIIYRSHLSISERSMYPSAYTFDRVFSPECCTRQVYEQGAKEVAFSVVSGVNASVFAYGQTSSGKTYTMSGITDCALVDIYGYIDKHKEREFILKFSAMEIYNESVRDLLSTDTSPLRLLDDPEKGTVVEKLTEETLRDWNHFKELLSVCKAQRQIGETALNEVSSRSHQILRLTVESIAREFSTNDKFSTLTATVNFIDLAGSERASQSLSAGTRLKEGCHINRSLLTLGTVIRKLSKEKTGHIPFRDSKLTRILQSSLGGNARTAIICTMSPARIHVEQSRNTLLFASCAKEVTTNAQVNVVMSDKALVKHLQRELAKLESELRSPSQASIVSDTTALLTEKDLEVEKLKKEVFQLAQQLEQARSEIKDLRRMVEEEKNQEKETLSTETEGLNVLMEHQYPKLRVRRTWDSENTTPLSPISAHRSSISPRSTEYSYEENVFQLSDFRIDSASSSPQQLAFVTPFLKVPLDDIHVTDTVDQSHVHKEEAIEEPHVQEERFYEMAEHTDGNSEDNCREVRCIETEKSDISIGPVENMPESSPDKYEAVTAEEPVSVTEPKNLQHPTEEAVCVTETKNLQHPTEAENEEEEEEERVKEVSGASPEPKQESNLTKNPALCDLECSPDEFDTSMSNLSRISTPPALITPSPEKPFSWIMERDSQLFRGMKLTRSRSCRPSLLSSPSSSWLEKDADTPPSWYDKEFIKTAERNLTMCDIKNQRLLQDEFSGRSMPTTWFERSLSDTQTVDAASHGVSNEMSPNESPFRPSDASVFELQTSGRASISQDRTEETAAQKDKQIIHRSMEEREQKFLASNSTKSFKDAAMDPIQDYLDTALNWPVEFKRLQREIIELWHVCKVSMAHRSYFFLLFRGDQKDCLYLEVELRRLKYIRESFAQNSNDGNNMTLISCTRALTRERYKLSKLMQRKLSKEERENLFLRWGIGLNTNHRRVQLARRLWSDYKDMGHVRESASLVGKLNGFVDMKLTSTEMFGVNYAFRPPRPKKSSLWKRSVLSLSFL

SEQ ID NO: 73016 - protein, 1055 aa, Arabidopsis thaliana
  peptide (1)..(1055): Ceres Seq. ID no. 4953854
  misc_feature (1)..(665): Homolog of NCBI NO: 11357626 NR Description: hypothetical protein F24M12.190 - Arabidopsis >gi|6562267|emb|CAB62637.1| putative protein [Arabidopsis
  misc_feature (1)..(417): Homolog of NCBI NO: 13937153 NR Description: AT5g66310/K1L20_9 [Arabidopsis thaliana]
  misc_feature (1)..(665): Homolog of NCBI NO: 30693419 NR Description: expressed protein [Arabidopsis thaliana]
  misc_feature (6)..(656): Homolog of NCBI NO: 18416291 NR Description: putative protein; protein id: At4g24170.1
  misc_feature (878)..(1048): Homolog of NCBI NO: 18416291 NR Description: putative protein; protein id: At4g24170.1
  misc_feature (6)..(656): Homolog of NCBI NO: 7487172 NR Description: hypothetical protein T19F6.160 - Arabidopsis >gi|5668645|emb|CAB51660.1| putative protein [Arabidopsis >gi|7269267|emb|CAB79327.1| putative protein [Arabidopsis
  misc_feature (878)..(1027): Homolog of NCBI NO: 7487172 NR Description: hypothetical protein T19F6.160 - Arabidopsis >gi|5668645|emb|CAB51660.1| putative protein [Arabidopsis >gi|7269267|emb|CAB79327.1| putative protein [Arabidopsis
  misc_feature (17)..(554): Homolog of NCBI NO: 15208467 NR Description: kinesin heavy chain [Zea mays]
  misc_feature (856)..(1052): Homolog of NCBI NO: 15208467 NR Description: kinesin heavy chain [Zea mays]
  misc_feature (4)..(416): Homolog of NCBI NO: 15234898 NR Description: kinesin like protein; protein id: At4g38950.1
MLGPSGTQEKIYVSVRMRPLNDKEKFRNDVPDWECINNTTIIYRSHLSISERSMYPSAYTFDRVFSPECCTRQVYEQGAKEVAFSVVSGVNASVFAYGQTSSGKTYTMSGITDCALVDIYGYIDKHKEREFILKFSAMEIYNESVRDLLSTDTSPLRLLDDPEKGTVVEKLTEETLRDWNHFKELLSVCKAQRQIGETALNEVSSRSHQILRLTVESIAREFSTNDKFSTLTATVNFIDLAGSERASQSLSAGTRLKEGCHINRSLLTLGTVIRKLSKEKTGHIPFRDSKLTRILQSSLGGNARTAIICTMSPARIHVEQSRNTLLFASCAKEVTTNAQVNVVMSDKALVKHLQRELAKLESELRSPSQASIVSDTTALLTEKDLEVEKLKKEVFQLAQQLEQARSEIKDLRRMVEEEKNQEKETLSTETEGLNVLMEHQYPKLRVRRTWDSENTTPLSPISAHRSSISPRSTEYSYEENVFQLSDFRIDSASSSPQQLAFVTPFLKVPLDDIHVTDTVDQSHVHKEEAIEEPHVQEERFYEMAEHTDGNSEDNCREVRCIETEKSDISIGPVENMPESSPDKYEAVTAEEPVSVTEPKNLQHPTEEAVCVTETKNLQHPTEAENEEEEEEERVKEVSGASPEPKQESNLTKNPALCDLECSPDEFDTSMSNLSRISTPPALITPSPEKPFSWIMERDSQLFRGMKLTRSRSCRPSLLSSPSSSWLEKDADTPPSWYDKEFIKTAERNLTMCDIKNQRLLQDEFSGRSMPTTWFERSLSDTQTVDAASHGVSNEMSPNESPFRPSDASVFELQTSGRASISQDRTEETAAQKDKQIIHRSMEEREQKFLASNSTKSFKDAAMDPIQDYLDTALNWPVEFKRLQREIIELWHVCKVSMAHRSYFFLLFRGDQKDCLYLEVELRRLKYIRESFAQNSNDGNNMTLISCTRALTRERYKLSKLMQRKLSKEERENLFLRWGIGLNTNHRRVQLARRLWSDYKDMGHVRESASLVGKLNGFVDMKLTSTEMFGVNYAFRPPRPKKSSLWKRSVLSLSFL

SEQ ID NO: 73017 - protein, 1039 aa, Arabidopsis thaliana
  peptide (1)..(1039): Ceres Seq. ID no. 4953855
  misc_feature (1)..(649): Homolog of NCBI NO: 11357626 NR Description: hypothetical protein F24M12.190 - Arabidopsis >gi|6562267|emb|CAB62637.1| putative protein [Arabidopsis
  misc_feature (1)..(401): Homolog of NCBI NO: 13937153 NR Description: AT5g66310/K1L20_9 [Arabidopsis thaliana]
  misc_feature (1)..(649): Homolog of NCBI NO: 30693419 NR Description: expressed protein [Arabidopsis thaliana]
  misc_feature (1)..(640): Homolog of NCBI NO: 18416291 NR Description: putative protein; protein id: At4g24170.1
  misc_feature (862)..(1032): Homolog of NCBI NO: 18416291 NR Description: putative protein; protein id: At4g24170.1
  misc_feature (1)..(640): Homolog of NCBI NO: 7487172 NR Description: hypothetical protein T19F6.160 - Arabidopsis >gi|5668645|emb|CAB51660.1| putative protein [Arabidopsis >gi|7269267|emb|CAB79327.1| putative protein [Arabidopsis
  misc_feature (862)..(1011): Homolog of NCBI NO: 7487172 NR Description: hypothetical protein T19F6.160 - Arabidopsis >gi|5668645|emb|CAB51660.1| putative protein [Arabidopsis >gi|7269267|emb|CAB79327.1| putative protein [Arabidopsis
  misc_feature (1)..(538): Homolog of NCBI NO: 15208467 NR Description: kinesin heavy chain [Zea mays]
  misc_feature (840)..(1036): Homolog of NCBI NO: 15208467 NR Description: kinesin heavy chain [Zea mays]
  misc_feature (1)..(400): Homolog of NCBI NO: 15234898 NR Description: kinesin like protein; protein id: At4g38950.1
MRPLNDKEKFRNDVPDWECINNTTIIYRSHLSISERSMYPSAYTFDRVFSPECCTRQVYEQGAKEVAFSVVSGVNASVFAYGQTSSGKTYTMSGITDCALVDIYGYIDKHKEREFILKFSAMEIYNESVRDLLSTDTSPLRLLDDPEKGTVVEKLTEETLRDWNHFKELLSVCKAQRQIGETALNEVSSRSHQILRLTVESIAREFSTNDKFSTLTATVNFIDLAGSERASQSLSAGTRLKEGCHINRSLLTLGTVIRKLSKEKTGHIPFRDSKLTRILQSSLGGNARTAIICTMSPARIHVEQSRNTLLFASCAKEVTTNAQVNVVMSDKALVKHLQRELAKLESELRSPSQASIVSDTTALLTEKDLEVEKLKKEVFQLAQQLEQARSEIKDLRRMVEEEKNQEKETLSTETEGLNVLMEHQYPKLRVRRTWDSENTTPLSPISAHRSSISPRSTEYSYEENVFQLSDFRIDSASSSPQQLAFVTPFLKVPLDDIHVTDTVDQSHVHKEEAIEEPHVQEERFYEMAEHTDGNSEDNCREVRCIETEKSDISIGPVENMPESSPDKYEAVTAEEPVSVTEPKNLQHPTEEAVCVTETKNLQHPTEAENEEEEEEERVKEVSGASPEPKQESNLTKNPALCDLECSPDEFDTSMSNLSRISTPPALITPSPEKPFSWIMERDSQLFRGMKLTRSRSCRPSLLSSPSSSWLEKDADTPPSWYDKEFIKTAERNLTMCDIKNQRLLQDEFSGRSMPTTWFERSLSDTQTVDAASHGVSNEMSPNESPFRPSDASVFELQTSGRASISQDRTEETAAQKDKQIIHRSMEEREQKFLASNSTKSFKDAAMDPIQDYLDTALNWPVEFKRLQREIIELWHVCKVSMAHRSYFFLLFRGDQKDCLYLEVELRRLKYIRESFAQNSNDGNNMTLISCTRALTRERYKLSKLMQRKLSKEERENLFLRWGIGLNTNHRRVQLARRLWSDYKDMGHVRESASLVGKLNGFVDMKLTSTEMFGVNYAFRPPRPKKSSLWKRSVLSLSFL

SEQ ID NO: 73018 - DNA, 879 bp, Arabidopsis thaliana
  misc_feature (1)..(879): Ceres Seq. ID no. 4953856
  misc_feature: MA Experiment ID: 20000185 Result: Up-regulated in Transcription
  misc_feature: MA Experiment 20000185 PARAMETER Experiment Name: At_Roots__P Parameter: Age (day) Value: 7 vs. 21
  misc_feature: MA Experiment 20000185 PARAMETER Experiment Name: At_Roots__P Parameter: Organism Value: A. thaliana
  misc_feature: MA Experiment 20000185 PARAMETER Experiment Name: At_Roots__P Parameter: Tissue Value: Roots vs. Whole Plant
  misc_feature: MA Experiment ID: 20001451 Result: Up-regulated in Transcription
  misc_feature: MA Experiment 20001451 PARAMETER Experiment Name: At_Far-red-induction_P Parameter: Age (day) Value: 7
  misc_feature: MA Experiment 20001451 PARAMETER Experiment Name: At_Far-red-induction_P Parameter: Light Value: Far-red vs. White
  misc_feature: MA Experiment 20001451 PARAMETER Experiment Name: At_Far-red-induction_P Parameter: Organism Value: A. thaliana
  misc_feature: MA Experiment 20001451 PARAMETER Experiment Name: At_Far-red-induction_P Parameter: Plant Line Value: Columbia
  misc_feature: MA Experiment 20001451 PARAMETER Experiment Name: At_Far-red-induction_P Parameter: Timepoint (hr) Value: 24
  misc_feature: MA Experiment 20001451 PARAMETER Experiment Name: At_Far-red-induction_P Parameter: Tissue Value: Whole Plant
atgatgaaggttgatcaagattattcgtgtagtataccgcctggatttaggtttcatccgacagatgaagaacttgtcggatattatctcaagaagaaaatcgcctcccagaggattgatctcgacgttatcagagaaattgatctttacaagatcgaaccatgggatctacaagagagatgtaggatagggtacgaggagcaaacggagtggtatttcttcagccatagagacaagaagtatccgactgggactaggacaaaccgagccaccgtggccggtttctggaaagcaacgggccgggacaaggcggtttacctcaactccaaacttatcggtatgagaaaaacgcttgtcttttaccgaggtcgagcgcctaatggccaaaagtccgattggatcattcacgaatactacagcctcgagtcacaccagaactctcctccacaggaagaaggatgggtagtgtgtagagcatttaagaaacgaacgaccatcccaacaaaaaggaggcaactttgggatccgaactgcttattctacgacgacgccactctcttggaacctctcgacaagcgagccagacataatcctgattttaccgccacaccgttcaagcaagaactactctccgaggccagtcacgtccaggatggagatttcggatctatgtaccttcaatgcatcgatgatgatcaattctcccagcttcctcagctcgagagcccctctcttccgtcggaaataactccccatagtactactttttctgagaacagtagccggaaagatgacatgagctccgagaagaggatcactgactggagatatctagataagttcgtggcgtctcaatttttgatgagtggagaagactaa

SEQ ID NO: 73019 - protein, 292 aa, Arabidopsis thaliana
  peptide (1)..(292): Ceres Seq. ID no. 4953857
  misc_feature (12)..(142): Pfam Name: No apical meristem (NAM) protein Pfam Description: No apical meristem (NAM) protein
  misc_feature (1)..(292): Homolog of NCBI NO: 15239338 NR Description: NAM (no apical meristem)-like protein; protein At5g66300.1 [Arabidopsis thaliana] >gi|10177424|dbj|BAB10709.1|
  misc_feature (1)..(255): Homolog of NCBI NO: 15234325 NR Description: NAM like protein; protein id: At4g36160.1
  misc_feature (9)..(270): Homolog of NCBI NO: 15227958 NR Description: putative NAM (no apical meristem)-like protein; id: At2g18060.1 [Arabidopsis thaliana] >gi|25352296|pir||G84559
  misc_feature (9)..(291): Homolog of NCBI NO: 34902254 NR Description: Putative NAM-like protein [Oryza sativa (japonica
  misc_feature (4)..(287): Homolog of NCBI NO: 15217612 NR Description: NAM-like protein; protein id: At1g71930.1,
  misc_feature (12)..(183): Homolog of NCBI NO: 15221256 NR Description: unknown protein; protein id: At1g12260.1
  misc_feature (12)..(183): Homolog of NCBI NO: 15221554 NR Description: unknown protein; protein id: At1g62700.1
  misc_feature (12)..(171): Homolog of NCBI NO: 24413978 NR Description: NAM-like protein [Oryza sativa (japonica
  misc_feature (12)..(183): Homolog of NCBI NO: 25402716 NR Description: hypothetical protein [imported] - Arabidopsis >gi|10086508|gb|AAG12568.1|AC022522_1 Hypothetical protein
  misc_feature (12)..(278): Homolog of NCBI NO: 38637051 NR Description: putative OsNAC7 protein [Oryza sativa (japonica
MMKVDQDYSCSIPPGFRFHPTDEELVGYYLKKKIASQRIDLDVIREIDLYKIEPWDLQERCRIGYEEQTEWYFFSHRDKKYPTGTRTNRATVAGFWKATGRDKAVYLNSKLIGMRKTLVFYRGRAPNGQKSDWIIHEYYSLESHQNSPPQEEGWVVCRAFKKRTTIPTKRRQLWDPNCLFYDDATLLEPLDKRARHNPDFTATPFKQELLSEASHVQDGDFGSMYLQCIDDDQFSQLPQLESPSLPSEITPHSTTFSENSSRKDDMSSEKRITDWRYLDKFVASQFLMSGED

SEQ ID NO: 73020 - protein, 291 aa, Arabidopsis thaliana
  peptide (1)..(291): Ceres Seq. ID no. 4953858
  misc_feature (11)..(141): Pfam Name: No apical meristem (NAM) protein Pfam Description: No apical meristem (NAM) protein
  misc_feature (1)..(291): Homolog of NCBI NO: 15239338 NR Description: NAM (no apical meristem)-like protein; protein At5g66300.1 [Arabidopsis thaliana] >gi|10177424|dbj|BAB10709.1|
  misc_feature (1)..(254): Homolog of NCBI NO: 15234325 NR Description: NAM like protein; protein id: At4g36160.1
  misc_feature (8)..(269): Homolog of NCBI NO: 15227958 NR Description: putative NAM (no apical meristem)-like protein; id: At2g18060.1 [Arabidopsis thaliana] >gi|25352296|pir||G84559
  misc_feature (8)..(290): Homolog of NCBI NO: 34902254 NR Description: Putative NAM-like protein [Oryza sativa (japonica
  misc_feature (3)..(286): Homolog of NCBI NO: 15217612 NR Description: NAM-like protein; protein id: At1g71930.1,
  misc_feature (11)..(182): Homolog of NCBI NO: 15221256 NR Description: unknown protein; protein id: At1g12260.1
  misc_feature (11)..(182): Homolog of NCBI NO: 15221554 NR Description: unknown protein; protein id: At1g62700.1
  misc_feature (11)..(170): Homolog of NCBI NO: 24413978 NR Description: NAM-like protein [Oryza sativa (japonica
  misc_feature (11)..(182): Homolog of NCBI NO: 25402716 NR Description: hypothetical protein [imported] - Arabidopsis >gi|10086508|gb|AAG12568.1|AC022522_1 Hypothetical protein
  misc_feature (11)..(277): Homolog of NCBI NO: 38637051 NR Description: putative OsNAC7 protein [Oryza sativa (japonica
MKVDQDYSCSIPPGFRFHPTDEELVGYYLKKKIASQRIDLDVIREIDLYKIEPWDLQERCRIGYEEQTEWYFFSHRDKKYPTGTRTNRATVAGFWKATGRDKAVYLNSKLIGMRKTLVFYRGRAPNGQKSDWIIHEYYSLESHQNSPPQEEGWVVCRAFKKRTTIPTKRRQLWDPNCLFYDDATLLEPLDKRARHNPDFTATPFKQELLSEASHVQDGDFGSMYLQCIDDDQFSQLPQLESPSLPSEITPHSTTFSENSSRKDDMSSEKRITDWRYLDKFVASQFLMSGED

SEQ ID NO: 73021 - protein, 179 aa, Arabidopsis thaliana
  peptide (1)..(179): Ceres Seq. ID no. 4953859
  misc_feature (1)..(179): Homolog of NCBI NO: 15239338 NR Description: NAM (no apical meristem)-like protein; protein At5g66300.1 [Arabidopsis thaliana] >gi|10177424|dbj|BAB10709.1|
  misc_feature (1)..(142): Homolog of NCBI NO: 15234325 NR Description: NAM like protein; protein id: At4g36160.1
  misc_feature (1)..(157): Homolog of NCBI NO: 15227958 NR Description: putative NAM (no apical meristem)-like protein; id: At2g18060.1 [Arabidopsis thaliana] >gi|25352296|pir||G84559
  misc_feature (1)..(178): Homolog of NCBI NO: 34902254 NR Description: Putative NAM-like protein [Oryza sativa (japonica
  misc_feature (1)..(174): Homolog of NCBI NO: 15217612 NR Description: NAM-like protein; protein id: At1g71930.1,
  misc_feature (1)..(70): Homolog of NCBI NO: 15221256 NR Description: unknown protein; protein id: At1g12260.1
  misc_feature (1)..(70): Homolog of NCBI NO: 15221554 NR Description: unknown protein; protein id: At1g62700.1
  misc_feature (1)..(58): Homolog of NCBI NO: 24413978 NR Description: NAM-like protein [Oryza sativa (japonica
  misc_feature (1)..(70): Homolog of NCBI NO: 25402716 NR Description: hypothetical protein [imported] - Arabidopsis >gi|10086508|gb|AAG12568.1|AC022522_1 Hypothetical protein
  misc_feature (1)..(165): Homolog of NCBI NO: 38637051 NR Description: putative OsNAC7 protein [Oryza sativa (japonica
MRKTLVFYRGRAPNGQKSDWIIHEYYSLESHQNSPPQEEGWVVCRAFKKRTTIPTKRRQLWDPNCLFYDDATLLEPLDKRARHNPDFTATPFKQELLSEASHVQDGDFGSMYLQCIDDDQFSQLPQLESPSLPSEITPHSTTFSENSSRKDDMSSEKRITDWRYLDKFVASQFLMSGED

SEQ ID NO: 73022 - DNA, 1216 bp, Arabidopsis thaliana
  misc_feature (1)..(1216): Ceres Seq. ID no. 4953911
  misc_feature: MA Experiment ID: 108573 Result: Up-regulated in Transcription
  misc_feature: MA Experiment 108573 PARAMETER Experiment Name: At_Drought_cDNA_P Parameter: Timepoint (hr) Value: 6
  misc_feature: MA Experiment 108573 PARAMETER Experiment Name: At_Drought_cDNA_P Parameter: Tissue Value: Aerial
  misc_feature: MA Experiment 108573 PARAMETER Experiment Name: At_Drought_cDNA_P Parameter: Treatment Value: Drought vs. No Drought
  misc_feature: MA Experiment ID: 20000113 Result: Up-regulated in Transcription
  misc_feature: MA Experiment 20000113 PARAMETER Experiment Name: At_42deg_Heat_cDNA_P Parameter: Temperature (deg C) Value: 42 vs. 22
  misc_feature: MA Experiment 20000113 PARAMETER Experiment Name: At_42deg_Heat_cDNA_P Parameter: Timepoint (hr) Value: 8
  misc_feature: MA Experiment 20000113 PARAMETER Experiment Name: At_42deg_Heat_cDNA_P Parameter: Tissue Value: Aerial
  misc_feature: Pfam Name: WD40 Pfam Description: WD domain, G-beta repeat
atcaccggcgatattggtttacgcgtcggagagatggttgagagagaggaccgagtttctttggaactcagcgaagaaattatacagagcatggaacctggcgccgttttcagagactataattgcaggatcagctcaattgactttcacaaaacttcgacttgtatggtgacagctagcgacgatgactcaattcgtctctatgatgttgccagcgccacatgtctgaagacaattaatagcaaaaagtatggtgttgatcttgtttgcttcacttctcatcctactactgtcatctactcttccagaaacggatgggacgactctctgaggcttctctctttgcacgataataagtacttgcgctacttcaaaggacatcatgacagagttgtttcgcttagcttgtgttctggtggggaatgcttcatctccggttcccttgatcgtactgttttgctttgggatcaaagggtcgagaaatgccagggtctcttacgagtccaaggaaggcctgctgcagcatatgatgatcaagggttaatttttgcaattgcctttggtggctacataagaatgtttgatgcccgtatgtacgaaaagggtccttttgaaatattttccgttggtggtgatctttctgaggcaaacgttgtgaaatttagtaatgatggaaggctcatgctgcttacaaccatggatggttttattcatgtgcttgactcgtttcgtggaactcttctgtccacatttagtgtgaaaccagtagctggagaatctacattggatgcagcctttagtcctgaagggatgtttgttgtttcaggttcaggtgatggtagtacccatgcatggggtgtaaggagcggaaaacaggtacatagttggatgggtttagggagtgagcccccagtcattaaatggggtccaggaagtcccatgtttgtgacaggctcttccgaacttgcttttgttatacccgacttatcgaaattgccagcttatgccattcggaaataggacgactatcacgtctgtgccatgtaaatgaggcctcatttggccttttggtttcagactttgttgtgggttatgccggtaacttatcccttgcactctgattaatatatatttgggtcttgtaacatgaagataaaccccaagtctttctaatgttgtaattcgtgtaatttacaagtttgactgtttctgactg

SEQ ID NO: 73023 - protein, 339 aa, Arabidopsis thaliana; identical to SEQ ID NO: 43146
  peptide (1)..(339): Ceres Seq. ID no. 4953912
  misc_feature: Pfam Name: WD40 Pfam Description: WD domain, G-beta repeat
  misc_feature (12)..(339): Homolog of NCBI NO: 30698206 NR Description: transducin / WD-40 repeat protein family
  misc_feature (11)..(339): Homolog of NCBI NO: 18425050 NR Description: WD repeat protein-like; protein id: At5g66240.1, by cDNA: 11277., supported by cDNA: gi_19698940 [Arabidopsis
  misc_feature (11)..(339): Homolog of NCBI NO: 21536827 NR Description: WD repeat protein-like [Arabidopsis thaliana]
  misc_feature (19)..(339): Homolog of NCBI NO: 28564824 NR Description: OSJNBb0005G07.13 [Oryza sativa (japonica
  misc_feature (22)..(336): Homolog of NCBI NO: 15241434 NR Description: putative protein; protein id: At5g14530.1, by cDNA: 232187. [Arabidopsis thaliana] >gi|11358037|pir||T48626
  misc_feature (21)..(329): Homolog of NCBI NO: 28277563 NR Description: Similar to RIKEN cDNA 9430077D24 gene [Danio
  misc_feature (28)..(329): Homolog of NCBI NO: 21618713 NR Description: RIKEN cDNA 9430077D24 gene [Mus musculus]
  misc_feature (19)..(327): Homolog of NCBI NO: 19920938 NR Description: CG17293-PA [Drosophila melanogaster]
  misc_feature (56)..(329): Homolog of NCBI NO: 34877546 NR Description: similar to CG17293-PA [Rattus norvegicus]
  misc_feature (20)..(273): Homolog of NCBI NO: 19112522 NR Description: trp-ast repeats containing protein

SEQ ID NO: 73024 - protein, 328 aa, Arabidopsis thaliana; identical to SEQ ID NO: 43147
  peptide (1)..(328): Ceres Seq. ID no. 4953913
  misc_feature: Pfam Name: WD40 Pfam Description: WD domain, G-beta repeat
  misc_feature (1)..(328): Homolog of NCBI NO: 30698206 NR Description: transducin / WD-40 repeat protein family
  misc_feature (1)..(328): Homolog of NCBI NO: 18425050 NR Description: WD repeat protein-like; protein id: At5g66240.1, by cDNA: 11277., supported by cDNA: gi_19698940 [Arabidopsis
  misc_feature (1)..(328): Homolog of NCBI NO: 21536827 NR Description: WD repeat protein-like [Arabidopsis thaliana]
  misc_feature (8)..(328): Homolog of NCBI NO: 28564824 NR Description: OSJNBb0005G07.13 [Oryza sativa (japonica
  misc_feature (11)..(325): Homolog of NCBI NO: 15241434 NR Description: putative protein; protein id: At5g14530.1, by cDNA: 232187. [Arabidopsis thaliana] >gi|11358037|pir||T48626
  misc_feature (10)..(318): Homolog of NCBI NO: 28277563 NR Description: Similar to RIKEN cDNA 9430077D24 gene [Danio
  misc_feature (17)..(318): Homolog of NCBI NO: 21618713 NR Description: RIKEN cDNA 9430077D24 gene [Mus musculus]
  misc_feature (8)..(316): Homolog of NCBI NO: 19920938 NR Description: CG17293-PA [Drosophila melanogaster]
  misc_feature (45)..(318): Homolog of NCBI NO: 34877546 NR Description: similar to CG17293-PA [Rattus norvegicus]
  misc_feature (9)..(262): Homolog of NCBI NO: 19112522 NR Description: trp-ast repeats containing protein

SEQ ID NO: 73025 - protein, 309 aa, Arabidopsis thaliana; identical to SEQ ID NO: 28628
  peptide (1)..(309): Ceres Seq. ID no. 4953914
  misc_feature: Pfam Name: WD40 Pfam Description: WD domain, G-beta repeat
  misc_feature (1)..(309): Homolog of NCBI NO: 30698206 NR Description: transducin / WD-40 repeat protein family
  misc_feature (1)..(309): Homolog of NCBI NO: 18425050 NR Description: WD repeat protein-like; protein id: At5g66240.1, by cDNA: 11277., supported by cDNA: gi_19698940 [Arabidopsis
  misc_feature (1)..(309): Homolog of NCBI NO: 21536827 NR Description: WD repeat protein-like [Arabidopsis thaliana]
  misc_feature (1)..(309): Homolog of NCBI NO: 28564824 NR Description: OSJNBb0005G07.13 [Oryza sativa (japonica
  misc_feature (1)..(306): Homolog of NCBI NO: 15241434 NR Description: putative protein; protein id: At5g14530.1, by cDNA: 232187. [Arabidopsis thaliana] >gi|11358037|pir||T48626
  misc_feature (1)..(299): Homolog of NCBI NO: 28277563 NR Description: Similar to RIKEN cDNA 9430077D24 gene [Danio
  misc_feature (1)..(299): Homolog of NCBI NO: 21618713 NR Description: RIKEN cDNA 9430077D24 gene [Mus musculus]
  misc_feature (1)..(297): Homolog of NCBI NO: 19920938 NR Description: CG17293-PA [Drosophila melanogaster]
  misc_feature (26)..(299): Homolog of NCBI NO: 34877546 NR Description: similar to CG17293-PA [Rattus norvegicus]
  misc_feature (1)..(243): Homolog of NCBI NO: 19112522 NR Description: trp-ast repeats containing protein

SEQ ID NO: 73026 - DNA, 987 bp, Arabidopsis thaliana
  misc_feature (1)..(987): Ceres Seq. ID no. 4953985
  misc_feature: MA Experiment ID: 108573 Result: Up-regulated in Transcription
  misc_feature: MA Experiment 108573 PARAMETER Experiment Name: At_Drought_cDNA_P Parameter: Timepoint (hr) Value: 6
  misc_feature: MA Experiment 108573 PARAMETER Experiment Name: At_Drought_cDNA_P Parameter: Tissue Value: Aerial
  misc_feature: MA Experiment 108573 PARAMETER Experiment Name: At_Drought_cDNA_P Parameter: Treatment Value: Drought vs. No Drought
  misc_feature: MA Experiment ID: 20000113 Result: Up-regulated in Transcription
  misc_feature: MA Experiment 20000113 PARAMETER Experiment Name: At_42deg_Heat_cDNA_P Parameter: Temperature (deg C) Value: 42 vs. 22
  misc_feature: MA Experiment 20000113 PARAMETER Experiment Name: At_42deg_Heat_cDNA_P Parameter: Timepoint (hr) Value: 8
  misc_feature: MA Experiment 20000113 PARAMETER Experiment Name: At_42deg_Heat_cDNA_P Parameter: Tissue Value: Aerial
  misc_feature: Pfam Name: WD40 Pfam Description: WD domain, G-beta repeat
atggttgagagagaggaccgagtttctttggaactcagcgaagaaattatacagagcatggaacctggcgccgttttcagagactataattgcaggatcagctcaattgactttcacaaaacttcgacttgtatggtgacagctagcgacgatgactcaattcgtctctatgatgttgccagcgccacatgtctgaagacaattaatagcaaaaagtatggtgttgatcttgtttgcttcacttctcatcctactactgtcatctactcttccagaaacggatgggacgactctctgaggcttctctctttgcacgataataagtacttgcgctacttcaaaggacatcatgacagagttgtttcgcttagcttgtgttctggtggggaatgcttcatctccggttcccttgatcgtactgttttgctttgggatcaaagggtcgagaaatgccagggtctcttacgagtccaaggaaggcctgctgcagcatatgatgatcaagggttaatttttgcaattgcctttggtggctacataagaatgtttgatgcccgtatgtacgaaaagggtccttttgaaatattttccgttggtggtgatctttctgaggcaaacgttgtgaaatttagtaatgatggaaggctcatgctgcttacaaccatggatggttttattcatgtgcttgactcgtttcgtggaactcttctgtccacatttagtgtgaaaccagtagctggagaatctacattggatgcagcctttagtcctgaagggatgtttgttgtttcaggttcaggtgatggtagtacccatgcatggggtgtaaggagcggaaaacaggtacatagttggatgggtttagggagtgagcccccagtcattaaatggggtccaggaagtcccatgtttgtgacaggctcttccgaacttgcttttgttatacccgacttatcgaaattgccagcttatgccattcggaaatag

SEQ ID NO: 73027 - protein, 328 aa, Arabidopsis thaliana; identical to SEQ ID NO: 43147
  peptide (1)..(328): Ceres Seq. ID no. 4953986
  misc_feature: Pfam Name: WD40 Pfam Description: WD domain, G-beta repeat
  misc_feature (1)..(328): Homolog of NCBI NO: 30698206 NR Description: transducin / WD-40 repeat protein family
  misc_feature (3)..(328): Homolog of NCBI NO: 18425050 NR Description: WD repeat protein-like; protein id: At5g66240.1, by cDNA: 11277., supported by cDNA: gi_19698940 [Arabidopsis
  misc_feature (3)..(328): Homolog of NCBI NO: 21536827 NR Description: WD repeat protein-like [Arabidopsis thaliana]
  misc_feature (8)..(328): Homolog of NCBI NO: 28564824 NR Description: OSJNBb0005G07.13 [Oryza sativa (japonica
  misc_feature (11)..(325): Homolog of NCBI NO: 15241434 NR Description: putative protein; protein id: At5g14530.1, by cDNA: 232187. [Arabidopsis thaliana] >gi|11358037|pir||T48626
  misc_feature (10)..(318): Homolog of NCBI NO: 28277563 NR Description: Similar to RIKEN cDNA 9430077D24 gene [Danio
  misc_feature (17)..(318): Homolog of NCBI NO: 21618713 NR Description: RIKEN cDNA 9430077D24 gene [Mus musculus]
  misc_feature (8)..(316): Homolog of NCBI NO: 19920938 NR Description: CG17293-PA [Drosophila melanogaster]
  misc_feature (10)..(322): Homolog of NCBI NO: 29727992 NR Description: similar to CG17293-PA [Homo sapiens]
  misc_feature (6)..(316): Homolog of NCBI NO: 31232763 NR Description: ENSANGP00000013183 [Anopheles gambiae]

SEQ ID NO: 73028 - protein, 309 aa, Arabidopsis thaliana; identical to SEQ ID NO: 28628
  peptide (1)..(309): Ceres Seq. ID no. 4953987
  misc_feature: Pfam Name: WD40 Pfam Description: WD domain, G-beta repeat
  misc_feature (1)..(309): Homolog of NCBI NO: 30698206 NR Description: transducin / WD-40 repeat protein family
  misc_feature (1)..(309): Homolog of NCBI NO: 18425050 NR Description: WD repeat protein-like; protein id: At5g66240.1, by cDNA: 11277., supported by cDNA: gi_19698940 [Arabidopsis
  misc_feature (1)..(309): Homolog of NCBI NO: 21536827 NR Description: WD repeat protein-like [Arabidopsis thaliana]
  misc_feature (1)..(309): Homolog of NCBI NO: 28564824 NR Description: OSJNBb0005G07.13 [Oryza sativa (japonica
  misc_feature (1)..(306): Homolog of NCBI NO: 15241434 NR Description: putative protein; protein id: At5g14530.1, by cDNA: 232187. [Arabidopsis thaliana] >gi|11358037|pir||T48626
  misc_feature (1)..(299): Homolog of NCBI NO: 28277563 NR Description: Similar to RIKEN cDNA 9430077D24 gene [Danio
  misc_feature (1)..(299): Homolog of NCBI NO: 21618713 NR Description: RIKEN cDNA 9430077D24 gene [Mus musculus]
  misc_feature (1)..(297): Homolog of NCBI NO: 19920938 NR Description: CG17293-PA [Drosophila melanogaster]
  misc_feature (1)..(303): Homolog of NCBI NO: 29727992 NR Description: similar to CG17293-PA [Homo sapiens]
  misc_feature (1)..(297): Homolog of NCBI NO: 31232763 NR Description: ENSANGP00000013183 [Anopheles gambiae]

SEQ ID NO: 73029 - protein, 284 aa, Arabidopsis thaliana; identical to SEQ ID NO: 28629
  peptide (1)..(284): Ceres Seq. ID no. 4953988
  misc_feature: Pfam Name: WD40 Pfam Description: WD domain, G-beta repeat
  misc_feature (1)..(284): Homolog of NCBI NO: 30698206 NR Description: transducin / WD-40 repeat protein family
  misc_feature (1)..(284): Homolog of NCBI NO: 18425050 NR Description: WD repeat protein-like; protein id: At5g66240.1, by cDNA: 11277., supported by cDNA: gi_19698940 [Arabidopsis
  misc_feature (1)..(284): Homolog of NCBI NO: 21536827 NR Description: WD repeat protein-like [Arabidopsis thaliana]
  misc_feature (1)..(284): Homolog of NCBI NO: 28564824 NR Description: OSJNBb0005G07.13 [Oryza sativa (japonica
  misc_feature (1)..(281): Homolog of NCBI NO: 15241434 NR Description: putative protein; protein id: At5g14530.1, by cDNA: 232187. [Arabidopsis thaliana] >gi|11358037|pir||T48626
  misc_feature (1)..(274): Homolog of NCBI NO: 28277563 NR Description: Similar to RIKEN cDNA 9430077D24 gene [Danio
  misc_feature (1)..(274): Homolog of NCBI NO: 21618713 NR Description: RIKEN cDNA 9430077D24 gene [Mus musculus]
  misc_feature (1)..(272): Homolog of NCBI NO: 19920938 NR Description: CG17293-PA [Drosophila melanogaster]
  misc_feature (1)..(278): Homolog of NCBI NO: 29727992 NR Description: similar to CG17293-PA [Homo sapiens]
  misc_feature (1)..(272): Homolog of NCBI NO: 31232763 NR Description: ENSANGP00000013183 [Anopheles gambiae]

SEQ ID NO: 73030 - DNA, 456 bp, Arabidopsis thaliana
  misc_feature (1)..(456): Ceres Seq. ID no. 4954302
  misc_feature: MA Experiment ID: 20000180 Result: Down-regulated in Transcription
  misc_feature: MA Experiment 20000180 PARAMETER Experiment Name: At_Germinating_Seeds_P Parameter: Age (hr) Value: 24 vs. 0
  misc_feature: MA Experiment 20000180 PARAMETER Experiment Name: At_Germinating_Seeds_P Parameter: Tissue Value: Germinating Seeds
  misc_feature: MA Experiment ID: 20000182 Result: Up-regulated in Transcription
  misc_feature: MA Experiment 20000182 PARAMETER Experiment Name: At_2mM_SA_P Parameter: Age (day) Value: 14
  misc_feature: MA Experiment 20000182 PARAMETER Experiment Name: At_2mM_SA_P Parameter: Organism Value: A. thaliana
  misc_feature: MA Experiment 20000182 PARAMETER Experiment Name: At_2mM_SA_P Parameter: Plant Line Value: WS
  misc_feature: MA Experiment 20000182 PARAMETER Experiment Name: At_2mM_SA_P Parameter: Timepoint (hr) Value: 6
  misc_feature: MA Experiment 20000182 PARAMETER Experiment Name: At_2mM_SA_P Parameter: Tissue Value: Aerial
  misc_feature: MA Experiment 20000182 PARAMETER Experiment Name: At_2mM_SA_P Parameter: Treatment Value: 2mM SA vs. No Treatment
  misc_feature: MA Experiment ID: 20000185 Result: Up-regulated in Transcription
  misc_feature: MA Experiment 20000185 PARAMETER Experiment Name: At_Roots__P Parameter: Age (day) Value: 7 vs. 21
  misc_feature: MA Experiment 20000185 PARAMETER Experiment Name: At_Roots__P Parameter: Organism Value: A. thaliana
  misc_feature: MA Experiment 20000185 PARAMETER Experiment Name: At_Roots__P Parameter: Tissue Value: Roots vs. Whole Plant
  misc_feature: MA Experiment ID: 20000227 Result: Down-regulated in Transcription
  misc_feature: MA Experiment 20000227 PARAMETER Experiment Name: At_Root-Tips-vs-Tops_P Parameter: Tissue Value: Root Tips vs. Root Tops
  misc_feature: MA Experiment ID: 20000439 Result: Up-regulated in Transcription
  misc_feature: MA Experiment 20000439 PARAMETER Experiment Name: At_Roots__P Parameter: Age (day) Value: 14 vs. 21
  misc_feature: MA Experiment 20000439 PARAMETER Experiment Name: At_Roots__P Parameter: Organism Value: A. thaliana
  misc_feature: MA Experiment 20000439 PARAMETER Experiment Name: At_Roots__P Parameter: Tissue Value: Roots vs. Whole Plant
  misc_feature: MA Experiment ID: 20000794 Result: Up-regulated in Transcription
  misc_feature: MA Experiment 20000794 PARAMETER Experiment Name: At_Petals_P Parameter: Age (day) Value: 23-25 days
  misc_feature: MA Experiment 20000794 PARAMETER Experiment Name: At_Petals_P Parameter: Plant Line Value: WS
  misc_feature: MA Experiment 20000794 PARAMETER Experiment Name: At_Petals_P Parameter: Tissue Value: Petals vs. Whole plant
  misc_feature: Pfam Name: Thioredoxin Pfam Description: Thioredoxin
atggcgtcaatttctctctcttcttctacggttccgtcgctgaattcgaaagaatcgtcaggtgtttctgctttcgcttctcgttctatctcggccgtcaaatttcagtttccggttcgtcggattgaagccaagaagcagacatttgactcatttgaggatctgcttgtgaactctgataaaccagttctagttgactattatgcaacctggtgtggtccttgccagttcatggttccaatactcaatgaagtgagtgaaaccctgaaagacaagatacaggtggtgaagattgataccgaaaaataccccagtattgctaataaatacaagattgaggcacttcctactttcatcctattcaaagatggggaaccttgtgatcgctttgagggtgctttgacggccaaacaactcattcaacgaattgaggattctctaaaagtgaagccatag

SEQ ID NO: 73031 - protein, 151 aa, Arabidopsis thaliana
  peptide (1)..(151): Ceres Seq. ID no. 4954303
  misc_feature: Pfam Name: Thioredoxin Pfam Description: Thioredoxin
  misc_feature (1)..(151): Homolog of NCBI NO: 15223728 NR Description: thioredoxin-like protein; protein id: At1g76760.1
  misc_feature (5)..(151): Homolog of NCBI NO: 38454080 NR Description: At1g76760 [Arabidopsis thaliana]
  misc_feature (7)..(150): Homolog of NCBI NO: 30693659 NR Description: thioredoxin family [Arabidopsis thaliana]
  misc_feature (44)..(150): Homolog of NCBI NO: 25405118 NR Description: hypothetical protein T10P12.4 [imported] - thaliana >gi|5080763|gb|AAD39273.1|AC007203_5 Hypothetical
  misc_feature (44)..(143): Homolog of NCBI NO: 23039598 NR Description: hypothetical protein [Trichodesmium erythraeum
  misc_feature (44)..(147): Homolog of NCBI NO: 23123943 NR Description: hypothetical protein [Nostoc punctiforme]
  misc_feature (44)..(144): Homolog of NCBI NO: 16331440 NR Description: thioredoxin M [Synechocystis sp. PCC 6803]
  misc_feature (15)..(143): Homolog of NCBI NO: 27763679 NR Description: thioredoxin y [Chlamydomonas reinhardtii]
  misc_feature (45)..(144): Homolog of NCBI NO: 17229385 NR Description: thioredoxin [Nostoc sp. PCC 7120]
  misc_feature (44)..(143): Homolog of NCBI NO: 22299829 NR Description: thioredoxin M [Thermosynechococcus elongatus BP-1]
MASISLSSSTVPSLNSKESSGVSAFASRSISAVKFQFPVRRIEAKKQTFDSFEDLLVNSDKPVLVDYYATWCGPCQFMVPILNEVSETLKDKIQVVKIDTEKYPSIANKYKIEALPTFILFKDGEPCDRFEGALTAKQLIQRIEDSLKVKP

SEQ ID NO: 73032 - DNA, 1443 bp, Arabidopsis thaliana
  misc_feature (1)..(1443): Ceres Seq. ID no. 4954349
  misc_feature: MA Experiment ID: 20000184 Result: Down-regulated in Transcription
  misc_feature: MA Experiment 20000184 PARAMETER Experiment Name: At_Shoots__P Parameter: Age (day) Value: 7
  misc_feature: MA Experiment 20000184 PARAMETER Experiment Name: At_Shoots__P Parameter: Tissue Value: Shoots vs. Whole Plant
  misc_feature: MA Experiment ID: 20001451 Result: Down-regulated in Transcription
  misc_feature: MA Experiment 20001451 PARAMETER Experiment Name: At_Far-red-induction_P Parameter: Age (day) Value: 7
  misc_feature: MA Experiment 20001451 PARAMETER Experiment Name: At_Far-red-induction_P Parameter: Light Value: Far-red vs. White
  misc_feature: MA Experiment 20001451 PARAMETER Experiment Name: At_Far-red-induction_P Parameter: Organism Value: A. thaliana
  misc_feature: MA Experiment 20001451 PARAMETER Experiment Name: At_Far-red-induction_P Parameter: Plant Line Value: Columbia
  misc_feature: MA Experiment 20001451 PARAMETER Experiment Name: At_Far-red-induction_P Parameter: Timepoint (hr) Value: 24
  misc_feature: MA Experiment 20001451 PARAMETER Experiment Name: At_Far-red-induction_P Parameter: Tissue Value: Whole Plant
atggcggatactgaaatgcaagagcaagatgtgccgtctggtaccaaaggtgttgtagaggagccttcagaactagagaaagacctaaactctattgaaagacctaagtcccctgttccagaggatacgactcatactttggatagtgatgttcatttatctgatgctcccattgctaatcaaattgaggctaatgaagaggttggtggtcagaacagtgttgatgggaggaatggtgatgttgatcagtctgaaaagaagattactagtgatggcggtcaagaggagacaacacttggggaatcaaatcctttgaagggggatccgtcgagtcctcatgttcctgaagaaagtgttaagaagtggaagacatggttgttgagtgatgctgaggccagggaagttgatgaagcaggggcaccacaggatcaagaggcgtttattaaagaagtggaggccttcaacaaggagaatttcctggaatttaaagccccaaagttttacggacagcccttaaattgtctcaagctttggagagccgttatcaagttaggtggctacgatgtggtcaccacatctaagctatggcggcaagttggagaatcgttccatcctccaaaaacatgcactacagtctcctggacattccgcattttctatgaaaaggcacttttggagtatgagaagcatttaaggcaaaatggtgagcttaaccttcctggttcagcttctcttccgtcttcaggcattgaaaaggaggcaagtagccatcaagcttcagggtcaggcagaacaagaagagatgctgcagctcgtgctatgcaaggttggcattctcagcgccttcttggatctggggaggttactgagcctattgttaaggagaaaggcttgaattcaaccccaaagcaaaagaacctcaaaaacattggtgtgcagaaacaaaaaacaacaaccggcatggaccttgttttttcacacgaatcagaaaaacagttacgaaagataatcatctcctgtatttttgtgttgcttatgcaagattgctttaccatgtgcaattccatacaatcttatccatcgaaaaaccctgcattgtcaatgtttggtagatcacaagcactgttttctgggtggtcaactgccgaggttatagatgttggaccccctgcagactgggtgaagatcaatgtcagagaaactaaagactgctttgagatatttgccctggtacctggacttcttcgcgaagaggtccgtgttcagtcagaccctgcagggcggctagttatagcaggccaacctgagcaacttgacaatccttggggaatcacacccttcaaaaaggttgtgaactttcccgcaagaatcgatccgctgcacacgtcagcggttgtgagcctgcatggtcgactgtttgtgcgagtcccatttgagcagtga

SEQ ID NO: 73033 - protein, 480 aa, Arabidopsis thaliana
  peptide (1)..(480): Ceres Seq. ID no. 4954350
  misc_feature (138)..(248): Pfam Name: ARID/BRIGHT DNA binding domain Pfam Description: ARID/BRIGHT DNA binding domain
  misc_feature (1)..(332): Homolog of NCBI NO: 30699177 NR Description: DNA-binding protein -related [Arabidopsis
  misc_feature (380)..(480): Homolog of NCBI NO: 30699177 NR Description: DNA-binding protein -related [Arabidopsis
  misc_feature (1)..(480): Homolog of NCBI NO: 25406449 NR Description: probable DNA-binding protein, 48797-45229
  misc_feature (111)..(338): Homolog of NCBI NO: 30687082 NR Description: expressed protein [Arabidopsis thaliana]
  misc_feature (382)..(480): Homolog of NCBI NO: 30687082 NR Description: expressed protein [Arabidopsis thaliana]
  misc_feature (16)..(311): Homolog of NCBI NO: 30679972 NR Description: expressed protein [Arabidopsis thaliana] At2g17400 [Arabidopsis thaliana] >gi|27363260|gb|AAO11549.1|
  misc_feature (384)..(480): Homolog of NCBI NO: 30679972 NR Description: expressed protein [Arabidopsis thaliana] At2g17400 [Arabidopsis thaliana] >gi|27363260|gb|AAO11549.1|
  misc_feature (223)..(480): Homolog of NCBI NO: 25518704 NR Description: hypothetical protein F9H16.11 - Arabidopsis >gi|4836898|gb|AAD30601.1|AC007369_11 Hypothetical protein
  misc_feature (111)..(176): Homolog of NCBI NO: 25518704 NR Description: hypothetical protein F9H16.11 - Arabidopsis >gi|4836898|gb|AAD30601.1|AC007369_11 Hypothetical protein
  misc_feature (384)..(480): Homolog of NCBI NO: 25411792 NR Description: hypothetical protein At2g17410 [imported] -
MADTEMQEQDVPSGTKGVVEEPSELEKDLNSIERPKSPVPEDTTHTLDSDVHLSDAPIANQIEANEEVGGQNSVDGRNGDVDQSEKKITSDGGQEETTLGESNPLKGDPSSPHVPEESVKKWKTWLLSDAEAREVDEAGAPQDQEAFIKEVEAFNKENFLEFKAPKFYGQPLNCLKLWRAVIKLGGYDVVTTSKLWRQVGESFHPPKTCTTVSWTFRIFYEKALLEYEKHLRQNGELNLPGSASLPSSGIEKEASSHQASGSGRTRRDAAARAMQGWHSQRLLGSGEVTEPIVKEKGLNSTPKQKNLKNIGVQKQKTTTGMDLVFSHESEKQLRKIIISCIFVLLMQDCFTMCNSIQSYPSKNPALSMFGRSQALFSGWSTAEVIDVGPPADWVKINVRETKDCFEIFALVPGLLREEVRVQSDPAGRLVIAGQPEQLDNPWGITPFKKVVNFPARIDPLHTSAVVSLHGRLFVRVPFEQ

SEQ ID NO: 73034 - protein, 475 aa, Arabidopsis thaliana
  peptide (1)..(475): Ceres Seq. ID no. 4954351
  misc_feature (133)..(243): Pfam Name: ARID/BRIGHT DNA binding domain Pfam Description: ARID/BRIGHT DNA binding domain
  misc_feature (1)..(327): Homolog of NCBI NO: 30699177 NR Description: DNA-binding protein -related [Arabidopsis
  misc_feature (375)..(475): Homolog of NCBI NO: 30699177 NR Description: DNA-binding protein -related [Arabidopsis
  misc_feature (1)..(475): Homolog of NCBI NO: 25406449 NR Description: probable DNA-binding protein, 48797-45229
  misc_feature (106)..(333): Homolog of NCBI NO: 30687082 NR Description: expressed protein [Arabidopsis thaliana]
  misc_feature (377)..(475): Homolog of NCBI NO: 30687082 NR Description: expressed protein [Arabidopsis thaliana]
  misc_feature (11)..(306): Homolog of NCBI NO: 30679972 NR Description: expressed protein [Arabidopsis thaliana] At2g17400 [Arabidopsis thaliana] >gi|27363260|gb|AAO11549.1|
  misc_feature (379)..(475): Homolog of NCBI NO: 30679972 NR Description: expressed protein [Arabidopsis thaliana] At2g17400 [Arabidopsis thaliana] >gi|27363260|gb|AAO11549.1|
  misc_feature (218)..(475): Homolog of NCBI NO: 25518704 NR Description: hypothetical protein F9H16.11 - Arabidopsis >gi|4836898|gb|AAD30601.1|AC007369_11 Hypothetical protein
  misc_feature (106)..(171): Homolog of NCBI NO: 25518704 NR Description: hypothetical protein F9H16.11 - Arabidopsis >gi|4836898|gb|AAD30601.1|AC007369_11 Hypothetical protein
  misc_feature (379)..(475): Homolog of NCBI NO: 25411792 NR Description: hypothetical protein At2g17410 [imported] -
MQEQDVPSGTKGVVEEPSELEKDLNSIERPKSPVPEDTTHTLDSDVHLSDAPIANQIEANEEVGGQNSVDGRNGDVDQSEKKITSDGGQEETTLGESNPLKGDPSSPHVPEESVKKWKTWLLSDAEAREVDEAGAPQDQEAFIKEVEAFNKENFLEFKAPKFYGQPLNCLKLWRAVIKLGGYDVVTTSKLWRQVGESFHPPKTCTTVSWTFRIFYEKALLEYEKHLRQNGELNLPGSASLPSSGIEKEASSHQASGSGRTRRDAAARAMQGWHSQRLLGSGEVTEPIVKEKGLNSTPKQKNLKNIGVQKQKTTTGMDLVFSHESEKQLRKIIISCIFVLLMQDCFTMCNSIQSYPSKNPALSMFGRSQALFSGWSTAEVIDVGPPADWVKINVRETKDCFEIFALVPGLLREEVRVQSDPAGRLVIAGQPEQLDNPWGITPFKKVVNFPARIDPLHTSAVVSLHGRLFVRVPFEQ

SEQ ID NO: 73035 - DNA, 810 bp, Arabidopsis thaliana
  misc_feature (1)..(810): Ceres Seq. ID no. 4954469
  misc_feature: MA Experiment ID: 20000495 Result: Down-regulated in Transcription
  misc_feature: MA Experiment 20000495 PARAMETER Experiment Name: At_Guard_Cells_P Parameter: Harvest Date Value: 8/2/2002
  misc_feature: MA Experiment 20000495 PARAMETER Experiment Name: At_Guard_Cells_P Parameter: Organism Value: A. thaliana
  misc_feature: MA Experiment 20000495 PARAMETER Experiment Name: At_Guard_Cells_P Parameter: Tissue Value: Guard Cells vs. Leaves
atggcggatgggtactggaaccagcagcgacagcaacatcatcctcctggtggtcctatgaaacgtccccgttccgatttcggtaagctcctgagtcctttcacgtttcctcaacacatagatagttatgctcctagtttgcttgaaataaacaatgcttgtcgtcttgtagaagctccatcatcaacaatgactatagggcacggtggtggttattatccgcgagatgaggatctcgatgttcccgatactagaactatcggttcagcttacgatcgctatctccagagcgtgcaatcaggagaaggtggttctgtttccatgggaagatcaggaggaggaggaggaggaggaggaggtaacgttcaaaccatagatgattttatgttgagacgtggtggagttctccctttagaccatggtccaaatggtcacaccattggttttgatcccccagaacctgttggtaggcgtaacctaccttcagatgcatccaacactttatatgttgaaggacttccttctaattgctctaggagggaagtagctcgatacagagaagtgagacttgtgaccaaagactccaaacatcggaacggagatcctattgttctttgctttgttgattttacaaaccctgcctgtgctgcgactgctctgagcgccttacaaggaaaccaggttcaagaccaggacaaagaggaagaaggtgatgactcagggacattgtggaaatatacatcctccctttccaagtataatctcaatgaaatcgcacattacatcacttatgtccttgaagcaacctga

SEQ ID NO: 73036 - protein, 269 aa, Arabidopsis thaliana
  peptide (1)..(269): Ceres Seq. ID no. 4954470
  misc_feature (168)..(234): Pfam Name: RNA recognition motif. (a.k.a. RRM, RBD, or RNP domain) Pfam Description: RNA recognition motif. (a.k.a. RRM, RBD, or RNP
  misc_feature (58)..(236): Homolog of NCBI NO: 30699215 NR Description: expressed protein [Arabidopsis thaliana]
  misc_feature (1)..(158): Homolog of NCBI NO: 25406479 NR Description: hypothetical protein F22K20.4 [imported] - thaliana >gi|2829909|gb|AAC00617.1| Hypothetical protein
  misc_feature (225)..(250): Homolog of NCBI NO: 25406479 NR Description: hypothetical protein F22K20.4 [imported] - thaliana >gi|2829909|gb|AAC00617.1| Hypothetical protein
  misc_feature (108)..(236): Homolog of NCBI NO: 26450151 NR Description: unknown protein [Arabidopsis thaliana]
  misc_feature (3)..(235): Homolog of NCBI NO: 25513502 NR Description: F16F4.3 protein - Arabidopsis thaliana
  misc_feature (97)..(234): Homolog of NCBI NO: 23304837 NR Description: RNA-binding protein [Medicago truncatula]
  misc_feature (71)..(184): Homolog of NCBI NO: 25553563 NR Description: OSJNBa0038F22.13 [Oryza sativa (japonica
  misc_feature (180)..(233): Homolog of NCBI NO: 25553563 NR Description: OSJNBa0038F22.13 [Oryza sativa (japonica
  misc_feature (3)..(235): Homolog of NCBI NO: 15218968 NR Description: hypothetical protein; protein id: At1g21320.1
  misc_feature (1)..(71): Homolog of NCBI NO: 30699215 NR Description: expressed protein [Arabidopsis thaliana]
MADGYWNQQRQQHHPPGGPMKRPRSDFGKLLSPFTFPQHIDSYAPSLLEINNACRLVEAPSSTMTIGHGGGYYPRDEDLDVPDTRTIGSAYDRYLQSVQSGEGGSVSMGRSGGGGGGGGGNVQTIDDFMLRRGGVLPLDHGPNGHTIGFDPPEPVGRRNLPSDASNTLYVEGLPSNCSRREVARYREVRLVTKDSKHRNGDPIVLCFVDFTNPACAATALSALQGNQVQDQDKEEEGDDSGTLWKYTSSLSKYNLNEIAHYITYVLEAT

SEQ ID NO: 73037 - protein, 250 aa, Arabidopsis thaliana
  peptide (1)..(250): Ceres Seq. ID no. 4954471
  misc_feature (149)..(215): Pfam Name: RNA recognition motif. (a.k.a. RRM, RBD, or RNP domain) Pfam Description: RNA recognition motif. (a.k.a. RRM, RBD, or RNP
  misc_feature (39)..(217): Homolog of NCBI NO: 30699215 NR Description: expressed protein [Arabidopsis thaliana]
  misc_feature (1)..(139): Homolog of NCBI NO: 25406479 NR Description: hypothetical protein F22K20.4 [imported] - thaliana >gi|2829909|gb|AAC00617.1| Hypothetical protein
  misc_feature (206)..(231): Homolog of NCBI NO: 25406479 NR Description: hypothetical protein F22K20.4 [imported] - thaliana >gi|2829909|gb|AAC00617.1| Hypothetical protein
  misc_feature (89)..(217): Homolog of NCBI NO: 26450151 NR Description: unknown protein [Arabidopsis thaliana]
  misc_feature (1)..(216): Homolog of NCBI NO: 25513502 NR Description: F16F4.3 protein - Arabidopsis thaliana
  misc_feature (78)..(215): Homolog of NCBI NO: 23304837 NR Description: RNA-binding protein [Medicago truncatula]
  misc_feature (52)..(165): Homolog of NCBI NO: 25553563 NR Description: OSJNBa0038F22.13 [Oryza sativa (japonica
  misc_feature (161)..(214): Homolog of NCBI NO: 25553563 NR Description: OSJNBa0038F22.13 [Oryza sativa (japonica
  misc_feature (1)..(216): Homolog of NCBI NO: 15218968 NR Description: hypothetical protein; protein id: At1g21320.1
  misc_feature (1)..(52): Homolog of NCBI NO: 30699215 NR Description: expressed protein [Arabidopsis thaliana]
MKRPRSDFGKLLSPFTFPQHIDSYAPSLLEINNACRLVEAPSSTMTIGHGGGYYPRDEDLDVPDTRTIGSAYDRYLQSVQSGEGGSVSMGRSGGGGGGGGGNVQTIDDFMLRRGGVLPLDHGPNGHTIGFDPPEPVGRRNLPSDASNTLYVEGLPSNCSRREVARYREVRLVTKDSKHRNGDPIVLCFVDFTNPACAATALSALQGNQVQDQDKEEEGDDSGTLWKYTSSLSKYNLNEIAHYITYVLEAT

SEQ ID NO: 73038 - protein, 206 aa, Arabidopsis thaliana
  peptide (1)..(206): Ceres Seq. ID no. 4954472
  misc_feature (105)..(171): Pfam Name: RNA recognition motif. (a.k.a. RRM, RBD, or RNP domain) Pfam Description: RNA recognition motif. (a.k.a. RRM, RBD, or RNP
  misc_feature (1)..(173): Homolog of NCBI NO: 30699215 NR Description: expressed protein [Arabidopsis thaliana]
  misc_feature (1)..(95): Homolog of NCBI NO: 25406479 NR Description: hypothetical protein F22K20.4 [imported] - thaliana >gi|2829909|gb|AAC00617.1| Hypothetical protein
  misc_feature (162)..(187): Homolog of NCBI NO: 25406479 NR Description: hypothetical protein F22K20.4 [imported] - thaliana >gi|2829909|gb|AAC00617.1| Hypothetical protein
  misc_feature (45)..(173): Homolog of NCBI NO: 26450151 NR Description: unknown protein [Arabidopsis thaliana]
  misc_feature (1)..(172): Homolog of NCBI NO: 25513502 NR Description: F16F4.3 protein - Arabidopsis thaliana
  misc_feature (34)..(171): Homolog of NCBI NO: 23304837 NR Description: RNA-binding protein [Medicago truncatula]
  misc_feature (8)..(121): Homolog of NCBI NO: 25553563 NR Description: OSJNBa0038F22.13 [Oryza sativa (japonica
  misc_feature (117)..(170): Homolog of NCBI NO: 25553563 NR Description: OSJNBa0038F22.13 [Oryza sativa (japonica
  misc_feature (1)..(172): Homolog of NCBI NO: 15218968 NR Description: hypothetical protein; protein id: At1g21320.1
MTIGHGGGYYPRDEDLDVPDTRTIGSAYDRYLQSVQSGEGGSVSMGRSGGGGGGGGGNVQTIDDFMLRRGGVLPLDHGPNGHTIGFDPPEPVGRRNLPSDASNTLYVEGLPSNCSRREVARYREVRLVTKDSKHRNGDPIVLCFVDFTNPACAATALSALQGNQVQDQDKEEEGDDSGTLWKYTSSLSKYNLNEIAHYITYVLEAT

SEQ ID NO: 73039 - DNA, 1404 bp, Arabidopsis thaliana
  misc_feature (1)..(1404): Ceres Seq. ID no. 4954572
  misc_feature: MA Experiment ID: 20000307 Result: Down-regulated in Transcription
  misc_feature: MA Experiment 20000307 PARAMETER Experiment Name: At_Germinating_Seeds_Sub_P Parameter: Age (hr) Value: 24 vs. 0
  misc_feature: MA Experiment 20000307 PARAMETER Experiment Name: At_Germinating_Seeds_Sub_P Parameter: Organism Value: A. thaliana
  misc_feature: MA Experiment 20000307 PARAMETER Experiment Name: At_Germinating_Seeds_Sub_P Parameter: Plant Line Value: WS
  misc_feature: MA Experiment 20000307 PARAMETER Experiment Name: At_Germinating_Seeds_Sub_P Parameter: Tissue Value: Germinating Seeds
  misc_feature: MA Experiment ID: 20000315 Result: Down-regulated in Transcription
  misc_feature: MA Experiment 20000315 PARAMETER Experiment Name: At_14day_Shoots-Roots_Sub_P Parameter: Age (day) Value: 14
  misc_feature: MA Experiment 20000315 PARAMETER Experiment Name: At_14day_Shoots-Roots_Sub_P Parameter: Organism Value: A. thaliana
  misc_feature: MA Experiment 20000315 PARAMETER Experiment Name: At_14day_Shoots-Roots_Sub_P Parameter: Plant Line Value: WS
  misc_feature: MA Experiment 20000315 PARAMETER Experiment Name: At_14day_Shoots-Roots_Sub_P Parameter: Tissue Value: Shoots vs. Whole Plant
  misc_feature: MA Experiment ID: 20000328 Result: Down-regulated in Transcription
  misc_feature: MA Experiment 20000328 PARAMETER Experiment Name: At_42deg_Heat_Sub_P Parameter: Age (day) Value: 14
  misc_feature: MA Experiment 20000328 PARAMETER Experiment Name: At_42deg_Heat_Sub_P Parameter: Organism Value: A. thaliana
  misc_feature: MA Experiment 20000328 PARAMETER Experiment Name: At_42deg_Heat_Sub_P Parameter: Plant Line Value: WS
  misc_feature: MA Experiment 20000328 PARAMETER Experiment Name: At_42deg_Heat_Sub_P Parameter: Temperature (deg C) Value: 42 vs. 22
  misc_feature: MA Experiment 20000328 PARAMETER Experiment Name: At_42deg_Heat_Sub_P Parameter: Timepoint (hr) Value: 6
  misc_feature: MA Experiment 20000328 PARAMETER Experiment Name: At_42deg_Heat_Sub_P Parameter: Tissue Value: Aerial
atgttcttctctggtcttatctccaagcttcatgttcatggtactaagagaacaaatcacttcacgatctttcaccgtttgaatcatttcgtcactacatcatcttcctcggttacgcctctttcgcctcaagatcgaaacaaactcttagctactctgttatcaaactgcactagcctagctcgtgttcgtcggatccatggtgacatcttccgttcacgaatcctcgatcaatatccgatcgctttcttatggaacaacatcatgcgatcttacattcgccatgagtctcctctcgatgcaattcaagtatatctcggtatggtgagatcgactgttttacccgatcgatattctcttccgattgtaatcaaagcagccgttcaaattcatgattttacgttgggaaaggagcttcattccgtcgccgttaggttagggttcgtcggagatgagttctgcgagagtgggttcattacattgtattgtaaagcaggggaatttgagaacgcacgtaaggtgttcgatgaaaatcctgagagaaagctggggtcttggaacgccattatcggagggttgaatcacgctggtcgagctaacgaggcggtggaaatgtttgtggatatgaaaaggagtggacttgagcctgatgatttcactatggttagtgtgactgcttcttgtggaggattaggtgacttgagcttggcttttcagttgcataaatgcgttctacaagctaagaccgaagagaagtctgatatcatgatgctgaattcgctcattgatatgtatggaaaatgtgggcgtatggatttagcgagtcacatattcgaggaaatgcgacagagaaacgttgtctcttggagttctatgatcgtgggttacgcagctaacgggaatacattagaggctttagaatgctttcgtcagatgagagaattcggtgtcagaccaaacaagatcacgttcgttggagttctcagtgcttgcgtccatggaggtcttgtggaggaaggaaaaacatattttgcgatgatgaagtcagagttcgagctagaaccgggattatcgcattacggatgcatagttgatctattgagccgtgacgggcagcttaaggaggcaaagaaagttgttgaggagatgccgatgaagcctaacgtgatggtttggggttgtttgatgggagggtgtgagaagtttggggatgttgagatggctgagtgggtggctccatacatggttgagcttgagccgtggaacgatggtgtttatgttgtcttggctaatgtgtatgcactcagagggatgtggaaagatgttgagagagttaggaagttgatgaagacgaagaaggttgctaagattcctgcctatagctatgcttcaacgacattttga

SEQ ID NO: 73040 - protein, 467 aa, Arabidopsis thaliana
  peptide (1)..(467): Ceres Seq. ID no. 4954573
  misc_feature (359)..(392): Pfam Name: PPR repeat Pfam Description: PPR repeat
  misc_feature (1)..(467): Homolog of NCBI NO: 15223858 NR Description: hypothetical protein; protein id: At1g77170.1
  misc_feature (80)..(461): Homolog of NCBI NO: 7486979 NR Description: hypothetical protein T13K14.230 - Arabidopsis
  misc_feature (45)..(461): Homolog of NCBI NO: 15226299 NR Description: hypothetical protein; protein id: At2g01510.1
  misc_feature (82)..(461): Homolog of NCBI NO: 8778758 NR Description: T30E16.32 [Arabidopsis thaliana]
  misc_feature (82)..(461): Homolog of NCBI NO: 15218900 NR Description: hypothetical protein; protein id: At1g59720.1
  misc_feature (82)..(461): Homolog of NCBI NO: 25346319 NR Description: hypothetical protein F23H11.3 [imported] - thaliana >gi|5080805|gb|AAD39314.1|AC007258_3 Hypothetical
  misc_feature (42)..(456): Homolog of NCBI NO: 9279581 NR Description: emb|CAB66100.1~gene_id:MLN21.12~strong similarity
  misc_feature (42)..(456): Homolog of NCBI NO: 15231831 NR Description: hypothetical protein; protein id: At3g14330.1
  misc_feature (85)..(462): Homolog of NCBI NO: 38175558 NR Description: putative pentatricopeptide (PPR)
  misc_feature (80)..(461): Homolog of NCBI NO: 15227067 NR Description: hypothetical protein; protein id: At2g02980.1
MFFSGLISKLHVHGTKRTNHFTIFHRLNHFVTTSSSSVTPLSPQDRNKLLATLLSNCTSLARVRRIHGDIFRSRILDQYPIAFLWNNIMRSYIRHESPLDAIQVYLGMVRSTVLPDRYSLPIVIKAAVQIHDFTLGKELHSVAVRLGFVGDEFCESGFITLYCKAGEFENARKVFDENPERKLGSWNAIIGGLNHAGRANEAVEMFVDMKRSGLEPDDFTMVSVTASCGGLGDLSLAFQLHKCVLQAKTEEKSDIMMLNSLIDMYGKCGRMDLASHIFEEMRQRNVVSWSSMIVGYAANGNTLEALECFRQMREFGVRPNKITFVGVLSACVHGGLVEEGKTYFAMMKSEFELEPGLSHYGCIVDLLSRDGQLKEAKKVVEEMPMKPNVMVWGCLMGGCEKFGDVEMAEWVAPYMVELEPWNDGVYVVLANVYALRGMWKDVERVRKLMKTKKVAKIPAYSYASTTF

SEQ ID NO: 73041 - protein, 379 aa, Arabidopsis thaliana
  peptide (1)..(379): Ceres Seq. ID no. 4954574
  misc_feature (271)..(304): Pfam Name: PPR repeat Pfam Description: PPR repeat
  misc_feature (1)..(379): Homolog of NCBI NO: 15223858 NR Description: hypothetical protein; protein id: At1g77170.1
  misc_feature (1)..(373): Homolog of NCBI NO: 7486979 NR Description: hypothetical protein T13K14.230 - Arabidopsis
  misc_feature (1)..(373): Homolog of NCBI NO: 15226299 NR Description: hypothetical protein; protein id: At2g01510.1
  misc_feature (1)..(373): Homolog of NCBI NO: 8778758 NR Description: T30E16.32 [Arabidopsis thaliana]
  misc_feature (1)..(373): Homolog of NCBI NO: 25346319 NR Description: hypothetical protein F23H11.3 [imported] - thaliana >gi|5080805|gb|AAD39314.1|AC007258_3 Hypothetical
  misc_feature (1)..(373): Homolog of NCBI NO: 15218900 NR Description: hypothetical protein; protein id: At1g59720.1
  misc_feature (1)..(368): Homolog of NCBI NO: 9279581 NR Description: emb|CAB66100.1~gene_id:MLN21.12~strong similarity
  misc_feature (1)..(368): Homolog of NCBI NO: 15231831 NR Description: hypothetical protein; protein id: At3g14330.1
  misc_feature (1)..(374): Homolog of NCBI NO: 38175558 NR Description: putative pentatricopeptide (PPR)
  misc_feature (1)..(373): Homolog of NCBI NO: 15227067 NR Description: hypothetical protein; protein id: At2g02980.1
MRSYIRHESPLDAIQVYLGMVRSTVLPDRYSLPIVIKAAVQIHDFTLGKELHSVAVRLGFVGDEFCESGFITLYCKAGEFENARKVFDENPERKLGSWNAIIGGLNHAGRANEAVEMFVDMKRSGLEPDDFTMVSVTASCGGLGDLSLAFQLHKCVLQAKTEEKSDIMMLNSLIDMYGKCGRMDLASHIFEEMRQRNVVSWSSMIVGYAANGNTLEALECFRQMREFGVRPNKITFVGVLSACVHGGLVEEGKTYFAMMKSEFELEPGLSHYGCIVDLLSRDGQLKEAKKVVEEMPMKPNVMVWGCLMGGCEKFGDVEMAEWVAPYMVELEPWNDGVYVVLANVYALRGMWKDVERVRKLMKTKKVAKIPAYSYASTTF

SEQ ID NO: 73042 - protein, 360 aa, Arabidopsis thaliana
  peptide (1)..(360): Ceres Seq. ID no. 4954575
  misc_feature (252)..(285): Pfam Name: PPR repeat Pfam Description: PPR repeat
  misc_feature (1)..(360): Homolog of NCBI NO: 15223858 NR Description: hypothetical protein; protein id: At1g77170.1
  misc_feature (1)..(354): Homolog of NCBI NO: 7486979 NR Description: hypothetical protein T13K14.230 - Arabidopsis
  misc_feature (1)..(354): Homolog of NCBI NO: 15226299 NR Description: hypothetical protein; protein id: At2g01510.1
  misc_feature (1)..(354): Homolog of NCBI NO: 8778758 NR Description: T30E16.32 [Arabidopsis thaliana]
  misc_feature (1)..(354): Homolog of NCBI NO: 15218900 NR Description: hypothetical protein; protein id: At1g59720.1
  misc_feature (1)..(354): Homolog of NCBI NO: 25346319 NR Description: hypothetical protein F23H11.3 [imported] - thaliana >gi|5080805|gb|AAD39314.1|AC007258_3 Hypothetical
  misc_feature (1)..(349): Homolog of NCBI NO: 9279581 NR Description: emb|CAB66100.1~gene_id:MLN21.12~strong similarity
  misc_feature (1)..(349): Homolog of NCBI NO: 15231831 NR Description: hypothetical protein; protein id: At3g14330.1
  misc_feature (1)..(355): Homolog of NCBI NO: 38175558 NR Description: putative pentatricopeptide (PPR)
  misc_feature (1)..(354): Homolog of NCBI NO: 15227067 NR Description: hypothetical protein; protein id: At2g02980.1
MVRSTVLPDRYSLPIVIKAAVQIHDFTLGKELHSVAVRLGFVGDEFCESGFITLYCKAGEFENARKVFDENPERKLGSWNAIIGGLNHAGRANEAVEMFVDMKRSGLEPDDFTMVSVTASCGGLGDLSLAFQLHKCVLQAKTEEKSDIMMLNSLIDMYGKCGRMDLASHIFEEMRQRNVVSWSSMIVGYAANGNTLEALECFRQMREFGVRPNKITFVGVLSACVHGGLVEEGKTYFAMMKSEFELEPGLSHYGCIVDLLSRDGQLKEAKKVVEEMPMKPNVMVWGCLMGGCEKFGDVEMAEWVAPYMVELEPWNDGVYVVLANVYALRGMWKDVERVRKLMKTKKVAKIPAYSYASTTF

SEQ ID NO: 73043 - DNA, 1385 bp, Arabidopsis thaliana
  misc_feature (1)..(1385): Ceres Seq. ID no. 4954706
  misc_feature: MA Experiment ID: 108434 Result: Down-regulated in Transcription
  misc_feature: MA Experiment 108434 PARAMETER Experiment Name: At_Root_Tips_cDNA_P Parameter: Tissue Value: Root Tips
  misc_feature: MA Experiment ID: 108469 Result: Up-regulated in Transcription
  misc_feature: MA Experiment ID: 108489 Result: Up-regulated in Transcription
  misc_feature: MA Experiment ID: 108573 Result: Up-regulated in Transcription
  misc_feature: MA Experiment 108573 PARAMETER Experiment Name: At_Drought_cDNA_P Parameter: Timepoint (hr) Value: 6
  misc_feature: MA Experiment 108573 PARAMETER Experiment Name: At_Drought_cDNA_P Parameter: Tissue Value: Aerial
  misc_feature: MA Experiment 108573 PARAMETER Experiment Name: At_Drought_cDNA_P Parameter: Treatment Value: Drought vs. No Drought
  misc_feature: MA Experiment ID: 108585 Result: Up-regulated in Transcription
  misc_feature: MA Experiment 108585 PARAMETER Experiment Name: At_5mM_NaNP_cDNA_P Parameter: Timepoint (hr) Value: 6
  misc_feature: MA Experiment 108585 PARAMETER Experiment Name: At_5mM_NaNP_cDNA_P Parameter: Tissue Value: Aerial
  misc_feature: MA Experiment 108585 PARAMETER Experiment Name: At_5mM_NaNP_cDNA_P Parameter: Treatment Value: null
  misc_feature: MA Experiment ID: 108595 Result: Up-regulated in Transcription
  misc_feature: MA Experiment 108595 PARAMETER Experiment Name: At_Ler-pi_Ovule_cDNA_P Parameter: Plant Line Value: null
  misc_feature: MA Experiment ID: 108605 Result: Up-regulated in Transcription
  misc_feature: MA Experiment 108605 PARAMETER Experiment Name: At_100uM_ABA_cDNA_P Parameter: Timepoint (hr) Value: 6
  misc_feature: MA Experiment 108605 PARAMETER Experiment Name: At_100uM_ABA_cDNA_P Parameter: Tissue Value: Aerial
  misc_feature: MA Experiment 108605 PARAMETER Experiment Name: At_100uM_ABA_cDNA_P Parameter: Treatment Value: 100uM ABA vs. No Treatment
  misc_feature: MA Experiment ID: 108609 Result: Up-regulated in Transcription
  misc_feature: MA Experiment 108609 PARAMETER Experiment Name: At_100uM_ABA_cDNA_P Parameter: Timepoint (hr) Value: 24
  misc_feature: MA Experiment 108609 PARAMETER Experiment Name: At_100uM_ABA_cDNA_P Parameter: Tissue Value: Aerial
  misc_feature: MA Experiment 108609 PARAMETER Experiment Name: At_100uM_ABA_cDNA_P Parameter: Treatment Value: 100uM ABA vs. No Treatment
  misc_feature: MA Experiment ID: 108668 Result: Up-regulated in Transcription
  misc_feature: MA Experiment 108668 PARAMETER Experiment Name: At_2mM_SA_cDNA_P Parameter: Plant Line Value: WS
  misc_feature: MA Experiment 108668 PARAMETER Experiment Name: At_2mM_SA_cDNA_P Parameter: Timepoint (hr) Value: 6
  misc_feature: MA Experiment 108668 PARAMETER Experiment Name: At_2mM_SA_cDNA_P Parameter: Treatment Value: 2mM SA vs. No Treatment
  misc_feature: MA Experiment ID: 20000069 Result: Up-regulated in Transcription
  misc_feature: MA Experiment 20000069 PARAMETER Experiment Name: At_100uM_ABA_Mutants_cDNA_P Parameter: Plant Line Value: CS23
  misc_feature: MA Experiment 20000069 PARAMETER Experiment Name: At_100uM_ABA_Mutants_cDNA_P Parameter: Timepoint (hr) Value: 6
  misc_feature: MA Experiment 20000069 PARAMETER Experiment Name: At_100uM_ABA_Mutants_cDNA_P Parameter: Tissue Value: Aerial
  misc_feature: MA Experiment 20000069 PARAMETER Experiment Name: At_100uM_ABA_Mutants_cDNA_P Parameter: Treatment Value: 100uM ABA vs. No Treatment
  misc_feature: MA Experiment ID: 20000086 Result: Up-regulated in Transcription
  misc_feature: MA Experiment 20000086 PARAMETER Experiment Name: At_100uM_ABA_Mutants_cDNA_P Parameter: Plant Line Value: CS22
  misc_feature: MA Experiment 20000086 PARAMETER Experiment Name: At_100uM_ABA_Mutants_cDNA_P Parameter: Timepoint (hr) Value: 6
  misc_feature: MA Experiment 20000086 PARAMETER Experiment Name: At_100uM_ABA_Mutants_cDNA_P Parameter: Tissue Value: Aerial
  misc_feature: MA Experiment 20000086 PARAMETER Experiment Name: At_100uM_ABA_Mutants_cDNA_P Parameter: Treatment Value: 100uM ABA vs. No Treatment
  misc_feature: MA Experiment ID: 20000088 Result: Up-regulated in Transcription
  misc_feature: MA Experiment 20000088 PARAMETER Experiment Name: At_100uM_ABA_Mutants_cDNA_P Parameter: Plant Line Value: Landsberg
  misc_feature: MA Experiment 20000088 PARAMETER Experiment Name: At_100uM_ABA_Mutants_cDNA_P Parameter: Timepoint (hr) Value: 6
  misc_feature: MA Experiment 20000088 PARAMETER Experiment Name: At_100uM_ABA_Mutants_cDNA_P Parameter: Tissue Value: Aerial
  misc_feature: MA Experiment 20000088 PARAMETER Experiment Name: At_100uM_ABA_Mutants_cDNA_P Parameter: Treatment Value: 100uM ABA vs. No Treatment
  misc_feature: MA Experiment ID: 20000090 Result: Up-regulated in Transcription
  misc_feature: MA Experiment ID: 20000117 Result: Up-regulated in Transcription
  misc_feature: MA Experiment 20000117 PARAMETER Experiment Name: At_100uM_ABA_Mutants_cDNA_P Parameter: Plant Line Value: Columbia
  misc_feature: MA Experiment 20000117 PARAMETER Experiment Name: At_100uM_ABA_Mutants_cDNA_P Parameter: Timepoint (hr) Value: 6
  misc_feature: MA Experiment 20000117 PARAMETER Experiment Name: At_100uM_ABA_Mutants_cDNA_P Parameter: Tissue Value: Aerial
  misc_feature: MA Experiment 20000117 PARAMETER Experiment Name: At_100uM_ABA_Mutants_cDNA_P Parameter: Treatment Value: 100uM ABA vs. No Treatment
  misc_feature: MA Experiment ID: 20000180 Result: Up-regulated in Transcription
  misc_feature: MA Experiment 20000180 PARAMETER Experiment Name: At_Germinating_Seeds_P Parameter: Age (hr) Value: 24 vs. 0
  misc_feature: MA Experiment 20000180 PARAMETER Experiment Name: At_Germinating_Seeds_P Parameter: Tissue Value: Germinating Seeds
  misc_feature: MA Experiment ID: 20000182 Result: Up-regulated in Transcription
  misc_feature: MA Experiment 20000182 PARAMETER Experiment Name: At_2mM_SA_P Parameter: Age (day) Value: 14
  misc_feature: MA Experiment 20000182 PARAMETER Experiment Name: At_2mM_SA_P Parameter: Organism Value: A. thaliana
  misc_feature: MA Experiment 20000182 PARAMETER Experiment Name: At_2mM_SA_P Parameter: Plant Line Value: WS
  misc_feature: MA Experiment 20000182 PARAMETER Experiment Name: At_2mM_SA_P Parameter: Timepoint (hr) Value: 6
  misc_feature: MA Experiment 20000182 PARAMETER Experiment Name: At_2mM_SA_P Parameter: Tissue Value: Aerial
  misc_feature: MA Experiment 20000182 PARAMETER Experiment Name: At_2mM_SA_P Parameter: Treatment Value: 2mM SA vs. No Treatment
  misc_feature: MA Experiment ID: 20000234 Result: Down-regulated in Transcription
  misc_feature: MA Experiment 20000234 PARAMETER Experiment Name: At_Siliques_P Parameter: Age (day) Value: 21
  misc_feature: MA Experiment 20000234 PARAMETER Experiment Name: At_Siliques_P Parameter: Organism Value: A. thaliana
  misc_feature: MA Experiment 20000234 PARAMETER Experiment Name: At_Siliques_P Parameter: Plant Line Value: WS
  misc_feature: MA Experiment 20000234 PARAMETER Experiment Name: At_Siliques_P Parameter: Tissue Value: Less Than 5mm Siliques vs. Whole Plant
  misc_feature: MA Experiment ID: 20000439 Result: Up-regulated in Transcription
  misc_feature: MA Experiment 20000439 PARAMETER Experiment Name: At_Roots__P Parameter: Age (day) Value: 14 vs. 21
  misc_feature: MA Experiment 20000439 PARAMETER Experiment Name: At_Roots__P Parameter: Organism Value: A. thaliana
  misc_feature: MA Experiment 20000439 PARAMETER Experiment Name: At_Roots__P Parameter: Tissue Value: Roots vs. Whole Plant
  misc_feature: MA Experiment ID: 20001904 Result: Up-regulated in Transcription
  misc_feature: MA Experiment 20001904 PARAMETER Experiment Name: At_Drought_Reproduction_P Parameter: Age (day) Value: 37
  misc_feature: MA Experiment 20001904 PARAMETER Experiment Name: At_Drought_Reproduction_P Parameter: Organism Value: A. thaliana
  misc_feature: MA Experiment 20001904 PARAMETER Experiment Name: At_Drought_Reproduction_P Parameter: Plant Line Value: WS
  misc_feature: MA Experiment 20001904 PARAMETER Experiment Name: At_Drought_Reproduction_P Parameter: Timepoint (day) Value: 7
  misc_feature: MA Experiment 20001904 PARAMETER Experiment Name: At_Drought_Reproduction_P Parameter: Tissue Value: Rosettes
  misc_feature: MA Experiment 20001904 PARAMETER Experiment Name: At_Drought_Reproduction_P Parameter: Treatment Value: Drought vs. No Drought
taggatctgttcttcccaaaacgactcatgccgtccattcgattcggaatatagttgtagaggagatttcatttctaatcaatttcttcggtgatgagttccaccgcggcatcttccaccgtcggaggaggcggatcgtctgagatttccggtgtcaaaaaaacctccaagcgaccaaaatattctaggtttactcagcaagagcttccagcgtgcaagccaattcttactccaagatgggtgatcttgacatttcttgtcgctggggttgtcttcattccccttggagtgatctgcttatttgcttctcagggagtagtcgagattgttgatcgatatgacacagactgtattccaacatcttctagaaacaacatggtcgcttacatacagggtgaaggagataagatctgtaagagaacaataacggtgacaaaagctatgaagcatcctgtctatgtatactaccaacttgagaatttctaccaaaaccatagacggtatgtgaaaagtcgaaacgatgcacaactaagaagtccaaaagaagagcatgatgtgaagacctgtgcacctgaggataatgtgggtggagaaccaattgtgccatgtggtcttgttgcttggagtttgttcaacgatacttatagcttttcaagaaatagccaacaacttcttgtgaataagaaaggtatctcatggaagagtgacagagaaaacaagtttgggaaaaatgtcttccctaaaaattttcagaaaggagcaccaataggcggtggaactcttaatatttctaaaccgttgagtgagcaagaagacctcatagtctggatgcgaaccgcggctttgccaacgtttaggaagctgtatgggaagattgagacagacctacacgcgggtgataccataacggtcttgttgcagaacaactacaacacttacagcttcaatgggcagaagaagctagtgctgtcaacaactagctggctcggcggaaggaatgatttcctcgggattgcttatctgactgtaggcagtatttgcttgttcttggctgttacatttgccgtattgtatctagttaagccaaggcaactcggagacccctcgtacctttcgtggaacagaagtgctggaggtttacagtaatagagcccttcgagcatcaggcgttgatccctccatcgtcaaacggcgtagttttggcttagctaacaaaagagaaaaaacgaaaataagtatatagttcgtttataattttgatattgttgaaaacaaacgtttgtgttttgtcctgttgttgttaagatactagccagtaaatggtgtttagaaaataatgtaaatgaattacagttggaaattgcaaaataagcagagaattttgt

SEQ ID NO: 73044 - protein, 350 aa, Arabidopsis thaliana; identical to SEQ ID NO: 38176
  peptide (1)..(350): Ceres Seq. ID no. 4954707
  misc_feature (75)..(338): Pfam Name: LEM3 (ligand-effect modulator 3) family / CDC50 family Pfam Description: LEM3 (ligand-effect modulator 3) family / CDC50
  misc_feature (1)..(350): Homolog of NCBI NO: 18412377 NR Description: membrane protein common family; protein id: supported by cDNA: 94828. [Arabidopsis thaliana]
  misc_feature (33)..(350): Homolog of NCBI NO: 25347301 NR Description: T8K14.13 [imported] - Arabidopsis thaliana
  misc_feature (44)..(348): Homolog of NCBI NO: 25347303 NR Description: protein F3O9.16 [imported] - Arabidopsis thaliana
  misc_feature (31)..(75): Homolog of NCBI NO: 25347303 NR Description: protein F3O9.16 [imported] - Arabidopsis thaliana
  misc_feature (1)..(348): Homolog of NCBI NO: 18404877 NR Description: membrane protein common family; protein id: supported by cDNA: gi_15010741, supported by cDNA: gi_15450728, by cDNA: gi_17386111 [Arabidopsis thaliana]
  misc_feature (2)..(348): Homolog of NCBI NO: 18399730 NR Description: membrane protein common family; protein id: supported by cDNA: 37019., supported by cDNA: gi_15028094, by cDNA: gi_15294235, supported by cDNA: gi_20258910 [Arabidopsis
  misc_feature (50)..(348): Homolog of NCBI NO: 15219220 NR Description: membrane protein common family; protein id:
  misc_feature (25)..(346): Homolog of NCBI NO: 18422638 NR Description: membrane protein common family; protein id:
  misc_feature (25)..(346): Homolog of NCBI NO: 21554054 NR Description: unknown [Arabidopsis thaliana]
  misc_feature (25)..(332): Homolog of NCBI NO: 9757735 NR Description: gb|AAD25612.1~gene_id:MCL19.21~similar to unknown

SEQ ID NO: 73045 - protein, 256 aa, Arabidopsis thaliana; identical to SEQ ID NO: 38177
  peptide (1)..(256): Ceres Seq. ID no. 4954708
  misc_feature (1)..(244): Pfam Name: LEM3 (ligand-effect modulator 3) family / CDC50 family Pfam Description: LEM3 (ligand-effect modulator 3) family / CDC50
  misc_feature (1)..(256): Homolog of NCBI NO: 18412377 NR Description: membrane protein common family; protein id: supported by cDNA: 94828. [Arabidopsis thaliana]
  misc_feature (1)..(256): Homolog of NCBI NO: 25347301 NR Description: T8K14.13 [imported] - Arabidopsis thaliana
  misc_feature (1)..(254): Homolog of NCBI NO: 25347303 NR Description: protein F3O9.16 [imported] - Arabidopsis thaliana
  misc_feature (1)..(254): Homolog of NCBI NO: 18404877 NR Description: membrane protein common family; protein id: supported by cDNA: gi_15010741, supported by cDNA: gi_15450728, by cDNA: gi_17386111 [Arabidopsis thaliana]
  misc_feature (1)..(254): Homolog of NCBI NO: 18399730 NR Description: membrane protein common family; protein id: supported by cDNA: 37019., supported by cDNA: gi_15028094, by cDNA: gi_15294235, supported by cDNA: gi_20258910 [Arabidopsis
  misc_feature (1)..(254): Homolog of NCBI NO: 15219220 NR Description: membrane protein common family; protein id:
  misc_feature (1)..(252): Homolog of NCBI NO: 18422638 NR Description: membrane protein common family; protein id:
  misc_feature (1)..(252): Homolog of NCBI NO: 21554054 NR Description: unknown [Arabidopsis thaliana]
  misc_feature (1)..(238): Homolog of NCBI NO: 9757735 NR Description: gb|AAD25612.1~gene_id:MCL19.21~similar to unknown
  misc_feature (1)..(247): Homolog of NCBI NO: 19570056 NR Description: similar to membrane protein common family; id: At3g12740.1, supported by cDNA: 37019., supported by cDNA: supported by cDNA: gi_15294235, supported by cDNA: gi_20258910

SEQ ID NO: 73046 - protein, 234 aa, Arabidopsis thaliana; identical to SEQ ID NO: 38178
  peptide (1)..(234): Ceres Seq. ID no. 4954709
  misc_feature (1)..(222): Pfam Name: LEM3 (ligand-effect modulator 3) family / CDC50 family Pfam Description: LEM3 (ligand-effect modulator 3) family / CDC50
  misc_feature (1)..(234): Homolog of NCBI NO: 18412377 NR Description: membrane protein common family; protein id: supported by cDNA: 94828. [Arabidopsis thaliana]
  misc_feature (1)..(234): Homolog of NCBI NO: 25347301 NR Description: T8K14.13 [imported] - Arabidopsis thaliana
  misc_feature (1)..(232): Homolog of NCBI NO: 25347303 NR Description: protein F3O9.16 [imported] - Arabidopsis thaliana
  misc_feature (1)..(232): Homolog of NCBI NO: 18404877 NR Description: membrane protein common family; protein id: supported by cDNA: gi_15010741, supported by cDNA: gi_15450728, by cDNA: gi_17386111 [Arabidopsis thaliana]
  misc_feature (1)..(232): Homolog of NCBI NO: 18399730 NR Description: membrane protein common family; protein id: supported by cDNA: 37019., supported by cDNA: gi_15028094, by cDNA: gi_15294235, supported by cDNA: gi_20258910 [Arabidopsis
  misc_feature (1)..(232): Homolog of NCBI NO: 15219220 NR Description: membrane protein common family; protein id:
  misc_feature (1)..(230): Homolog of NCBI NO: 18422638 NR Description: membrane protein common family; protein id:
  misc_feature (1)..(230): Homolog of NCBI NO: 21554054 NR Description: unknown [Arabidopsis thaliana]
  misc_feature (1)..(216): Homolog of NCBI NO: 9757735 NR Description: gb|AAD25612.1~gene_id:MCL19.21~similar to unknown
  misc_feature (1)..(225): Homolog of NCBI NO: 19570056 NR Description: similar to membrane protein common family; id: At3g12740.1, supported by cDNA: 37019., supported by cDNA: supported by cDNA: gi_15294235, supported by cDNA: gi_20258910

SEQ ID NO: 73047 - DNA, 849 bp, Arabidopsis thaliana
  misc_feature (1)..(849): Ceres Seq. ID no. 4955096
  misc_feature: MA Experiment ID: 20000328 Result: Down-regulated in Transcription
  misc_feature: MA Experiment 20000328 PARAMETER Experiment Name: At_42deg_Heat_Sub_P Parameter: Age (day) Value: 14
  misc_feature: MA Experiment 20000328 PARAMETER Experiment Name: At_42deg_Heat_Sub_P Parameter: Organism Value: A. thaliana
  misc_feature: MA Experiment 20000328 PARAMETER Experiment Name: At_42deg_Heat_Sub_P Parameter: Plant Line Value: WS
  misc_feature: MA Experiment 20000328 PARAMETER Experiment Name: At_42deg_Heat_Sub_P Parameter: Temperature (deg C) Value: 42 vs. 22
  misc_feature: MA Experiment 20000328 PARAMETER Experiment Name: At_42deg_Heat_Sub_P Parameter: Timepoint (hr) Value: 6
  misc_feature: MA Experiment 20000328 PARAMETER Experiment Name: At_42deg_Heat_Sub_P Parameter: Tissue Value: Aerial
  misc_feature: MA Experiment ID: 20000355 Result: Up-regulated in Transcription
  misc_feature: MA Experiment 20000355 PARAMETER Experiment Name: At_Siliques_Sub_P Parameter: Age (day) Value: 21
  misc_feature: MA Experiment 20000355 PARAMETER Experiment Name: At_Siliques_Sub_P Parameter: Organism Value: A. thaliana
  misc_feature: MA Experiment 20000355 PARAMETER Experiment Name: At_Siliques_Sub_P Parameter: Plant Line Value: WS
  misc_feature: MA Experiment 20000355 PARAMETER Experiment Name: At_Siliques_Sub_P Parameter: Tissue Value: Less Than 5mm Siliques vs. Whole Plant
atggcttattctaaagcttgttataaactcatcaccaccattacaatcctccttctatacttcacatttgcctctcttgccaaaaacgtagatgtaagtgaatgcagagctgaatctggagatccatcatgtcacaacaacaaagaagctaaaaagcttaaaatgattgcaatcccatctatcttagtggcgagcatgatcggtgtttctttacagttcctttctcgttacattcctgctttaggacccgaccgagttatatttgggatcataaagactttaacttcgggtgtaattttggcaaccgcttttatgcatgtgttaccggactctttcgatgatctcacatccaaatgtttgcctgaagacccgtggaggaagtttcctttcaccactttcatcgcgatgaactcggcttttctcgttttaatgattgctttggtgcacttacaagaaaaggtcaacgatgataagacaaataaccaatgtaccatacgatcacttatcgcagcgttttgtttccatgaactcgctgaaggaatgagactcggtggtcccattttacatcaaaatgaattggaaaatggtgttgtcacaatgcaatttgggattgctttagggatgcaaatacaaaagatatatggtgagacaagtccgacagcgttgatcttgatggggatgttgaatgcgtgttctgcaggattattgattgatctggcccttgttaatctcttggctcatgaattatacggaccaaagatacaagggaatatgaaacttcatgtcctcggttatgttgctaccttcataggtgccgcgggaatgtctttgatggctaagtgggcatag

SEQ ID NO: 73048 - protein, 282 aa, Arabidopsis thaliana
  peptide (1)..(282): Ceres Seq. ID no. 4955097
  misc_feature (51)..(145): Pfam Name: ZIP Zinc transporter Pfam Description: ZIP Zinc transporter
  misc_feature (1)..(145): Homolog of NCBI NO: 15228062 NR Description: putative root iron transporter protein; protein At2g04032.1 [Arabidopsis thaliana] putative metal transporter ZIP7 [Arabidopsis thaliana] iron
  misc_feature (159)..(282): Homolog of NCBI NO: 15228062 NR Description: putative root iron transporter protein; protein At2g04032.1 [Arabidopsis thaliana] putative metal transporter ZIP7 [Arabidopsis thaliana] iron
  misc_feature (8)..(145): Homolog of NCBI NO: 4836773 NR Description: iron-regulated transporter 2 [Lycopersicon
  misc_feature (159)..(282): Homolog of NCBI NO: 4836773 NR Description: iron-regulated transporter 2 [Lycopersicon
  misc_feature (1)..(144): Homolog of NCBI NO: 32966055 NR Description: iron transporter Fe3 [Oryza sativa (japonica
  misc_feature (159)..(282): Homolog of NCBI NO: 32966055 NR Description: iron transporter Fe3 [Oryza sativa (japonica
  misc_feature (1)..(144): Homolog of NCBI NO: 18700309 NR Description: iron regulated metal transporter [Oryza sativa]
  misc_feature (1)..(145): Homolog of NCBI NO: 27549575 NR Description: root iron transporter protein IRT1 [Malus
  misc_feature (159)..(282): Homolog of NCBI NO: 18700309 NR Description: iron regulated metal transporter [Oryza sativa]
  misc_feature (159)..(282): Homolog of NCBI NO: 27549575 NR Description: root iron transporter protein IRT1 [Malus
MAYSKACYKLITTITILLLYFTFASLAKNVDVSECRAESGDPSCHNNKEAKKLKMIAIPSILVASMIGVSLQFLSRYIPALGPDRVIFGIIKTLTSGVILATAFMHVLPDSFDDLTSKCLPEDPWRKFPFTTFIAMNSAFLVLMIALVHLQEKVNDDKTNNQCTIRSLIAAFCFHELAEGMRLGGPILHQNELENGVVTMQFGIALGMQIQKIYGETSPTALILMGMLNACSAGLLIDLALVNLLAHELYGPKIQGNMKLHVLGYVATFIGAAGMSLMAKWA

SEQ ID NO: 73049 - protein, 228 aa, Arabidopsis thaliana
  peptide (1)..(228): Ceres Seq. ID no. 4955098
  misc_feature (1)..(91): Pfam Name: ZIP Zinc transporter Pfam Description: ZIP Zinc transporter
  misc_feature (1)..(91): Homolog of NCBI NO: 15228062 NR Description: putative root iron transporter protein; protein At2g04032.1 [Arabidopsis thaliana] putative metal transporter ZIP7 [Arabidopsis thaliana] iron
  misc_feature (105)..(228): Homolog of NCBI NO: 15228062 NR Description: putative root iron transporter protein; protein At2g04032.1 [Arabidopsis thaliana] putative metal transporter ZIP7 [Arabidopsis thaliana] iron
  misc_feature (1)..(91): Homolog of NCBI NO: 4836773 NR Description: iron-regulated transporter 2 [Lycopersicon
  misc_feature (105)..(228): Homolog of NCBI NO: 4836773 NR Description: iron-regulated transporter 2 [Lycopersicon
  misc_feature (1)..(90): Homolog of NCBI NO: 32966055 NR Description: iron transporter Fe3 [Oryza sativa (japonica
  misc_feature (105)..(228): Homolog of NCBI NO: 32966055 NR Description: iron transporter Fe3 [Oryza sativa (japonica
  misc_feature (1)..(90): Homolog of NCBI NO: 18700309 NR Description: iron regulated metal transporter [Oryza sativa]
  misc_feature (1)..(91): Homolog of NCBI NO: 27549575 NR Description: root iron transporter protein IRT1 [Malus
  misc_feature (105)..(228): Homolog of NCBI NO: 18700309 NR Description: iron regulated metal transporter [Oryza sativa]
  misc_feature (105)..(228): Homolog of NCBI NO: 27549575 NR Description: root iron transporter protein IRT1 [Malus
MIAIPSILVASMIGVSLQFLSRYIPALGPDRVIFGIIKTLTSGVILATAFMHVLPDSFDDLTSKCLPEDPWRKFPFTTFIAMNSAFLVLMIALVHLQEKVNDDKTNNQCTIRSLIAAFCFHELAEGMRLGGPILHQNELENGVVTMQFGIALGMQIQKIYGETSPTALILMGMLNACSAGLLIDLALVNLLAHELYGPKIQGNMKLHVLGYVATFIGAAGMSLMAKWA

SEQ ID NO: 73050 - protein, 217 aa, Arabidopsis thaliana
  peptide (1)..(217): Ceres Seq. ID no. 4955099
  misc_feature (1)..(80): Pfam Name: ZIP Zinc transporter Pfam Description: ZIP Zinc transporter
  misc_feature (1)..(80): Homolog of NCBI NO: 15228062 NR Description: putative root iron transporter protein; protein At2g04032.1 [Arabidopsis thaliana] putative metal transporter ZIP7 [Arabidopsis thaliana] iron
  misc_feature (94)..(217): Homolog of NCBI NO: 15228062 NR Description: putative root iron transporter protein; protein At2g04032.1 [Arabidopsis thaliana] putative metal transporter ZIP7 [Arabidopsis thaliana] iron
  misc_feature (1)..(80): Homolog of NCBI NO: 4836773 NR Description: iron-regulated transporter 2 [Lycopersicon
  misc_feature (94)..(217): Homolog of NCBI NO: 4836773 NR Description: iron-regulated transporter 2 [Lycopersicon
  misc_feature (1)..(79): Homolog of NCBI NO: 32966055 NR Description: iron transporter Fe3 [Oryza sativa (japonica
  misc_feature (94)..(217): Homolog of NCBI NO: 32966055 NR Description: iron transporter Fe3 [Oryza sativa (japonica
  misc_feature (1)..(79): Homolog of NCBI NO: 18700309 NR Description: iron regulated metal transporter [Oryza sativa]
  misc_feature (1)..(80): Homolog of NCBI NO: 27549575 NR Description: root iron transporter protein IRT1 [Malus
  misc_feature (94)..(217): Homolog of NCBI NO: 18700309 NR Description: iron regulated metal transporter [Oryza sativa]
  misc_feature (94)..(217): Homolog of NCBI NO: 27549575 NR Description: root iron transporter protein IRT1 [Malus
MIGVSLQFLSRYIPALGPDRVIFGIIKTLTSGVILATAFMHVLPDSFDDLTSKCLPEDPWRKFPFTTFIAMNSAFLVLMIALVHLQEKVNDDKTNNQCTIRSLIAAFCFHELAEGMRLGGPILHQNELENGVVTMQFGIALGMQIQKIYGETSPTALILMGMLNACSAGLLIDLALVNLLAHELYGPKIQGNMKLHVLGYVATFIGAAGMSLMAKWA

SEQ ID NO: 73051 - DNA, 1267 bp, Arabidopsis thaliana
  misc_feature (1)..(1267): Ceres Seq. ID no. 4955187
  misc_feature: MA Experiment ID: 108501 Result: Up-regulated in Transcription
  misc_feature: MA Experiment 108501 PARAMETER Experiment Name: At_ap2_floral_buds_cDNA_P Parameter: Plant Line Value: ap2 (Ler.)
  misc_feature: MA Experiment 108501 PARAMETER Experiment Name: At_ap2_floral_buds_cDNA_P Parameter: Tissue Value: Closed Flower
  misc_feature: MA Experiment ID: 108607 Result: Up-regulated in Transcription
  misc_feature: MA Experiment 108607 PARAMETER Experiment Name: At_100uM_ABA_cDNA_P Parameter: Timepoint (hr) Value: 4
  misc_feature: MA Experiment 108607 PARAMETER Experiment Name: At_100uM_ABA_cDNA_P Parameter: Tissue Value: Aerial
  misc_feature: MA Experiment 108607 PARAMETER Experiment Name: At_100uM_ABA_cDNA_P Parameter: Treatment Value: 100uM ABA vs. No Treatment
  misc_feature: MA Experiment ID: 20000112 Result: Down-regulated in Transcription
  misc_feature: MA Experiment 20000112 PARAMETER Experiment Name: At_42deg_Heat_cDNA_P Parameter: Temperature (deg C) Value: 42 vs. 22
  misc_feature: MA Experiment 20000112 PARAMETER Experiment Name: At_42deg_Heat_cDNA_P Parameter: Timepoint (hr) Value: 2
  misc_feature: MA Experiment 20000112 PARAMETER Experiment Name: At_42deg_Heat_cDNA_P Parameter: Tissue Value: Aerial
  misc_feature: MA Experiment ID: 20000144 Result: Down-regulated in Transcription
  misc_feature: MA Experiment 20000144 PARAMETER Experiment Name: At_42deg_Heat_cDNA_P Parameter: Temperature (deg C) Value: 42 vs. 22
  misc_feature: MA Experiment 20000144 PARAMETER Experiment Name: At_42deg_Heat_cDNA_P Parameter: Timepoint (hr) Value: 1
  misc_feature: MA Experiment 20000144 PARAMETER Experiment Name: At_42deg_Heat_cDNA_P Parameter: Tissue Value: Aerial
  misc_feature: MA Experiment ID: 20000171 Result: Down-regulated in Transcription
  misc_feature: MA Experiment 20000171 PARAMETER Experiment Name: At_42deg_Heat_P Parameter: Age (day) Value: 14
  misc_feature: MA Experiment 20000171 PARAMETER Experiment Name: At_42deg_Heat_P Parameter: Organism Value: A. thaliana
  misc_feature: MA Experiment 20000171 PARAMETER Experiment Name: At_42deg_Heat_P Parameter: Plant Line Value: WS
  misc_feature: MA Experiment 20000171 PARAMETER Experiment Name: At_42deg_Heat_P Parameter: Temperature (deg C) Value: 42 vs. 22
  misc_feature: MA Experiment 20000171 PARAMETER Experiment Name: At_42deg_Heat_P Parameter: Timepoint (hr) Value: 1
  misc_feature: MA Experiment 20000171 PARAMETER Experiment Name: At_42deg_Heat_P Parameter: Tissue Value: Aerial
  misc_feature: MA Experiment ID: 20000173 Result: Down-regulated in Transcription
  misc_feature: MA Experiment 20000173 PARAMETER Experiment Name: At_42deg_Heat_P Parameter: Age (day) Value: 14
  misc_feature: MA Experiment 20000173 PARAMETER Experiment Name: At_42deg_Heat_P Parameter: Organism Value: A. thaliana
  misc_feature: MA Experiment 20000173 PARAMETER Experiment Name: At_42deg_Heat_P Parameter: Plant Line Value: WS
  misc_feature: MA Experiment 20000173 PARAMETER Experiment Name: At_42deg_Heat_P Parameter: Temperature (deg C) Value: 42 vs. 22
  misc_feature: MA Experiment 20000173 PARAMETER Experiment Name: At_42deg_Heat_P Parameter: Timepoint (hr) Value: 6
  misc_feature: MA Experiment 20000173 PARAMETER Experiment Name: At_42deg_Heat_P Parameter: Tissue Value: Aerial
  misc_feature: MA Experiment ID: 20000185 Result: Down-regulated in Transcription
  misc_feature: MA Experiment 20000185 PARAMETER Experiment Name: At_Roots__P Parameter: Age (day) Value: 7 vs. 21
  misc_feature: MA Experiment 20000185 PARAMETER Experiment Name: At_Roots__P Parameter: Organism Value: A. thaliana
  misc_feature: MA Experiment 20000185 PARAMETER Experiment Name: At_Roots__P Parameter: Tissue Value: Roots vs. Whole Plant
  misc_feature: MA Experiment ID: 20000235 Result: Down-regulated in Transcription
  misc_feature: MA Experiment 20000235 PARAMETER Experiment Name: At_Siliques_P Parameter: Age (day) Value: 21
  misc_feature: MA Experiment 20000235 PARAMETER Experiment Name: At_Siliques_P Parameter: Organism Value: A. thaliana
  misc_feature: MA Experiment 20000235 PARAMETER Experiment Name: At_Siliques_P Parameter: Plant Line Value: WS
  misc_feature: MA Experiment 20000235 PARAMETER Experiment Name: At_Siliques_P Parameter: Tissue Value: 5-10mm Siliques vs. Whole Plant
  misc_feature: MA Experiment ID: 20000439 Result: Down-regulated in Transcription
  misc_feature: MA Experiment 20000439 PARAMETER Experiment Name: At_Roots__P Parameter: Age (day) Value: 14 vs. 21
  misc_feature: MA Experiment 20000439 PARAMETER Experiment Name: At_Roots__P Parameter: Organism Value: A. thaliana
  misc_feature: MA Experiment 20000439 PARAMETER Experiment Name: At_Roots__P Parameter: Tissue Value: Roots vs. Whole Plant
  misc_feature: MA Experiment ID: 20000451 Result: Up-regulated in Transcription
  misc_feature: MA Experiment 20000451 PARAMETER Experiment Name: At_CS6879_Shoots-Roots_P Parameter: Age (day) Value: 14
  misc_feature: MA Experiment 20000451 PARAMETER Experiment Name: At_CS6879_Shoots-Roots_P Parameter: Organism Value: A. thaliana
  misc_feature: MA Experiment 20000451 PARAMETER Experiment Name: At_CS6879_Shoots-Roots_P Parameter: Plant Line Value: CS6879 vs. WS
  misc_feature: MA Experiment 20000451 PARAMETER Experiment Name: At_CS6879_Shoots-Roots_P Parameter: Tissue Value: Roots
  misc_feature: MA Experiment ID: 20000495 Result: Down-regulated in Transcription
  misc_feature: MA Experiment 20000495 PARAMETER Experiment Name: At_Guard_Cells_P Parameter: Harvest Date Value: 8/2/2002
  misc_feature: MA Experiment 20000495 PARAMETER Experiment Name: At_Guard_Cells_P Parameter: Organism Value: A. thaliana
  misc_feature: MA Experiment 20000495 PARAMETER Experiment Name: At_Guard_Cells_P Parameter: Tissue Value: Guard Cells vs. Leaves
  misc_feature: MA Experiment ID: 20000573 Result: Down-regulated in Transcription
  misc_feature: MA Experiment 20000573 PARAMETER Experiment Name: At_100uM_ABA_Mutants__P Parameter: Organism Value: A. thaliana
  misc_feature: MA Experiment 20000573 PARAMETER Experiment Name: At_100uM_ABA_Mutants__P Parameter: Plant Line Value: CS22 vs. Ler wt
  misc_feature: MA Experiment 20000573 PARAMETER Experiment Name: At_100uM_ABA_Mutants__P Parameter: Timepoint (hr) Value: N/A
  misc_feature: MA Experiment 20000573 PARAMETER Experiment Name: At_100uM_ABA_Mutants__P Parameter: Tissue Value: Whole Plant
  misc_feature: MA Experiment 20000573 PARAMETER Experiment Name: At_100uM_ABA_Mutants__P Parameter: Treatment Value: None
  misc_feature: MA Experiment ID: 20000574 Result: Down-regulated in Transcription
  misc_feature: MA Experiment 20000574 PARAMETER Experiment Name: At_100uM_ABA_Mutants__P Parameter: Organism Value: A. thaliana
  misc_feature: MA Experiment 20000574 PARAMETER Experiment Name: At_100uM_ABA_Mutants__P Parameter: Plant Line Value: CS23 vs. Ler wt
  misc_feature: MA Experiment 20000574 PARAMETER Experiment Name: At_100uM_ABA_Mutants__P Parameter: Timepoint (hr) Value: N/A
  misc_feature: MA Experiment 20000574 PARAMETER Experiment Name: At_100uM_ABA_Mutants__P Parameter: Tissue Value: Whole Plant
  misc_feature: MA Experiment 20000574 PARAMETER Experiment Name: At_100uM_ABA_Mutants__P Parameter: Treatment Value: None
  misc_feature: MA Experiment ID: 20001910 Result: Up-regulated in Transcription
  misc_feature: MA Experiment 20001910 PARAMETER Experiment Name: At_Drought_Reproduction_P Parameter: Age (day) Value: 37
  misc_feature: MA Experiment 20001910 PARAMETER Experiment Name: At_Drought_Reproduction_P Parameter: Organism Value: A. thaliana
  misc_feature: MA Experiment 20001910 PARAMETER Experiment Name: At_Drought_Reproduction_P Parameter: Plant Line Value: WS
  misc_feature: MA Experiment 20001910 PARAMETER Experiment Name: At_Drought_Reproduction_P Parameter: Timepoint (day) Value: 7
  misc_feature: MA Experiment 20001910 PARAMETER Experiment Name: At_Drought_Reproduction_P Parameter: Tissue Value: Flowers
  misc_feature: MA Experiment 20001910 PARAMETER Experiment Name: At_Drought_Reproduction_P Parameter: Treatment Value: Drought vs. No Drought
aatttgcagggttcttcttcttcttcttcttttttctctaaactggaaaataaagaagaaaagaacatggatttgcattcttgtctaaactcatactttcttttgctcctcctctgtcttcttaatattaccaccattaactcaacgaagccattagaacaagaaacagtgctttttggcggcaactttccggctttttatgttattggagattcattggttgattcaggaaacaataatcatcttacaacgatggtcaaatcgaattttccaccttatggttcggactttgaaggtggcaaagccaccggccgtttcagcaatggcaaaacaattgctgattacattgctatctactatggtcttcctttggttcctgcttatttgggattatctcaagaagaaaagaatagtatctcaactggtattaactatgcttctgctggctgtgggattcttcctcagacaggaaggcaaataggaacatgtctctcgttaagtgtccaagtcgatatgttccaggagaccatcacaaacaatctgaagaagaacttcaagaagtccgagctccgtgaacacttggctgaatcgttgtttatgatcgccattggggttaacgactacacattcttatttaatgaaacaaccgatgcgaatgagtttgcaaacaagcttcttcatgattacttgcttcaaatagaaagattgcacaagttaggagcaaggaagttcttcatcaacaacattaaaccattaggatgttacccaaatgttgtagctaagaccgtgccacgtggaagctgcaacgatgctttgaactttgcggtcagcattttcaacactaagcttagaaaaagtctgtctcgtatgacgcaaaaattcatcaaaacgtcctttttatactcggattactacaactacatgttgggactaagaggaccttcaagcaatcaagttggttcgagtctattgaacgtgacaagcccatgttgtcctaacgtttatgatggaggtcaattgacaagttgcaagcctggttcgatcgcgtgtaaggcacccgatactcatattttctttgatccgtttcatccgactcaattggcgaattacatgtatgcgattgcgtgtttccacgagagaagtatttgccatgtgatattggaagattaacttttgtcggcaacaatcttttttgtttgttttaaacaccaatttggttgttgtttgttgctttcaacttttcaatatcatcagaacttttaagatt

SEQ ID NO: 73052 - protein, 389 aa, Arabidopsis thaliana
  peptide (1)..(389): Ceres Seq. ID no. 4955188
  misc_feature (66)..(376): Pfam Name: GDSL-like Lipase/Acylhydrolase Pfam Description: GDSL-like Lipase/Acylhydrolase
  misc_feature (23)..(389): Homolog of NCBI NO: 15228051 NR Description: putative GDSL-motif lipase/hydrolase; protein id:
  misc_feature (23)..(267): Homolog of NCBI NO: 15228057 NR Description: putative GDSL-motif lipase/hydrolase; protein id:
  misc_feature (21)..(386): Homolog of NCBI NO: 15241626 NR Description: GDSL-motif lipase acylhydrolase-like protein;
  misc_feature (34)..(373): Homolog of NCBI NO: 18417760 NR Description: putative protein; protein id: At5g15720.1, by cDNA: 118296. [Arabidopsis thaliana]
  misc_feature (34)..(373): Homolog of NCBI NO: 11280578 NR Description: hypothetical protein F14F8_100 - Arabidopsis >gi|9755617|emb|CAC01771.1| putative protein [Arabidopsis
  misc_feature (61)..(386): Homolog of NCBI NO: 18409881 NR Description: hypothetical protein; protein id: At1g71691.1
  misc_feature (64)..(381): Homolog of NCBI NO: 15220514 NR Description: lipase/hydrolase, putative; protein id: supported by cDNA: 23556., supported by cDNA: gi_18086454
  misc_feature (64)..(381): Homolog of NCBI NO: 21592417 NR Description: lipase/hydrolase, putative [Arabidopsis thaliana]
  misc_feature (30)..(368): Homolog of NCBI NO: 15240452 NR Description: GDSL-motif lipase/hydrolase-like protein; protein At5g55050.1, supported by cDNA: gi_18175651 [Arabidopsis
  misc_feature (17)..(378): Homolog of NCBI NO: 15224005 NR Description: putative GDSL-motif lipase/acylhydrolase; protein At1g71250.1 [Arabidopsis thaliana] >gi|25336259|pir||B96737
NLQGSSSSSSFFSKLENKEEKNMDLHSCLNSYFLLLLLCLLNITTINSTKPLEQETVLFGGNFPAFYVIGDSLVDSGNNNHLTTMVKSNFPPYGSDFEGGKATGRFSNGKTIADYIAIYYGLPLVPAYLGLSQEEKNSISTGINYASAGCGILPQTGRQIGTCLSLSVQVDMFQETITNNLKKNFKKSELREHLAESLFMIAIGVNDYTFLFNETTDANEFANKLLHDYLLQIERLHKLGARKFFINNIKPLGCYPNVVAKTVPRGSCNDALNFAVSIFNTKLRKSLSRMTQKFIKTSFLYSDYYNYMLGLRGPSSNQVGSSLLNVTSPCCPNVYDGGQLTSCKPGSIACKAPDTHIFFDPFHPTQLANYMYAIACFHERSICHVILED

SEQ ID NO: 73053 - protein, 367 aa, Arabidopsis thaliana; identical to SEQ ID NO: 41528
  peptide (1)..(367): Ceres Seq. ID no. 4955189
  misc_feature (44)..(354): Pfam Name: GDSL-like Lipase/Acylhydrolase Pfam Description: GDSL-like Lipase/Acylhydrolase
  misc_feature (1)..(367): Homolog of NCBI NO: 15228051 NR Description: putative GDSL-motif lipase/hydrolase; protein id:
  misc_feature (1)..(245): Homolog of NCBI NO: 15228057 NR Description: putative GDSL-motif lipase/hydrolase; protein id:
  misc_feature (1)..(364): Homolog of NCBI NO: 15241626 NR Description: GDSL-motif lipase acylhydrolase-like protein;
  misc_feature (12)..(351): Homolog of NCBI NO: 18417760 NR Description: putative protein; protein id: At5g15720.1, by cDNA: 118296. [Arabidopsis thaliana]
  misc_feature (12)..(351): Homolog of NCBI NO: 11280578 NR Description: hypothetical protein F14F8_100 - Arabidopsis >gi|9755617|emb|CAC01771.1| putative protein [Arabidopsis
  misc_feature (39)..(364): Homolog of NCBI NO: 18409881 NR Description: hypothetical protein; protein id: At1g71691.1
  misc_feature (42)..(359): Homolog of NCBI NO: 15220514 NR Description: lipase/hydrolase, putative; protein id: supported by cDNA: 23556., supported by cDNA: gi_18086454
  misc_feature (42)..(359): Homolog of NCBI NO: 21592417 NR Description: lipase/hydrolase, putative [Arabidopsis thaliana]
  misc_feature (8)..(346): Homolog of NCBI NO: 15240452 NR Description: GDSL-motif lipase/hydrolase-like protein; protein At5g55050.1, supported by cDNA: gi_18175651 [Arabidopsis
  misc_feature (1)..(356): Homolog of NCBI NO: 15224005 NR Description: putative GDSL-motif lipase/acylhydrolase; protein At1g71250.1 [Arabidopsis thaliana] >gi|25336259|pir||B96737

SEQ ID NO: 73054 - protein, 305 aa, Arabidopsis thaliana; identical to SEQ ID NO: 37441
  peptide (1)..(305): Ceres Seq. ID no. 4955190
  misc_feature (1)..(292): Pfam Name: GDSL-like Lipase/Acylhydrolase Pfam Description: GDSL-like Lipase/Acylhydrolase
  misc_feature (1)..(305): Homolog of NCBI NO: 15228051 NR Description: putative GDSL-motif lipase/hydrolase; protein id:
  misc_feature (1)..(183): Homolog of NCBI NO: 15228057 NR Description: putative GDSL-motif lipase/hydrolase; protein id:
  misc_feature (1)..(302): Homolog of NCBI NO: 15241626 NR Description: GDSL-motif lipase acylhydrolase-like protein;
  misc_feature (1)..(289): Homolog of NCBI NO: 18417760 NR Description: putative protein; protein id: At5g15720.1, by cDNA: 118296. [Arabidopsis thaliana]
  misc_feature (1)..(289): Homolog of NCBI NO: 11280578 NR Description: hypothetical protein F14F8_100 - Arabidopsis >gi|9755617|emb|CAC01771.1| putative protein [Arabidopsis
  misc_feature (1)..(302): Homolog of NCBI NO: 18409881 NR Description: hypothetical protein; protein id: At1g71691.1
  misc_feature (1)..(297): Homolog of NCBI NO: 15220514 NR Description: lipase/hydrolase, putative; protein id: supported by cDNA: 23556., supported by cDNA: gi_18086454
  misc_feature (1)..(297): Homolog of NCBI NO: 21592417 NR Description: lipase/hydrolase, putative [Arabidopsis thaliana]
  misc_feature (1)..(284): Homolog of NCBI NO: 15240452 NR Description: GDSL-motif lipase/hydrolase-like protein; protein At5g55050.1, supported by cDNA: gi_18175651 [Arabidopsis
  misc_feature (1)..(294): Homolog of NCBI NO: 15224005 NR Description: putative GDSL-motif lipase/acylhydrolase; protein At1g71250.1 [Arabidopsis thaliana] >gi|25336259|pir||B96737

SEQ ID NO: 73055 - DNA, 1749 bp, Arabidopsis thaliana
  misc_feature (1)..(1749): Ceres Seq. ID no. 4955327
  misc_feature: MA Experiment ID: 20000307 Result: Down-regulated in Transcription
  misc_feature: MA Experiment 20000307 PARAMETER Experiment Name: At_Germinating_Seeds_Sub_P Parameter: Age (hr) Value: 24 vs. 0
  misc_feature: MA Experiment 20000307 PARAMETER Experiment Name: At_Germinating_Seeds_Sub_P Parameter: Organism Value: A. thaliana
  misc_feature: MA Experiment 20000307 PARAMETER Experiment Name: At_Germinating_Seeds_Sub_P Parameter: Plant Line Value: WS
  misc_feature: MA Experiment 20000307 PARAMETER Experiment Name: At_Germinating_Seeds_Sub_P Parameter: Tissue Value: Germinating Seeds
atgcctgagagagatacagttgtttggaatgcattgatttgtgggtattcacgaaatggttatgagtgtgatgcgtggaagctttttatcgtaatgcttcagcaagggttttctccatctgctactacacttgtgaatttgttacctttttgtggacaatgtggttttgtatctcaagggagatctgttcatggtgttgctgcaaagtctggccttgagttggattctcaggtgaagaatgcgttgatttcgttttactcaaagtgtgcagagttgggttcagcagaagtcttgtttagagaaatgaaagataaaagcacagtttcttggaatacaatgattggtgcctatagccagagtggtttacaggaagaagccatcactgttttcaagaatatgtttgagaagaatgtggaaattagtccagtcactatcatcaatcttctttctgctcatgttagtcacgagccactacattgtcttgttgttaaatgtggaatggtgaatgatatatctgtggttacttctttggtctgtgcatattcaaggtgtgggtgtttggtttcagcagagcgtctttatgcgtctgctaaacaagatagtattgtcggcttaacttcgattgtttcatgctatgcggagaaaggagatatggatatagcagttgtgtatttttctaaaacgcgtcagttgtgtatgaaaattgatgctgtagctttagttggaattctccatggatgtaaaaagtcttcccatattgacataggaatgtcgttacatggttatgcgatcaaaagcggattgtgcacaaaaacactggttgtgaatggactgataactatgtactctaagtttgatgatgtagagactgtcctgtttttgtttgagcaactgcaggagactcctttaattagctggaactcagtgatatccgggtgtgtacagtctggaagggcaagtacagcttttgaggtgttccatcagatgatgttaactggtggacttttgccggatgccattacgatagccagtttgcttgctggctgttcccagctttgttgcttgaatttggggaaggagcttcatggctatactcttaggaacaattttgaaaatgagaactttgtttgcactgctctgatagatatgtatgccaaatgtggaaacgaagtacaagcggaaagtgtgttcaagagtataaaagctccgtgtacagcaacatggaactcaatgatatcaggatacagcttatcggggttacaacatcgagctctttcttgttacttggaaatgcgagagaaggggttgaaacctgacgagatcacctttttgggggttctgtctgcatgtaaccatggaggctttgtcgatgaaggaaaaatatgtttcagagcaatgatcaaagagtttggaatatctccaactttacagcattatgcacttatggttggcttgttgggaagagcatgtttatttactgaggcattgtatttaatttggaagatggatataaagccggattctgcagtatggggtgctctacttagcgcgtgcattattcacagagagttggaggttggggaatatgtagctaggaaaatgtttatgctggattacaagaatggagggctgtatgtattgatgtcaaacctatatgcaacagaagcaatgtgggacgacgtagttagagtcaggaatatgatgaaagataatggatacgatggttatttgggagttagccaaatataa

SEQ ID NO: 73056 - protein, 582 aa, Arabidopsis thaliana; identical to SEQ ID NO: 70979
  peptide (1)..(582): Ceres Seq. ID no. 4955328
  misc_feature (7)..(41): Pfam Name: PPR repeat Pfam Description: PPR repeat
  misc_feature (1)..(582): Homolog of NCBI NO: 15224419 NR Description: hypothetical protein; protein id: At2g04860.1
  misc_feature (1)..(570): Homolog of NCBI NO: 18394615 NR Description: hypothetical protein; protein id: At1g18485.1
  misc_feature (3)..(582): Homolog of NCBI NO: 15233590 NR Description: putative protein; protein id: At4g21300.1
  misc_feature (1)..(570): Homolog of NCBI NO: 25402861 NR Description: protein F15H18.4 [imported] - Arabidopsis >gi|6714305|gb|AAF26001.1|AC013354_20 F15H18.4 [Arabidopsis
  misc_feature (1)..(582): Homolog of NCBI NO: 15218216 NR Description: hypothetical protein; protein id: At1g15510.1
  misc_feature (1)..(582): Homolog of NCBI NO: 34897084 NR Description: hypothetical protein [Oryza sativa (japonica group)] >gi|12957718|gb|AAK09236.1| hypothetical protein [Oryza
  misc_feature (7)..(582): Homolog of NCBI NO: 15220337 NR Description: hypothetical protein; protein id: At1g11290.1
  misc_feature (29)..(572): Homolog of NCBI NO: 34897884 NR Description: Similar to Arabidopsis thaliana DNA chromosome 4,
  misc_feature (1)..(580): Homolog of NCBI NO: 15227623 NR Description: unknown protein; protein id: At2g03380.1
  misc_feature (1)..(582): Homolog of NCBI NO: 38567725 NR Description: B1358B12.23 [Oryza sativa (japonica

SEQ ID NO: 73057 - protein, 551 aa, Arabidopsis thaliana
  peptide (1)..(551): Ceres Seq. ID no. 4955329
  misc_feature (1)..(551): Homolog of NCBI NO: 15224419 NR Description: hypothetical protein; protein id: At2g04860.1
  misc_feature (1)..(539): Homolog of NCBI NO: 18394615 NR Description: hypothetical protein; protein id: At1g18485.1
  misc_feature (1)..(551): Homolog of NCBI NO: 15233590 NR Description: putative protein; protein id: At4g21300.1
  misc_feature (1)..(539): Homolog of NCBI NO: 25402861 NR Description: protein F15H18.4 [imported] - Arabidopsis >gi|6714305|gb|AAF26001.1|AC013354_20 F15H18.4 [Arabidopsis
  misc_feature (1)..(551): Homolog of NCBI NO: 15218216 NR Description: hypothetical protein; protein id: At1g15510.1
  misc_feature (1)..(551): Homolog of NCBI NO: 34897084 NR Description: hypothetical protein [Oryza sativa (japonica group)] >gi|12957718|gb|AAK09236.1| hypothetical protein [Oryza
  misc_feature (1)..(551): Homolog of NCBI NO: 15220337 NR Description: hypothetical protein; protein id: At1g11290.1
  misc_feature (1)..(541): Homolog of NCBI NO: 34897884 NR Description: Similar to Arabidopsis thaliana DNA chromosome 4,
  misc_feature (1)..(549): Homolog of NCBI NO: 15227623 NR Description: unknown protein; protein id: At2g03380.1
  misc_feature (1)..(551): Homolog of NCBI NO: 38567725 NR Description: B1358B12.23 [Oryza sativa (japonica
MLQQGFSPSATTLVNLLPFCGQCGFVSQGRSVHGVAAKSGLELDSQVKNALISFYSKCAELGSAEVLFREMKDKSTVSWNTMIGAYSQSGLQEEAITVFKNMFEKNVEISPVTIINLLSAHVSHEPLHCLVVKCGMVNDISVVTSLVCAYSRCGCLVSAERLYASAKQDSIVGLTSIVSCYAEKGDMDIAVVYFSKTRQLCMKIDAVALVGILHGCKKSSHIDIGMSLHGYAIKSGLCTKTLVVNGLITMYSKFDDVETVLFLFEQLQETPLISWNSVISGCVQSGRASTAFEVFHQMMLTGGLLPDAITIASLLAGCSQLCCLNLGKELHGYTLRNNFENENFVCTALIDMYAKCGNEVQAESVFKSIKAPCTATWNSMISGYSLSGLQHRALSCYLEMREKGLKPDEITFLGVLSACNHGGFVDEGKICFRAMIKEFGISPTLQHYALMVGLLGRACLFTEALYLIWKMDIKPDSAVWGALLSACIIHRELEVGEYVARKMFMLDYKNGGLYVLMSNLYATEAMWDDVVRVRNMMKDNGYDGYLGVSQI

SEQ ID NO: 73058 - protein, 481 aa, Arabidopsis thaliana
  peptide (1)..(481): Ceres Seq. ID no. 4955330
  misc_feature (1)..(481): Homolog of NCBI NO: 15224419 NR Description: hypothetical protein; protein id: At2g04860.1
  misc_feature (1)..(469): Homolog of NCBI NO: 18394615 NR Description: hypothetical protein; protein id: At1g18485.1
  misc_feature (1)..(481): Homolog of NCBI NO: 15233590 NR Description: putative protein; protein id: At4g21300.1
  misc_feature (1)..(469): Homolog of NCBI NO: 25402861 NR Description: protein F15H18.4 [imported] - Arabidopsis >gi|6714305|gb|AAF26001.1|AC013354_20 F15H18.4 [Arabidopsis
  misc_feature (1)..(481): Homolog of NCBI NO: 15218216 NR Description: hypothetical protein; protein id: At1g15510.1
  misc_feature (1)..(481): Homolog of NCBI NO: 34897084 NR Description: hypothetical protein [Oryza sativa (japonica group)] >gi|12957718|gb|AAK09236.1| hypothetical protein [Oryza
  misc_feature (1)..(481): Homolog of NCBI NO: 15220337 NR Description: hypothetical protein; protein id: At1g11290.1
  misc_feature (1)..(471): Homolog of NCBI NO: 34897884 NR Description: Similar to Arabidopsis thaliana DNA chromosome 4,
  misc_feature (1)..(479): Homolog of NCBI NO: 15227623 NR Description: unknown protein; protein id: At2g03380.1
  misc_feature (1)..(481): Homolog of NCBI NO: 38567725 NR Description: B1358B12.23 [Oryza sativa (japonica
MKDKSTVSWNTMIGAYSQSGLQEEAITVFKNMFEKNVEISPVTIINLLSAHVSHEPLHCLVVKCGMVNDISVVTSLVCAYSRCGCLVSAERLYASAKQDSIVGLTSIVSCYAEKGDMDIAVVYFSKTRQLCMKIDAVALVGILHGCKKSSHIDIGMSLHGYAIKSGLCTKTLVVNGLITMYSKFDDVETVLFLFEQLQETPLISWNSVISGCVQSGRASTAFEVFHQMMLTGGLLPDAITIASLLAGCSQLCCLNLGKELHGYTLRNNFENENFVCTALIDMYAKCGNEVQAESVFKSIKAPCTATWNSMISGYSLSGLQHRALSCYLEMREKGLKPDEITFLGVLSACNHGGFVDEGKICFRAMIKEFGISPTLQHYALMVGLLGRACLFTEALYLIWKMDIKPDSAVWGALLSACIIHRELEVGEYVARKMFMLDYKNGGLYVLMSNLYATEAMWDDVVRVRNMMKDNGYDGYLGVSQI

SEQ ID NO: 73059 - DNA, 1044 bp, Arabidopsis thaliana
  misc_feature (1)..(1044): Ceres Seq. ID no. 4956354
  misc_feature: MA Experiment ID: 20000111 Result: Down-regulated in Transcription
  misc_feature: MA Experiment 20000111 PARAMETER Experiment Name: At_42deg_Heat_cDNA_P Parameter: Temperature (deg C) Value: 42 vs. 22
  misc_feature: MA Experiment 20000111 PARAMETER Experiment Name: At_42deg_Heat_cDNA_P Parameter: Timepoint (hr) Value: 6
  misc_feature: MA Experiment 20000111 PARAMETER Experiment Name: At_42deg_Heat_cDNA_P Parameter: Tissue Value: Aerial
  misc_feature: MA Experiment ID: 20000113 Result: Down-regulated in Transcription
  misc_feature: MA Experiment 20000113 PARAMETER Experiment Name: At_42deg_Heat_cDNA_P Parameter: Temperature (deg C) Value: 42 vs. 22
  misc_feature: MA Experiment 20000113 PARAMETER Experiment Name: At_42deg_Heat_cDNA_P Parameter: Timepoint (hr) Value: 8
  misc_feature: MA Experiment 20000113 PARAMETER Experiment Name: At_42deg_Heat_cDNA_P Parameter: Tissue Value: Aerial
  misc_feature: MA Experiment ID: 20000173 Result: Down-regulated in Transcription
  misc_feature: MA Experiment 20000173 PARAMETER Experiment Name: At_42deg_Heat_P Parameter: Age (day) Value: 14
  misc_feature: MA Experiment 20000173 PARAMETER Experiment Name: At_42deg_Heat_P Parameter: Organism Value: A. thaliana
  misc_feature: MA Experiment 20000173 PARAMETER Experiment Name: At_42deg_Heat_P Parameter: Plant Line Value: WS
  misc_feature: MA Experiment 20000173 PARAMETER Experiment Name: At_42deg_Heat_P Parameter: Temperature (deg C) Value: 42 vs. 22
  misc_feature: MA Experiment 20000173 PARAMETER Experiment Name: At_42deg_Heat_P Parameter: Timepoint (hr) Value: 6
  misc_feature: MA Experiment 20000173 PARAMETER Experiment Name: At_42deg_Heat_P Parameter: Tissue Value: Aerial
  misc_feature: MA Experiment ID: 20000235 Result: Up-regulated in Transcription
  misc_feature: MA Experiment 20000235 PARAMETER Experiment Name: At_Siliques_P Parameter: Age (day) Value: 21
  misc_feature: MA Experiment 20000235 PARAMETER Experiment Name: At_Siliques_P Parameter: Organism Value: A. thaliana
  misc_feature: MA Experiment 20000235 PARAMETER Experiment Name: At_Siliques_P Parameter: Plant Line Value: WS
  misc_feature: MA Experiment 20000235 PARAMETER Experiment Name: At_Siliques_P Parameter: Tissue Value: 5-10mm Siliques vs. Whole Plant
  misc_feature: MA Experiment ID: 20000265 Result: Up-regulated in Transcription
  misc_feature: MA Experiment 20000265 PARAMETER Experiment Name: At_Open_Flower_P Parameter: Age (day) Value: 21
  misc_feature: MA Experiment 20000265 PARAMETER Experiment Name: At_Open_Flower_P Parameter: Plant Line Value: WS
  misc_feature: MA Experiment 20000265 PARAMETER Experiment Name: At_Open_Flower_P Parameter: Tissue Value: Closed Flower vs. Whole Plant
  misc_feature: MA Experiment ID: 20001451 Result: Down-regulated in Transcription
  misc_feature: MA Experiment 20001451 PARAMETER Experiment Name: At_Far-red-induction_P Parameter: Age (day) Value: 7
  misc_feature: MA Experiment 20001451 PARAMETER Experiment Name: At_Far-red-induction_P Parameter: Light Value: Far-red vs. White
  misc_feature: MA Experiment 20001451 PARAMETER Experiment Name: At_Far-red-induction_P Parameter: Organism Value: A. thaliana
  misc_feature: MA Experiment 20001451 PARAMETER Experiment Name: At_Far-red-induction_P Parameter: Plant Line Value: Columbia
  misc_feature: MA Experiment 20001451 PARAMETER Experiment Name: At_Far-red-induction_P Parameter: Timepoint (hr) Value: 24
  misc_feature: MA Experiment 20001451 PARAMETER Experiment Name: At_Far-red-induction_P Parameter: Tissue Value: Whole Plant
  misc_feature: MA Experiment ID: 20001560 Result: Up-regulated in Transcription
  misc_feature: MA Experiment 20001560 PARAMETER Experiment Name: At_Drought_Soil_Dry_P Parameter: Age (day) Value: 28
  misc_feature: MA Experiment 20001560 PARAMETER Experiment Name: At_Drought_Soil_Dry_P Parameter: Organism Value: A. thaliana
  misc_feature: MA Experiment 20001560 PARAMETER Experiment Name: At_Drought_Soil_Dry_P Parameter: Plant Line Value: WS
  misc_feature: MA Experiment 20001560 PARAMETER Experiment Name: At_Drought_Soil_Dry_P Parameter: Post Timepoint (hr) Value: None
  misc_feature: MA Experiment 20001560 PARAMETER Experiment Name: At_Drought_Soil_Dry_P Parameter: Post-Treatment Value: None
  misc_feature: MA Experiment 20001560 PARAMETER Experiment Name: At_Drought_Soil_Dry_P Parameter: Timepoint (day) Value: 14
  misc_feature: MA Experiment 20001560 PARAMETER Experiment Name: At_Drought_Soil_Dry_P Parameter: Treatment Value: Drought vs. No Drought
  misc_feature: MA Experiment ID: 20001911 Result: Down-regulated in Transcription
  misc_feature: MA Experiment 20001911 PARAMETER Experiment Name: At_Drought_Reproduction_P Parameter: Age (day) Value: 40
  misc_feature: MA Experiment 20001911 PARAMETER Experiment Name: At_Drought_Reproduction_P Parameter: Organism Value: A. thaliana
  misc_feature: MA Experiment 20001911 PARAMETER Experiment Name: At_Drought_Reproduction_P Parameter: Plant Line Value: WS
  misc_feature: MA Experiment 20001911 PARAMETER Experiment Name: At_Drought_Reproduction_P Parameter: Timepoint (day) Value: 10
  misc_feature: MA Experiment 20001911 PARAMETER Experiment Name: At_Drought_Reproduction_P Parameter: Tissue Value: Flowers
  misc_feature: MA Experiment 20001911 PARAMETER Experiment Name: At_Drought_Reproduction_P Parameter: Treatment Value: Drought vs. No Drought
aaaaaacgataagggatctctctctaattggcgctcctttactaattgccctttaattccatccatcttcggattcttttcaaatcaacaaaaaaagtacaaatcggatccctacaatatcctctccactcttcacaaatccttctccgagatctacaaacgctgtttcattcttccgattacaatggcgacgagaagacgtactttgctcaaggtcattgtcctcggtgacagtggggttggaaaaacctccttgatgaatcaatatgtgcataagaagtttagtatgcagtataaagcaacgattggtgctgattttgtaaccaaggagcttcagattggggaaaagcttgttactttacagatttgggatactgctggacaagagagattccagagtcttggtgctgctttttatagaggagctgattgttgtgctttggtttatgatgttaatgtgttgaggtcttttgataatctcgaaacttggcatgaggagtttcttaaacaggcaagtccatcagatccaaagacatttccgtttatagtgcttggaaacaagattgacgtagatggagggagcagtagagtggtctctgataagaaagcagctgactggtgtgcttcaaatggtaacataccctatttcgagacatcagcaaaagatgacttcaatgtcgatgaggcattcttaaccattgccaaaaccgcccttgctaacgaacatgaacaggatatatacttccaaggcataccagatgcagtgactgaaaacgagccaaaaggcggtggttgcgcttgctgaaccacagatttgaggattcaatgacattcgtttttttgatgcattcatttgaaggttggtgtactcttgagttgcagaacgataagcttgtagaagcaattttttgtcattccatcatatattaattgattggagaagtctgtgtatgatcaatcgattctgctggatacaaattttatttttgtaagaagaaccattattgctcttaatccctatggcgatataaagttgcatgctac

SEQ ID NO: 73060 - protein, 267 aa, Arabidopsis thaliana
  peptide (1)..(267): Ceres Seq. ID no. 4956355
  misc_feature (71)..(239): Pfam Name: Ras family Pfam Description: Ras family
  misc_feature (62)..(267): Homolog of NCBI NO: 15234026 NR Description: GTP-binding protein, putative; protein id: supported by cDNA: gi_15718417 [Arabidopsis thaliana]
  misc_feature (62)..(267): Homolog of NCBI NO: 7438424 NR Description: rab7 protein homolog F17A8.70 - Arabidopsis
  misc_feature (62)..(267): Homolog of NCBI NO: 1370182 NR Description: RAB7A [Lotus japonicus]
  misc_feature (62)..(267): Homolog of NCBI NO: 3914559 NR Description: RAS-RELATED PROTEIN RAB7
  misc_feature (96)..(267): Homolog of NCBI NO: 30681167 NR Description: GTP-binding protein, putative [Arabidopsis
  misc_feature (62)..(267): Homolog of NCBI NO: 3914558 NR Description: RAS-RELATED PROTEIN RAB7 >gi|629657|pir||S39567
  misc_feature (62)..(267): Homolog of NCBI NO: 541949 NR Description: rab7 protein - Soybean
  misc_feature (62)..(267): Homolog of NCBI NO: 7438410 NR Description: GTP-binding protein Rab7c - common tobacco
  misc_feature (62)..(266): Homolog of NCBI NO: 1370184 NR Description: RAB7B [Lotus japonicus]
  misc_feature (62)..(267): Homolog of NCBI NO: 15219943 NR Description: Ras-related GTP-binding protein (Rab7); protein At1g22740.1, supported by cDNA: gi_15718415 [Arabidopsis
KNDKGSLSNWRSFTNCPLIPSIFGFFSNQQKKYKSDPYNILSTLHKSFSEIYKRCFILPITMATRRRTLLKVIVLGDSGVGKTSLMNQYVHKKFSMQYKATIGADFVTKELQIGEKLVTLQIWDTAGQERFQSLGAAFYRGADCCALVYDVNVLRSFDNLETWHEEFLKQASPSDPKTFPFIVLGNKIDVDGGSSRVVSDKKAADWCASNGNIPYFETSAKDDFNVDEAFLTIAKTALANEHEQDIYFQGIPDAVTENEPKGGGCAC

SEQ ID NO: 73061 - protein, 206 aa, Arabidopsis thaliana; identical to SEQ ID NO: 37351
  peptide (1)..(206): Ceres Seq. ID no. 4956356
  misc_feature (10)..(178): Pfam Name: Ras family Pfam Description: Ras family
  misc_feature (1)..(206): Homolog of NCBI NO: 15234026 NR Description: GTP-binding protein, putative; protein id: supported by cDNA: gi_15718417 [Arabidopsis thaliana]
  misc_feature (1)..(206): Homolog of NCBI NO: 7438424 NR Description: rab7 protein homolog F17A8.70 - Arabidopsis
  misc_feature (1)..(206): Homolog of NCBI NO: 1370182 NR Description: RAB7A [Lotus japonicus]
  misc_feature (1)..(206): Homolog of NCBI NO: 3914559 NR Description: RAS-RELATED PROTEIN RAB7
  misc_feature (35)..(206): Homolog of NCBI NO: 30681167 NR Description: GTP-binding protein, putative [Arabidopsis
  misc_feature (1)..(206): Homolog of NCBI NO: 3914558 NR Description: RAS-RELATED PROTEIN RAB7 >gi|629657|pir||S39567
  misc_feature (1)..(206): Homolog of NCBI NO: 541949 NR Description: rab7 protein - Soybean
  misc_feature (1)..(206): Homolog of NCBI NO: 7438410 NR Description: GTP-binding protein Rab7c - common tobacco
  misc_feature (1)..(205): Homolog of NCBI NO: 1370184 NR Description: RAB7B [Lotus japonicus]
  misc_feature (1)..(206): Homolog of NCBI NO: 15219943 NR Description: Ras-related GTP-binding protein (Rab7); protein At1g22740.1, supported by cDNA: gi_15718415 [Arabidopsis

SEQ ID NO: 73062 - protein, 182 aa, Arabidopsis thaliana; identical to SEQ ID NO: 37352
  peptide (1)..(182): Ceres Seq. ID no. 4956357
  misc_feature (1)..(154): Pfam Name: Ras family Pfam Description: Ras family
  misc_feature (1)..(182): Homolog of NCBI NO: 15234026 NR Description: GTP-binding protein, putative; protein id: supported by cDNA: gi_15718417 [Arabidopsis thaliana]
  misc_feature (1)..(182): Homolog of NCBI NO: 7438424 NR Description: rab7 protein homolog F17A8.70 - Arabidopsis
  misc_feature (1)..(182): Homolog of NCBI NO: 1370182 NR Description: RAB7A [Lotus japonicus]
  misc_feature (1)..(182): Homolog of NCBI NO: 3914559 NR Description: RAS-RELATED PROTEIN RAB7
  misc_feature (11)..(182): Homolog of NCBI NO: 30681167 NR Description: GTP-binding protein, putative [Arabidopsis
  misc_feature (1)..(182): Homolog of NCBI NO: 3914558 NR Description: RAS-RELATED PROTEIN RAB7 >gi|629657|pir||S39567
  misc_feature (1)..(182): Homolog of NCBI NO: 541949 NR Description: rab7 protein - Soybean
  misc_feature (1)..(182): Homolog of NCBI NO: 7438410 NR Description: GTP-binding protein Rab7c - common tobacco
  misc_feature (1)..(181): Homolog of NCBI NO: 1370184 NR Description: RAB7B [Lotus japonicus]
  misc_feature (1)..(182): Homolog of NCBI NO: 15219943 NR Description: Ras-related GTP-binding protein (Rab7); protein At1g22740.1, supported by cDNA: gi_15718415 [Arabidopsis

SEQ ID NO: 73063 - DNA, 1197 bp, Arabidopsis thaliana
  misc_feature (1)..(1197): Ceres Seq. ID no. 4956534
  misc_feature: MA Experiment ID: 20000234 Result: Up-regulated in Transcription
  misc_feature: MA Experiment 20000234 PARAMETER Experiment Name: At_Siliques_P Parameter: Age (day) Value: 21
  misc_feature: MA Experiment 20000234 PARAMETER Experiment Name: At_Siliques_P Parameter: Organism Value: A. thaliana
  misc_feature: MA Experiment 20000234 PARAMETER Experiment Name: At_Siliques_P Parameter: Plant Line Value: WS
  misc_feature: MA Experiment 20000234 PARAMETER Experiment Name: At_Siliques_P Parameter: Tissue Value: Less Than 5mm Siliques vs. Whole Plant
atgaaattggggtgtgcacttccaatgacgtgcatgattttggcatgctatattatttgtgggagccttctaatgagtcattgccatggtgttataaaagaagcaaagacattaaaaagtaatgaagatcttgaaatagagcacaaacttaagcttatcaacaaacctgcatttaaaatcgtaaagactattaatggtgaacgatatgggtgtgtggatttctacaaacaaccaggacttgaccactcatccatgaagaaccacacatttcaccataagatgcgtatgtcatactctgaaggatcaaaaatgaaaagaaagacacatagaaacacaacatttggccacttttgggagaatggcgtaggttgtcccattggtaccgttcctatacctcgagtcactaaagacgctcttttgagaatgaaatccttcgatagcgataattctaatccgcaaagttcgtggagcaaaacctataaacctgcatcttctattgacgatcatcattttgctgtggtgcgaactactaaaggaactaggagttacaatggtgcatctatgaatattaatacattcactccttcagttggacctatgcaattcagcgcttctcggatgcattttcaaattggaaatgaattcatccaagttggttggatcgtacacccacaattataccatgacttcaactctcggatattcgtatttacaaaatcgggaggaaatgcgtgttataatctcttctgtcctgacggatccggaatgatactagttcgtcaagacttaactcctggtctacttgccgagcaaaaaagtattgacttcgccataatgaaggacaaaatcaacgggaattggtggttgttgatgggtacatcttgggaagaagttgggttttggccatcaagcagattcaaagaaagttctggtacaatggtcgaatggggtggtgaagtctatagcccttcgcctccaaatcctccaatggggaatagtcattatccgaaggggagccccaaagtagactcatatgtccgtttaattacgactgtggacgaaaattataatactgacaaaacagtgaaaaacacagagaggtattcagacagttgttataaagtgagagatgcaacggagacgttttggagccatgtcggtcatcttattatatatggaggccctgggtgtaaataa

SEQ ID NO: 73064 - protein, 398 aa, Arabidopsis thaliana
  peptide (1)..(398): Ceres Seq. ID no. 4956535
  misc_feature (281)..(360): Pfam Name: Arabidopsis proteins of unknown function Pfam Description: Arabidopsis proteins of unknown function
  misc_feature (1)..(221): Homolog of NCBI NO: 7487857 NR Description: hypothetical protein T9A4.9 - Arabidopsis >gi|3695413|gb|AAC62813.1| T9A4.9 gene product [Arabidopsis
  misc_feature (281)..(398): Homolog of NCBI NO: 7487857 NR Description: hypothetical protein T9A4.9 - Arabidopsis >gi|3695413|gb|AAC62813.1| T9A4.9 gene product [Arabidopsis
  misc_feature (1)..(382): Homolog of NCBI NO: 15234977 NR Description: putative protein; protein id: At4g10210.1
  misc_feature (94)..(221): Homolog of NCBI NO: 15234979 NR Description: putative protein; protein id: At4g10220.1
  misc_feature (281)..(398): Homolog of NCBI NO: 15234979 NR Description: putative protein; protein id: At4g10220.1
  misc_feature (12)..(396): Homolog of NCBI NO: 15218449 NR Description: unknown protein; protein id: At1g10190.1, by cDNA: gi_18175986 [Arabidopsis thaliana] unknown protein [Arabidopsis thaliana]
  misc_feature (12)..(396): Homolog of NCBI NO: 30683101 NR Description: expressed protein [Arabidopsis thaliana]
  misc_feature (12)..(222): Homolog of NCBI NO: 25345694 NR Description: protein F14N23.7 [imported] - Arabidopsis >gi|4914321|gb|AAD32869.1|AC005489_7 F14N23.7 [Arabidopsis
  misc_feature (222)..(396): Homolog of NCBI NO: 25345694 NR Description: protein F14N23.7 [imported] - Arabidopsis >gi|4914321|gb|AAD32869.1|AC005489_7 F14N23.7 [Arabidopsis
  misc_feature (8)..(396): Homolog of NCBI NO: 22328636 NR Description: similar to putative carboxyl-terminal peptidase;
MKLGCALPMTCMILACYIICGSLLMSHCHGVIKEAKTLKSNEDLEIEHKLKLINKPAFKIVKTINGERYGCVDFYKQPGLDHSSMKNHTFHHKMRMSYSEGSKMKRKTHRNTTFGHFWENGVGCPIGTVPIPRVTKDALLRMKSFDSDNSNPQSSWSKTYKPASSIDDHHFAVVRTTKGTRSYNGASMNINTFTPSVGPMQFSASRMHFQIGNEFIQVGWIVHPQLYHDFNSRIFVFTKSGGNACYNLFCPDGSGMILVRQDLTPGLLAEQKSIDFAIMKDKINGNWWLLMGTSWEEVGFWPSSRFKESSGTMVEWGGEVYSPSPPNPPMGNSHYPKGSPKVDSYVRLITTVDENYNTDKTVKNTERYSDSCYKVRDATETFWSHVGHLIIYGGPGCK

SEQ ID NO: 73065 - protein, 390 aa, Arabidopsis thaliana
  peptide (1)..(390): Ceres Seq. ID no. 4956536
  misc_feature (273)..(352): Pfam Name: Arabidopsis proteins of unknown function Pfam Description: Arabidopsis proteins of unknown function
  misc_feature (1)..(213): Homolog of NCBI NO: 7487857 NR Description: hypothetical protein T9A4.9 - Arabidopsis >gi|3695413|gb|AAC62813.1| T9A4.9 gene product [Arabidopsis
  misc_feature (273)..(390): Homolog of NCBI NO: 7487857 NR Description: hypothetical protein T9A4.9 - Arabidopsis >gi|3695413|gb|AAC62813.1| T9A4.9 gene product [Arabidopsis
  misc_feature (1)..(374): Homolog of NCBI NO: 15234977 NR Description: putative protein; protein id: At4g10210.1
  misc_feature (86)..(213): Homolog of NCBI NO: 15234979 NR Description: putative protein; protein id: At4g10220.1
  misc_feature (273)..(390): Homolog of NCBI NO: 15234979 NR Description: putative protein; protein id: At4g10220.1
  misc_feature (4)..(388): Homolog of NCBI NO: 15218449 NR Description: unknown protein; protein id: At1g10190.1, by cDNA: gi_18175986 [Arabidopsis thaliana] unknown protein [Arabidopsis thaliana]
  misc_feature (4)..(388): Homolog of NCBI NO: 30683101 NR Description: expressed protein [Arabidopsis thaliana]
  misc_feature (4)..(214): Homolog of NCBI NO: 25345694 NR Description: protein F14N23.7 [imported] - Arabidopsis >gi|4914321|gb|AAD32869.1|AC005489_7 F14N23.7 [Arabidopsis
  misc_feature (214)..(388): Homolog of NCBI NO: 25345694 NR Description: protein F14N23.7 [imported] - Arabidopsis >gi|4914321|gb|AAD32869.1|AC005489_7 F14N23.7 [Arabidopsis
  misc_feature (1)..(388): Homolog of NCBI NO: 22328636 NR Description: similar to putative carboxyl-terminal peptidase;
MTCMILACYIICGSLLMSHCHGVIKEAKTLKSNEDLEIEHKLKLINKPAFKIVKTINGERYGCVDFYKQPGLDHSSMKNHTFHHKMRMSYSEGSKMKRKTHRNTTFGHFWENGVGCPIGTVPIPRVTKDALLRMKSFDSDNSNPQSSWSKTYKPASSIDDHHFAVVRTTKGTRSYNGASMNINTFTPSVGPMQFSASRMHFQIGNEFIQVGWIVHPQLYHDFNSRIFVFTKSGGNACYNLFCPDGSGMILVRQDLTPGLLAEQKSIDFAIMKDKINGNWWLLMGTSWEEVGFWPSSRFKESSGTMVEWGGEVYSPSPPNPPMGNSHYPKGSPKVDSYVRLITTVDENYNTDKTVKNTERYSDSCYKVRDATETFWSHVGHLIIYGGPGCK

SEQ ID NO: 73066 - protein, 387 aa, Arabidopsis thaliana
  peptide (1)..(387): Ceres Seq. ID no. 4956537
  misc_feature (270)..(349): Pfam Name: Arabidopsis proteins of unknown function Pfam Description: Arabidopsis proteins of unknown function
  misc_feature (1)..(210): Homolog of NCBI NO: 7487857 NR Description: hypothetical protein T9A4.9 - Arabidopsis >gi|3695413|gb|AAC62813.1| T9A4.9 gene product [Arabidopsis
  misc_feature (270)..(387): Homolog of NCBI NO: 7487857 NR Description: hypothetical protein T9A4.9 - Arabidopsis >gi|3695413|gb|AAC62813.1| T9A4.9 gene product [Arabidopsis
  misc_feature (1)..(371): Homolog of NCBI NO: 15234977 NR Description: putative protein; protein id: At4g10210.1
  misc_feature (83)..(210): Homolog of NCBI NO: 15234979 NR Description: putative protein; protein id: At4g10220.1
  misc_feature (270)..(387): Homolog of NCBI NO: 15234979 NR Description: putative protein; protein id: At4g10220.1
  misc_feature (1)..(385): Homolog of NCBI NO: 15218449 NR Description: unknown protein; protein id: At1g10190.1, by cDNA: gi_18175986 [Arabidopsis thaliana] unknown protein [Arabidopsis thaliana]
  misc_feature (1)..(385): Homolog of NCBI NO: 30683101 NR Description: expressed protein [Arabidopsis thaliana]
  misc_feature (1)..(211): Homolog of NCBI NO: 25345694 NR Description: protein F14N23.7 [imported] - Arabidopsis >gi|4914321|gb|AAD32869.1|AC005489_7 F14N23.7 [Arabidopsis
  misc_feature (211)..(385): Homolog of NCBI NO: 25345694 NR Description: protein F14N23.7 [imported] - Arabidopsis >gi|4914321|gb|AAD32869.1|AC005489_7 F14N23.7 [Arabidopsis
  misc_feature (1)..(385): Homolog of NCBI NO: 22328636 NR Description: similar to putative carboxyl-terminal peptidase;
MILACYIICGSLLMSHCHGVIKEAKTLKSNEDLEIEHKLKLINKPAFKIVKTINGERYGCVDFYKQPGLDHSSMKNHTFHHKMRMSYSEGSKMKRKTHRNTTFGHFWENGVGCPIGTVPIPRVTKDALLRMKSFDSDNSNPQSSWSKTYKPASSIDDHHFAVVRTTKGTRSYNGASMNINTFTPSVGPMQFSASRMHFQIGNEFIQVGWIVHPQLYHDFNSRIFVFTKSGGNACYNLFCPDGSGMILVRQDLTPGLLAEQKSIDFAIMKDKINGNWWLLMGTSWEEVGFWPSSRFKESSGTMVEWGGEVYSPSPPNPPMGNSHYPKGSPKVDSYVRLITTVDENYNTDKTVKNTERYSDSCYKVRDATETFWSHVGHLIIYGGPGCK

SEQ ID NO: 73067 - DNA, 1175 bp, Arabidopsis thaliana
  misc_feature (1)..(1175): Ceres Seq. ID no. 4956558
  misc_feature: MA Experiment ID: 108433 Result: Down-regulated in Transcription
  misc_feature: MA Experiment 108433 PARAMETER Experiment Name: At_rhl_Mutant2_cDNA_P Parameter: Age (day) Value: 7
  misc_feature: MA Experiment 108433 PARAMETER Experiment Name: At_rhl_Mutant2_cDNA_P Parameter: Organism Value: A. thaliana
  misc_feature: MA Experiment 108433 PARAMETER Experiment Name: At_rhl_Mutant2_cDNA_P Parameter: Plant Line Value: rhl Mutant vs. wt landsburg
  misc_feature: MA Experiment 108433 PARAMETER Experiment Name: At_rhl_Mutant2_cDNA_P Parameter: Tissue Value: Roots
  misc_feature: MA Experiment ID: 108434 Result: Up-regulated in Transcription
  misc_feature: MA Experiment 108434 PARAMETER Experiment Name: At_Root_Tips_cDNA_P Parameter: Tissue Value: Root Tips
  misc_feature: MA Experiment ID: 108435 Result: Up-regulated in Transcription
  misc_feature: MA Experiment 108435 PARAMETER Experiment Name: At_stm_Mutants_cDNA_P Parameter: Plant Line Value: wt Landsburg vs stm
  misc_feature: MA Experiment 108435 PARAMETER Experiment Name: At_stm_Mutants_cDNA_P Parameter: Tissue Value: Shoot Apical Meristem Region
  misc_feature: MA Experiment ID: 108461 Result: Up-regulated in Transcription
  misc_feature: MA Experiment 108461 PARAMETER Experiment Name: At_Germinating_Seeds_cDNA_P Parameter: Age (day) Value: 1 vs. 0
  misc_feature: MA Experiment 108461 PARAMETER Experiment Name: At_Germinating_Seeds_cDNA_P Parameter: Tissue Value: Germinating Seeds
  misc_feature: MA Experiment ID: 108462 Result: Up-regulated in Transcription
  misc_feature: MA Experiment 108462 PARAMETER Experiment Name: At_Germinating_Seeds_cDNA_P Parameter: Age (day) Value: 2 vs. 0
  misc_feature: MA Experiment 108462 PARAMETER Experiment Name: At_Germinating_Seeds_cDNA_P Parameter: Tissue Value: Germinating Seeds
  misc_feature: MA Experiment ID: 108463 Result: Up-regulated in Transcription
  misc_feature: MA Experiment 108463 PARAMETER Experiment Name: At_Germinating_Seeds_cDNA_P Parameter: Age (day) Value: 3 vs. 0
  misc_feature: MA Experiment 108463 PARAMETER Experiment Name: At_Germinating_Seeds_cDNA_P Parameter: Tissue Value: Germinating Seeds
  misc_feature: MA Experiment ID: 108464 Result: Up-regulated in Transcription
  misc_feature: MA Experiment 108464 PARAMETER Experiment Name: At_Germinating_Seeds_cDNA_P Parameter: Age (day) Value: 4 vs. 0
  misc_feature: MA Experiment 108464 PARAMETER Experiment Name: At_Germinating_Seeds_cDNA_P Parameter: Tissue Value: Germinating Seeds
  misc_feature: MA Experiment ID: 108489 Result: Up-regulated in Transcription
  misc_feature: MA Experiment ID: 108501 Result: Up-regulated in Transcription
  misc_feature: MA Experiment 108501 PARAMETER Experiment Name: At_ap2_floral_buds_cDNA_P Parameter: Plant Line Value: ap2 (Ler.)
  misc_feature: MA Experiment 108501 PARAMETER Experiment Name: At_ap2_floral_buds_cDNA_P Parameter: Tissue Value: Closed Flower
  misc_feature: MA Experiment ID: 108561 Result: Down-regulated in Transcription
  misc_feature: MA Experiment 108561 PARAMETER Experiment Name: At_100uM_ABA_cDNA_P Parameter: Timepoint (hr) Value: 6
  misc_feature: MA Experiment 108561 PARAMETER Experiment Name: At_100uM_ABA_cDNA_P Parameter: Tissue Value: Aerial
  misc_feature: MA Experiment 108561 PARAMETER Experiment Name: At_100uM_ABA_cDNA_P Parameter: Treatment Value: 100uM ABA vs. No Treatment
  misc_feature: MA Experiment ID: 108605 Result: Down-regulated in Transcription
  misc_feature: MA Experiment 108605 PARAMETER Experiment Name: At_100uM_ABA_cDNA_P Parameter: Timepoint (hr) Value: 6
  misc_feature: MA Experiment 108605 PARAMETER Experiment Name: At_100uM_ABA_cDNA_P Parameter: Tissue Value: Aerial
  misc_feature: MA Experiment 108605 PARAMETER Experiment Name: At_100uM_ABA_cDNA_P Parameter: Treatment Value: 100uM ABA vs. No Treatment
  misc_feature: MA Experiment ID: 108607 Result: Down-regulated in Transcription
  misc_feature: MA Experiment 108607 PARAMETER Experiment Name: At_100uM_ABA_cDNA_P Parameter: Timepoint (hr) Value: 4
  misc_feature: MA Experiment 108607 PARAMETER Experiment Name: At_100uM_ABA_cDNA_P Parameter: Tissue Value: Aerial
  misc_feature: MA Experiment 108607 PARAMETER Experiment Name: At_100uM_ABA_cDNA_P Parameter: Treatment Value: 100uM ABA vs. No Treatment
  misc_feature: MA Experiment ID: 108609 Result: Down-regulated in Transcription
  misc_feature: MA Experiment 108609 PARAMETER Experiment Name: At_100uM_ABA_cDNA_P Parameter: Timepoint (hr) Value: 24
  misc_feature: MA Experiment 108609 PARAMETER Experiment Name: At_100uM_ABA_cDNA_P Parameter: Tissue Value: Aerial
  misc_feature: MA Experiment 108609 PARAMETER Experiment Name: At_100uM_ABA_cDNA_P Parameter: Treatment Value: 100uM ABA vs. No Treatment
  misc_feature: MA Experiment ID: 20000030 Result: Down-regulated in Transcription
  misc_feature: MA Experiment 20000030 PARAMETER Experiment Name: At_CS6630_Roots_cDNA_P Parameter: Plant Line Value: CS6630 vs. WS
  misc_feature: MA Experiment 20000030 PARAMETER Experiment Name: At_CS6630_Roots_cDNA_P Parameter: Tissue Value: Roots
  misc_feature: MA Experiment ID: 20000070 Result: Down-regulated in Transcription
  misc_feature: MA Experiment 20000070 PARAMETER Experiment Name: At_100uM_ABA_Mutants_cDNA_P Parameter: Plant Line Value: CS24
  misc_feature: MA Experiment 20000070 PARAMETER Experiment Name: At_100uM_ABA_Mutants_cDNA_P Parameter: Timepoint (hr) Value: 6
  misc_feature: MA Experiment 20000070 PARAMETER Experiment Name: At_100uM_ABA_Mutants_cDNA_P Parameter: Tissue Value: Aerial
  misc_feature: MA Experiment 20000070 PARAMETER Experiment Name: At_100uM_ABA_Mutants_cDNA_P Parameter: Treatment Value: 100uM ABA vs. No Treatment
  misc_feature: MA Experiment ID: 20000071 Result: Down-regulated in Transcription
  misc_feature: MA Experiment 20000071 PARAMETER Experiment Name: At_100uM_ABA_Mutants_cDNA_P Parameter: Plant Line Value: CS8104
  misc_feature: MA Experiment 20000071 PARAMETER Experiment Name: At_100uM_ABA_Mutants_cDNA_P Parameter: Timepoint (hr) Value: 6
  misc_feature: MA Experiment 20000071 PARAMETER Experiment Name: At_100uM_ABA_Mutants_cDNA_P Parameter: Tissue Value: Aerial
  misc_feature: MA Experiment 20000071 PARAMETER Experiment Name: At_100uM_ABA_Mutants_cDNA_P Parameter: Treatment Value: 100uM ABA vs. No Treatment
  misc_feature: MA Experiment ID: 20000111 Result: Down-regulated in Transcription
  misc_feature: MA Experiment 20000111 PARAMETER Experiment Name: At_42deg_Heat_cDNA_P Parameter: Temperature (deg C) Value: 42 vs. 22
  misc_feature: MA Experiment 20000111 PARAMETER Experiment Name: At_42deg_Heat_cDNA_P Parameter: Timepoint (hr) Value: 6
  misc_feature: MA Experiment 20000111 PARAMETER Experiment Name: At_42deg_Heat_cDNA_P Parameter: Tissue Value: Aerial
  misc_feature: MA Experiment ID: 20000144 Result: Down-regulated in Transcription
  misc_feature: MA Experiment 20000144 PARAMETER Experiment Name: At_42deg_Heat_cDNA_P Parameter: Temperature (deg C) Value: 42 vs. 22
  misc_feature: MA Experiment 20000144 PARAMETER Experiment Name: At_42deg_Heat_cDNA_P Parameter: Timepoint (hr) Value: 1
  misc_feature: MA Experiment 20000144 PARAMETER Experiment Name: At_42deg_Heat_cDNA_P Parameter: Tissue Value: Aerial
  misc_feature: MA Experiment ID: 20000169 Result: Down-regulated in Transcription
  misc_feature: MA Experiment 20000169 PARAMETER Experiment Name: At_100uM_ABA_P Parameter: Age (day) Value: 14
  misc_feature: MA Experiment 20000169 PARAMETER Experiment Name: At_100uM_ABA_P Parameter: Organism Value: A. thaliana
  misc_feature: MA Experiment 20000169 PARAMETER Experiment Name: At_100uM_ABA_P Parameter: Plant Line Value: WS
  misc_feature: MA Experiment 20000169 PARAMETER Experiment Name: At_100uM_ABA_P Parameter: Timepoint (hr) Value: 6
  misc_feature: MA Experiment 20000169 PARAMETER Experiment Name: At_100uM_ABA_P Parameter: Tissue Value: Aerial
  misc_feature: MA Experiment 20000169 PARAMETER Experiment Name: At_100uM_ABA_P Parameter: Treatment Value: 100uM ABA vs. No Treatment
  misc_feature: MA Experiment ID: 20000173 Result: Down-regulated in Transcription
  misc_feature: MA Experiment 20000173 PARAMETER Experiment Name: At_42deg_Heat_P Parameter: Age (day) Value: 14
  misc_feature: MA Experiment 20000173 PARAMETER Experiment Name: At_42deg_Heat_P Parameter: Organism Value: A. thaliana
  misc_feature: MA Experiment 20000173 PARAMETER Experiment Name: At_42deg_Heat_P Parameter: Plant Line Value: WS
  misc_feature: MA Experiment 20000173 PARAMETER Experiment Name: At_42deg_Heat_P Parameter: Temperature (deg C) Value: 42 vs. 22
  misc_feature: MA Experiment 20000173 PARAMETER Experiment Name: At_42deg_Heat_P Parameter: Timepoint (hr) Value: 6
  misc_feature: MA Experiment 20000173 PARAMETER Experiment Name: At_42deg_Heat_P Parameter: Tissue Value: Aerial
  misc_feature: MA Experiment ID: 20000180 Result: Up-regulated in Transcription
  misc_feature: MA Experiment 20000180 PARAMETER Experiment Name: At_Germinating_Seeds_P Parameter: Age (hr) Value: 24 vs. 0
  misc_feature: MA Experiment 20000180 PARAMETER Experiment Name: At_Germinating_Seeds_P Parameter: Tissue Value: Germinating Seeds
  misc_feature: MA Experiment ID: 20000185 Result: Up-regulated in Transcription
  misc_feature: MA Experiment 20000185 PARAMETER Experiment Name: At_Roots__P Parameter: Age (day) Value: 7 vs. 21
  misc_feature: MA Experiment 20000185 PARAMETER Experiment Name: At_Roots__P Parameter: Organism Value: A. thaliana
  misc_feature: MA Experiment 20000185 PARAMETER Experiment Name: At_Roots__P Parameter: Tissue Value: Roots vs. Whole Plant
  misc_feature: MA Experiment ID: 20000224 Result: Down-regulated in Transcription
  misc_feature: MA Experiment ID: 20000437 Result: Down-regulated in Transcription
  misc_feature: MA Experiment 20000437 PARAMETER Experiment Name: At_Drought_P Parameter: Age (day) Value: 8
  misc_feature: MA Experiment 20000437 PARAMETER Experiment Name: At_Drought_P Parameter: Organism Value: A. thaliana
  misc_feature: MA Experiment 20000437 PARAMETER Experiment Name: At_Drought_P Parameter: Plant Line Value: WS
  misc_feature: MA Experiment 20000437 PARAMETER Experiment Name: At_Drought_P Parameter: Timepoint (hr) Value: 24
  misc_feature: MA Experiment 20000437 PARAMETER Experiment Name: At_Drought_P Parameter: Tissue Value: Whole Plant
  misc_feature: MA Experiment 20000437 PARAMETER Experiment Name: At_Drought_P Parameter: Treatment Value: Drought vs. No Drought
  misc_feature: MA Experiment ID: 20000439 Result: Up-regulated in Transcription
  misc_feature: MA Experiment 20000439 PARAMETER Experiment Name: At_Roots__P Parameter: Age (day) Value: 14 vs. 21
  misc_feature: MA Experiment 20000439 PARAMETER Experiment Name: At_Roots__P Parameter: Organism Value: A. thaliana
  misc_feature: MA Experiment 20000439 PARAMETER Experiment Name: At_Roots__P Parameter: Tissue Value: Roots vs. Whole Plant
  misc_feature: MA Experiment ID: 20000453 Result: Down-regulated in Transcription
  misc_feature: MA Experiment 20000453 PARAMETER Experiment Name: At_100uM_ABA_P Parameter: Age (day) Value: 15
  misc_feature: MA Experiment 20000453 PARAMETER Experiment Name: At_100uM_ABA_P Parameter: Organism Value: A. thaliana
  misc_feature: MA Experiment 20000453 PARAMETER Experiment Name: At_100uM_ABA_P Parameter: Plant Line Value: WS
  misc_feature: MA Experiment 20000453 PARAMETER Experiment Name: At_100uM_ABA_P Parameter: Timepoint (hr) Value: 24
  misc_feature: MA Experiment 20000453 PARAMETER Experiment Name: At_100uM_ABA_P Parameter: Tissue Value: Aerial
  misc_feature: MA Experiment 20000453 PARAMETER Experiment Name: At_100uM_ABA_P Parameter: Treatment Value: 100uM ABA vs. No Treatment
  misc_feature: MA Experiment ID: 20000455 Result: Down-regulated in Transcription
  misc_feature: MA Experiment 20000455 PARAMETER Experiment Name: At_100uM_ABA_P Parameter: Age (day) Value: 16
  misc_feature: MA Experiment 20000455 PARAMETER Experiment Name: At_100uM_ABA_P Parameter: Organism Value: A. thaliana
  misc_feature: MA Experiment 20000455 PARAMETER Experiment Name: At_100uM_ABA_P Parameter: Plant Line Value: WS
  misc_feature: MA Experiment 20000455 PARAMETER Experiment Name: At_100uM_ABA_P Parameter: Timepoint (hr) Value: 48
  misc_feature: MA Experiment 20000455 PARAMETER Experiment Name: At_100uM_ABA_P Parameter: Tissue Value: Aerial
  misc_feature: MA Experiment 20000455 PARAMETER Experiment Name: At_100uM_ABA_P Parameter: Treatment Value: 100uM ABA vs. No Treatment
  misc_feature: MA Experiment ID: 20000576 Result: Down-regulated in Transcription
  misc_feature: MA Experiment 20000576 PARAMETER Experiment Name: At_100uM_ABA_Mutants__P Parameter: Organism Value: A. thaliana
  misc_feature: MA Experiment 20000576 PARAMETER Experiment Name: At_100uM_ABA_Mutants__P Parameter: Plant Line Value: CS23
  misc_feature: MA Experiment 20000576 PARAMETER Experiment Name: At_100uM_ABA_Mutants__P Parameter: Timepoint (hr) Value: 6
  misc_feature: MA Experiment 20000576 PARAMETER Experiment Name: At_100uM_ABA_Mutants__P Parameter: Tissue Value: Whole Plant
  misc_feature: MA Experiment 20000576 PARAMETER Experiment Name: At_100uM_ABA_Mutants__P Parameter: Treatment Value: 1uM ABA vs. No Treatment
  misc_feature: MA Experiment ID: 20000794 Result: Down-regulated in Transcription
  misc_feature: MA Experiment 20000794 PARAMETER Experiment Name: At_Petals_P Parameter: Age (day) Value: 23-25 days
  misc_feature: MA Experiment 20000794 PARAMETER Experiment Name: At_Petals_P Parameter: Plant Line Value: WS
  misc_feature: MA Experiment 20000794 PARAMETER Experiment Name: At_Petals_P Parameter: Tissue Value: Petals vs. Whole plant
  misc_feature: MA Experiment ID: 20001450 Result: Down-regulated in Transcription
  misc_feature: MA Experiment 20001450 PARAMETER Experiment Name: At_Far-red-induction_P Parameter: Age (day) Value: 7
  misc_feature: MA Experiment 20001450 PARAMETER Experiment Name: At_Far-red-induction_P Parameter: Light Value: Far-red vs. White
  misc_feature: MA Experiment 20001450 PARAMETER Experiment Name: At_Far-red-induction_P Parameter: Organism Value: A. thaliana
  misc_feature: MA Experiment 20001450 PARAMETER Experiment Name: At_Far-red-induction_P Parameter: Plant Line Value: Columbia
  misc_feature: MA Experiment 20001450 PARAMETER Experiment Name: At_Far-red-induction_P Parameter: Timepoint (hr) Value: 8
  misc_feature: MA Experiment 20001450 PARAMETER Experiment Name: At_Far-red-induction_P Parameter: Tissue Value: Whole Plant
  misc_feature: MA Experiment ID: 20001554 Result: Down-regulated in Transcription
  misc_feature: MA Experiment 20001554 PARAMETER Experiment Name: At_Drought_Soil_Dry_P Parameter: Age (day) Value: 21
  misc_feature: MA Experiment 20001554 PARAMETER Experiment Name: At_Drought_Soil_Dry_P Parameter: Organism Value: A. thaliana
  misc_feature: MA Experiment 20001554 PARAMETER Experiment Name: At_Drought_Soil_Dry_P Parameter: Plant Line Value: WS
  misc_feature: MA Experiment 20001554 PARAMETER Experiment Name: At_Drought_Soil_Dry_P Parameter: Post Timepoint (hr) Value: None
  misc_feature: MA Experiment 20001554 PARAMETER Experiment Name: At_Drought_Soil_Dry_P Parameter: Post-Treatment Value: None
  misc_feature: MA Experiment 20001554 PARAMETER Experiment Name: At_Drought_Soil_Dry_P Parameter: Timepoint (day) Value: 7
  misc_feature: MA Experiment 20001554 PARAMETER Experiment Name: At_Drought_Soil_Dry_P Parameter: Treatment Value: Drought vs. No Drought
  misc_feature: MA Experiment ID: 20001555 Result: Down-regulated in Transcription
  misc_feature: MA Experiment 20001555 PARAMETER Experiment Name: At_Drought_Soil_Dry_P Parameter: Age (day) Value: 24
  misc_feature: MA Experiment 20001555 PARAMETER Experiment Name: At_Drought_Soil_Dry_P Parameter: Organism Value: A. thaliana
  misc_feature: MA Experiment 20001555 PARAMETER Experiment Name: At_Drought_Soil_Dry_P Parameter: Plant Line Value: WS
  misc_feature: MA Experiment 20001555 PARAMETER Experiment Name: At_Drought_Soil_Dry_P Parameter: Post Timepoint (hr) Value: None
  misc_feature: MA Experiment 20001555 PARAMETER Experiment Name: At_Drought_Soil_Dry_P Parameter: Post-Treatment Value: None
  misc_feature: MA Experiment 20001555 PARAMETER Experiment Name: At_Drought_Soil_Dry_P Parameter: Timepoint (day) Value: 10
  misc_feature: MA Experiment 20001555 PARAMETER Experiment Name: At_Drought_Soil_Dry_P Parameter: Treatment Value: Drought vs. No Drought
  misc_feature: MA Experiment ID: 20001556 Result: Down-regulated in Transcription
  misc_feature: MA Experiment 20001556 PARAMETER Experiment Name: At_Drought_Soil_Dry_P Parameter: Age (day) Value: 26
  misc_feature: MA Experiment 20001556 PARAMETER Experiment Name: At_Drought_Soil_Dry_P Parameter: Organism Value: A. thaliana
  misc_feature: MA Experiment 20001556 PARAMETER Experiment Name: At_Drought_Soil_Dry_P Parameter: Plant Line Value: WS
  misc_feature: MA Experiment 20001556 PARAMETER Experiment Name: At_Drought_Soil_Dry_P Parameter: Post Timepoint (hr) Value: None
  misc_feature: MA Experiment 20001556 PARAMETER Experiment Name: At_Drought_Soil_Dry_P Parameter: Post-Treatment Value: None
  misc_feature: MA Experiment 20001556 PARAMETER Experiment Name: At_Drought_Soil_Dry_P Parameter: Timepoint (day) Value: 12
  misc_feature: MA Experiment 20001556 PARAMETER Experiment Name: At_Drought_Soil_Dry_P Parameter: Treatment Value: Drought vs. No Drought
  misc_feature: MA Experiment ID: 20001757 Result: Up-regulated in Transcription
  misc_feature: MA Experiment 20001757 PARAMETER Experiment Name: At_50mM_NH4NO3_L-to-H_P Parameter: Timepoint (hr) Value: 6
  misc_feature: MA Experiment 20001757 PARAMETER Experiment Name: At_50mM_NH4NO3_L-to-H_P Parameter: Tissue Value: Leaf
  misc_feature: MA Experiment 20001757 PARAMETER Experiment Name: At_50mM_NH4NO3_L-to-H_P Parameter: Treatment Value: 50mM NH4NO3 vs 100mM Mannitol
  misc_feature: MA Experiment ID: 20001904 Result: Down-regulated in Transcription
  misc_feature: MA Experiment 20001904 PARAMETER Experiment Name: At_Drought_Reproduction_P Parameter: Age (day) Value: 37
  misc_feature: MA Experiment 20001904 PARAMETER Experiment Name: At_Drought_Reproduction_P Parameter: Organism Value: A. thaliana
  misc_feature: MA Experiment 20001904 PARAMETER Experiment Name: At_Drought_Reproduction_P Parameter: Plant Line Value: WS
  misc_feature: MA Experiment 20001904 PARAMETER Experiment Name: At_Drought_Reproduction_P Parameter: Timepoint (day) Value: 7
  misc_feature: MA Experiment 20001904 PARAMETER Experiment Name: At_Drought_Reproduction_P Parameter: Tissue Value: Rosettes
  misc_feature: MA Experiment 20001904 PARAMETER Experiment Name: At_Drought_Reproduction_P Parameter: Treatment Value: Drought vs. No Drought
  misc_feature: MA Experiment ID: 20001911 Result: Down-regulated in Transcription
  misc_feature: MA Experiment 20001911 PARAMETER Experiment Name: At_Drought_Reproduction_P Parameter: Age (day) Value: 40
  misc_feature: MA Experiment 20001911 PARAMETER Experiment Name: At_Drought_Reproduction_P Parameter: Organism Value: A. thaliana
  misc_feature: MA Experiment 20001911 PARAMETER Experiment Name: At_Drought_Reproduction_P Parameter: Plant Line Value: WS
  misc_feature: MA Experiment 20001911 PARAMETER Experiment Name: At_Drought_Reproduction_P Parameter: Timepoint (day) Value: 10
  misc_feature: MA Experiment 20001911 PARAMETER Experiment Name: At_Drought_Reproduction_P Parameter: Tissue Value: Flowers
  misc_feature: MA Experiment 20001911 PARAMETER Experiment Name: At_Drought_Reproduction_P Parameter: Treatment Value: Drought vs. No Drought
  misc_feature: Pfam Name: peroxidase Pfam Description: Peroxidase
aaacatagttaaaccaaattttctaagtgtctcataaaaaatgacgagattcggattagctcttttgatgattcttgtgattcaagggcttgtgaccttttcagaagcacaattgaagatgggattctacgaccaaacgtgcccttacgcagagaagatcgtacaagatgttgtcaaccaacatataaacaatgcaccctctttggctgctggcctaattaggatgcattttcatgactgcttcgttcggggttgtgatggttccatcttgatcaacgcgacatcgagcaaccaacaagtggagaagcttgctcctccgaatctaactgtgagaggtttcgattttatcgataaagtaaagtctgctctagaatcaaagtgccctggaatcgtctcttgcgctgatatcatcacacttgctactagagactctattgttgctattgcttagggtggaccgacatggaacgttccaacggggcgcagagacggacgtatctctaactttgccgaggctatgaacaatattcctcctcctttcggaaacttcacgactctgataaccctctttggaaaccaaggacttgatgttaaagacctcgtcttgttatccggtgcccacacgattggagtgtctcattgctcctccttctcaaaccgtctcttcaatttcaccggcgttggagaccaagatccatcgctcgacagcgaatatgccgacaatctcaaatcacggagatgtttatctatcgctgacaataccacaaaagtcgaaatggatcccggtagtcgaaacaccttcgatcttagctactaccgtcttgtcctaaaacgtcgtggactttttgagtctgacgctgcattgactatgaatcctgcggcattggctcaggtcaaacgcttcgccggaggatcggagcaagagttctttgctgagttctccaactccatggagaaaatgggaaggattggggtcaaaacagggtcggatggggagattcgaagaacatgtgcatttgttaactaaaagtgtttcttactttttctttcgcaacttttttgttttgttttaaatatcttttatattggtttttatgttccttttgtcaacttttttgggtgtttggaagaatttcgagatatgtattattgtatgtggtgaatatgtgattttc

SEQ ID NO: 73068 - protein, 169 aa, Arabidopsis thaliana; identical to SEQ ID NO: 23987
  peptide (1)..(169): Ceres Seq. ID no. 4956559
  misc_feature: Pfam Name: peroxidase Pfam Description: Peroxidase
  misc_feature (1)..(169): Homolog of NCBI NO: 15237128 NR Description: peroxidase, putative; protein id: At4g11290.1 thaliana] >gi|26397917|sp|Q9SUT2|PE39_ARATH Peroxidase 39 (Atperox P39) (ATP19a) >gi|7433054|pir||T13020 peroxidase (EC
  misc_feature (1)..(169): Homolog of NCBI NO: 1546692 NR Description: peroxidase; peroxidase ATP19a [Arabidopsis
  misc_feature (1)..(169): Homolog of NCBI NO: 15220463 NR Description: peroxidase, putative; protein id: At1g05260.1, by cDNA: 114862., supported by cDNA: gi_2738253 [Arabidopsis >gi|25453190|sp|O23044|PER3_ARATH Peroxidase 3 precursor (Atperox
  misc_feature (1)..(169): Homolog of NCBI NO: 21536908 NR Description: putative peroxidase [Arabidopsis thaliana]

SEQ ID NO: 73069 - protein, 136 aa, Arabidopsis thaliana
  peptide (1)..(136): Ceres Seq. ID no. 4956560
  misc_feature: Pfam Name: peroxidase Pfam Description: Peroxidase
  misc_feature (1)..(136): Homolog of NCBI NO: 15237128 NR Description: peroxidase, putative; protein id: At4g11290.1 thaliana] >gi|26397917|sp|Q9SUT2|PE39_ARATH Peroxidase 39 (Atperox P39) (ATP19a) >gi|7433054|pir||T13020 peroxidase (EC
  misc_feature (1)..(136): Homolog of NCBI NO: 1546692 NR Description: peroxidase; peroxidase ATP19a [Arabidopsis
  misc_feature (6)..(136): Homolog of NCBI NO: 15220463 NR Description: peroxidase, putative; protein id: At1g05260.1, by cDNA: 114862., supported by cDNA: gi_2738253 [Arabidopsis >gi|25453190|sp|O23044|PER3_ARATH Peroxidase 3 precursor (Atperox
  misc_feature (6)..(136): Homolog of NCBI NO: 21536908 NR Description: putative peroxidase [Arabidopsis thaliana]
MTRFGLALLMILVIQGLVTFSEAQLKMGFYDQTCPYAEKIVQDVVNQHINNAPSLAAGLIRMHFHDCFVRGCDGSILINATSSNQQVEKLAPPNLTVRGFDFIDKVKSALESKCPGIVSCADIITLATRDSIVAIA

SEQ ID NO: 73070 - protein, 127 aa, Arabidopsis thaliana
  peptide (1)..(127): Ceres Seq. ID no. 4956561
  misc_feature: Pfam Name: peroxidase Pfam Description: Peroxidase
  misc_feature (1)..(127): Homolog of NCBI NO: 15237128 NR Description: peroxidase, putative; protein id: At4g11290.1 thaliana] >gi|26397917|sp|Q9SUT2|PE39_ARATH Peroxidase 39 (Atperox P39) (ATP19a) >gi|7433054|pir||T13020 peroxidase (EC
  misc_feature (1)..(127): Homolog of NCBI NO: 1546692 NR Description: peroxidase; peroxidase ATP19a [Arabidopsis
  misc_feature (1)..(127): Homolog of NCBI NO: 15220463 NR Description: peroxidase, putative; protein id: At1g05260.1, by cDNA: 114862., supported by cDNA: gi_2738253 [Arabidopsis >gi|25453190|sp|O23044|PER3_ARATH Peroxidase 3 precursor (Atperox
  misc_feature (1)..(127): Homolog of NCBI NO: 21536908 NR Description: putative peroxidase [Arabidopsis thaliana]
MILVIQGLVTFSEAQLKMGFYDQTCPYAEKIVQDVVNQHINNAPSLAAGLIRMHFHDCFVRGCDGSILINATSSNQQVEKLAPPNLTVRGFDFIDKVKSALESKCPGIVSCADIITLATRDSIVAIA

SEQ ID NO: 73071 - DNA, 1282 bp, Arabidopsis thaliana
  misc_feature (1)..(1282): Ceres Seq. ID no. 4956562
  misc_feature: MA Experiment ID: 108434 Result: Up-regulated in Transcription
  misc_feature: MA Experiment 108434 PARAMETER Experiment Name: At_Root_Tips_cDNA_P Parameter: Tissue Value: Root Tips
  misc_feature: MA Experiment ID: 108461 Result: Down-regulated in Transcription
  misc_feature: MA Experiment 108461 PARAMETER Experiment Name: At_Germinating_Seeds_cDNA_P Parameter: Age (day) Value: 1 vs. 0
  misc_feature: MA Experiment 108461 PARAMETER Experiment Name: At_Germinating_Seeds_cDNA_P Parameter: Tissue Value: Germinating Seeds
  misc_feature: MA Experiment ID: 108462 Result: Down-regulated in Transcription
  misc_feature: MA Experiment 108462 PARAMETER Experiment Name: At_Germinating_Seeds_cDNA_P Parameter: Age (day) Value: 2 vs. 0
  misc_feature: MA Experiment 108462 PARAMETER Experiment Name: At_Germinating_Seeds_cDNA_P Parameter: Tissue Value: Germinating Seeds
  misc_feature: MA Experiment ID: 108463 Result: Down-regulated in Transcription
  misc_feature: MA Experiment 108463 PARAMETER Experiment Name: At_Germinating_Seeds_cDNA_P Parameter: Age (day) Value: 3 vs. 0
  misc_feature: MA Experiment 108463 PARAMETER Experiment Name: At_Germinating_Seeds_cDNA_P Parameter: Tissue Value: Germinating Seeds
  misc_feature: MA Experiment ID: 108464 Result: Down-regulated in Transcription
  misc_feature: MA Experiment 108464 PARAMETER Experiment Name: At_Germinating_Seeds_cDNA_P Parameter: Age (day) Value: 4 vs. 0
  misc_feature: MA Experiment 108464 PARAMETER Experiment Name: At_Germinating_Seeds_cDNA_P Parameter: Tissue Value: Germinating Seeds
  misc_feature: MA Experiment ID: 108488 Result: Up-regulated in Transcription
  misc_feature: MA Experiment ID: 20000113 Result: Up-regulated in Transcription
  misc_feature: MA Experiment 20000113 PARAMETER Experiment Name: At_42deg_Heat_cDNA_P Parameter: Temperature (deg C) Value: 42 vs. 22
  misc_feature: MA Experiment 20000113 PARAMETER Experiment Name: At_42deg_Heat_cDNA_P Parameter: Timepoint (hr) Value: 8
  misc_feature: MA Experiment 20000113 PARAMETER Experiment Name: At_42deg_Heat_cDNA_P Parameter: Tissue Value: Aerial
  misc_feature: MA Experiment ID: 20000234 Result: Down-regulated in Transcription
  misc_feature: MA Experiment 20000234 PARAMETER Experiment Name: At_Siliques_P Parameter: Age (day) Value: 21
  misc_feature: MA Experiment 20000234 PARAMETER Experiment Name: At_Siliques_P Parameter: Organism Value: A. thaliana
  misc_feature: MA Experiment 20000234 PARAMETER Experiment Name: At_Siliques_P Parameter: Plant Line Value: WS
  misc_feature: MA Experiment 20000234 PARAMETER Experiment Name: At_Siliques_P Parameter: Tissue Value: Less Than 5mm Siliques vs. Whole Plant
  misc_feature: MA Experiment ID: 20000264 Result: Down-regulated in Transcription
  misc_feature: MA Experiment 20000264 PARAMETER Experiment Name: At_Open_Flower_P Parameter: Age (day) Value: 21
  misc_feature: MA Experiment 20000264 PARAMETER Experiment Name: At_Open_Flower_P Parameter: Plant Line Value: WS
  misc_feature: MA Experiment 20000264 PARAMETER Experiment Name: At_Open_Flower_P Parameter: Tissue Value: Open Flower vs. Whole Plant
  misc_feature: MA Experiment ID: 20000265 Result: Down-regulated in Transcription
  misc_feature: MA Experiment 20000265 PARAMETER Experiment Name: At_Open_Flower_P Parameter: Age (day) Value: 21
  misc_feature: MA Experiment 20000265 PARAMETER Experiment Name: At_Open_Flower_P Parameter: Plant Line Value: WS
  misc_feature: MA Experiment 20000265 PARAMETER Experiment Name: At_Open_Flower_P Parameter: Tissue Value: Closed Flower vs. Whole Plant
  misc_feature: MA Experiment ID: 20000794 Result: Down-regulated in Transcription
  misc_feature: MA Experiment 20000794 PARAMETER Experiment Name: At_Petals_P Parameter: Age (day) Value: 23-25 days
  misc_feature: MA Experiment 20000794 PARAMETER Experiment Name: At_Petals_P Parameter: Plant Line Value: WS
  misc_feature: MA Experiment 20000794 PARAMETER Experiment Name: At_Petals_P Parameter: Tissue Value: Petals vs. Whole plant
  misc_feature: MA Experiment ID: 20001451 Result: Up-regulated in Transcription
  misc_feature: MA Experiment 20001451 PARAMETER Experiment Name: At_Far-red-induction_P Parameter: Age (day) Value: 7
  misc_feature: MA Experiment 20001451 PARAMETER Experiment Name: At_Far-red-induction_P Parameter: Light Value: Far-red vs. White
  misc_feature: MA Experiment 20001451 PARAMETER Experiment Name: At_Far-red-induction_P Parameter: Organism Value: A. thaliana
  misc_feature: MA Experiment 20001451 PARAMETER Experiment Name: At_Far-red-induction_P Parameter: Plant Line Value: Columbia
  misc_feature: MA Experiment 20001451 PARAMETER Experiment Name: At_Far-red-induction_P Parameter: Timepoint (hr) Value: 24
  misc_feature: MA Experiment 20001451 PARAMETER Experiment Name: At_Far-red-induction_P Parameter: Tissue Value: Whole Plant
aacgatacgaacccagagacgtcggcggttaaaacaatcgtcggatctctctggattcgttagacgagaagtttccggtatctaatttctgtgcgttagagagaaattagggttgttgctacgatggatgagactttacttgacgatataatacgacggcttttggcgacgaataatggaaggacggtgaagcaagcacagattactgagacggagatacgtcagctatgtttagcttcaaaagaggtttttctcagtcagcctaatctcctcgagctcgaggctcctatcaagatttgcggagatgttcatggtcagtttccagacctcttgcggttgtttgagtatggtggttatccaccagctgcgaactacttgtttcttggggattatgttgatcgtggtaagcagagcatagagacgatatgccttcttcttgcctataaggtcaaatacaagttcaacttctttcttctcagaggcaatcacgaatgtgcttcaatcaaccgtgtatatggattctacgatgaatgcaaaagaagatataatgttcgcttatggaaaacattcaccgagtgcttcaactgtctgcctgtttctgctctcattgatgataagatcctctgcatgcatggtggactatcgcctgatattaagagcttagatgacatcaggagaattcctcgtcctattgacgttcctgatcagggcattctttgtgatttgttgtgggctgatcctgacagagagattcaaggctggggggagaatgacagaggtgtctcttatacatttggggctgacaaagtagctgagttccttcaaactcatgaccttgatcttatatgccgagctcatcaggttgtagaagatggatacgagttctttgcaaagagacaactagtgacaatattctctgcacccaattactgtggcgagtttgacaatgctggtgcattgatgagtgttgatgatagcttaacatgttcattccaaatccttaaggcatctgagaagaaaggaagatttggattcaacaacaatgttcctagaccaggaaccccacctcataagggtggaaaaggtcgttaactcgtcgtcgatgggttcaagaaacgagtgaaaccgacgggttcgaattttgtaaggcaaacagtttgttttgttagattgttatctgttttcttatggttgaggcaacattatgttttgtttagattttttttgtaaaaattgtggaagatgttcacagcattttcaactgaagaaagttgggttttat

SEQ ID NO: 73072 - protein, 322 aa, Arabidopsis thaliana; identical to SEQ ID NO: 34859
  peptide (1)..(322): Ceres Seq. ID no. 4956563
  misc_feature (54)..(249): Pfam Name: Calcineurin-like phosphoesterase Pfam Description: Calcineurin-like phosphoesterase
  misc_feature (1)..(322): Homolog of NCBI NO: 18413493 NR Description: protein phosphatase type 1 (AtPP1bg); protein id: supported by cDNA: 20905., supported by cDNA: gi_19699315 thaliana] >gi|19699316|gb|AAL91268.1| AT4g11240/F8L21_30
  misc_feature (1)..(322): Homolog of NCBI NO: 1346760 NR Description: Serine/threonine protein phosphatase PP1 isozyme >gi|829255|emb|CAA86339.1| protein phosphatase type 1 thaliana] >gi|3153203|gb|AAC39460.1| serine/threonine protein
  misc_feature (1)..(317): Homolog of NCBI NO: 7435131 NR Description: phosphoprotein phosphatase (EC 3.1.3.16) PP1BG - thaliana >gi|5596470|emb|CAB51408.1| protein phosphatase type 1 [Arabidopsis thaliana] >gi|7267823|emb|CAB81225.1| protein
  misc_feature (1)..(320): Homolog of NCBI NO: 1346763 NR Description: SERINE/THREONINE PROTEIN PHOSPHATASE PP1
  misc_feature (1)..(321): Homolog of NCBI NO: 15222607 NR Description: phosphoprotein phosphatase-type 1 catalytic protein id: At1g64040.1, supported by cDNA: gi_166798, supported cDNA: gi_19698982 [Arabidopsis thaliana]
  misc_feature (1)..(317): Homolog of NCBI NO: 25752372 NR Description: phosphoprotein phosphatase (EC 3.1.3.16) 1
  misc_feature (1)..(302): Homolog of NCBI NO: 1346750 NR Description: SERINE/THREONINE PROTEIN PHOSPHATASE PP1 ISOZYME >gi|2654372|emb|CAA82263.1| protein phosphatase 1 [Acetabularia
  misc_feature (1)..(314): Homolog of NCBI NO: 1346753 NR Description: SERINE/THREONINE PROTEIN PHOSPHATASE PP1 ISOZYME >gi|2654373|emb|CAA82264.1| protein phosphatase 1 [Acetabularia
  misc_feature (1)..(302): Homolog of NCBI NO: 11133833 NR Description: Serine/threonine protein phosphatase PP1 isozyme 2
  misc_feature (1)..(322): Homolog of NCBI NO: 28277696 NR Description: Unknown (protein for MGC:55744) [Danio rerio]

SEQ ID NO: 73073 - DNA, 1170 bp, Arabidopsis thaliana
  misc_feature (1)..(1170): Ceres Seq. ID no. 4957067
  misc_feature: MA Experiment ID: 108435 Result: Down-regulated in Transcription
  misc_feature: MA Experiment 108435 PARAMETER Experiment Name: At_stm_Mutants_cDNA_P Parameter: Plant Line Value: wt Landsburg vs stm
  misc_feature: MA Experiment 108435 PARAMETER Experiment Name: At_stm_Mutants_cDNA_P Parameter: Tissue Value: Shoot Apical Meristem Region
  misc_feature: MA Experiment ID: 108489 Result: Down-regulated in Transcription
  misc_feature: MA Experiment ID: 108501 Result: Down-regulated in Transcription
  misc_feature: MA Experiment 108501 PARAMETER Experiment Name: At_ap2_floral_buds_cDNA_P Parameter: Plant Line Value: ap2 (Ler.)
  misc_feature: MA Experiment 108501 PARAMETER Experiment Name: At_ap2_floral_buds_cDNA_P Parameter: Tissue Value: Closed Flower
  misc_feature: MA Experiment ID: 108577 Result: Down-regulated in Transcription
  misc_feature: MA Experiment 108577 PARAMETER Experiment Name: At_42deg_Heat_cDNA_P Parameter: Temperature (deg C) Value: 42 vs. 22
  misc_feature: MA Experiment 108577 PARAMETER Experiment Name: At_42deg_Heat_cDNA_P Parameter: Timepoint (hr) Value: 6
  misc_feature: MA Experiment 108577 PARAMETER Experiment Name: At_42deg_Heat_cDNA_P Parameter: Tissue Value: Aerial
  misc_feature: MA Experiment ID: 108594 Result: Up-regulated in Transcription
  misc_feature: MA Experiment 108594 PARAMETER Experiment Name: At_Ler-rhl_Root_cDNA_P Parameter: Plant Line Value: null
  misc_feature: MA Experiment ID: 108595 Result: Down-regulated in Transcription
  misc_feature: MA Experiment 108595 PARAMETER Experiment Name: At_Ler-pi_Ovule_cDNA_P Parameter: Plant Line Value: null
  misc_feature: MA Experiment ID: 20000087 Result: Down-regulated in Transcription
  misc_feature: MA Experiment 20000087 PARAMETER Experiment Name: At_100uM_ABA_Mutants_cDNA_P Parameter: Plant Line Value: WS
  misc_feature: MA Experiment 20000087 PARAMETER Experiment Name: At_100uM_ABA_Mutants_cDNA_P Parameter: Timepoint (hr) Value: 6
  misc_feature: MA Experiment 20000087 PARAMETER Experiment Name: At_100uM_ABA_Mutants_cDNA_P Parameter: Tissue Value: Aerial
  misc_feature: MA Experiment 20000087 PARAMETER Experiment Name: At_100uM_ABA_Mutants_cDNA_P Parameter: Treatment Value: 100uM ABA vs. No Treatment
  misc_feature: MA Experiment ID: 20000111 Result: Down-regulated in Transcription
  misc_feature: MA Experiment 20000111 PARAMETER Experiment Name: At_42deg_Heat_cDNA_P Parameter: Temperature (deg C) Value: 42 vs. 22
  misc_feature: MA Experiment 20000111 PARAMETER Experiment Name: At_42deg_Heat_cDNA_P Parameter: Timepoint (hr) Value: 6
  misc_feature: MA Experiment 20000111 PARAMETER Experiment Name: At_42deg_Heat_cDNA_P Parameter: Tissue Value: Aerial
  misc_feature: MA Experiment ID: 20000113 Result: Down-regulated in Transcription
  misc_feature: MA Experiment 20000113 PARAMETER Experiment Name: At_42deg_Heat_cDNA_P Parameter: Temperature (deg C) Value: 42 vs. 22
  misc_feature: MA Experiment 20000113 PARAMETER Experiment Name: At_42deg_Heat_cDNA_P Parameter: Timepoint (hr) Value: 8
  misc_feature: MA Experiment 20000113 PARAMETER Experiment Name: At_42deg_Heat_cDNA_P Parameter: Tissue Value: Aerial
  misc_feature: MA Experiment ID: 20000173 Result: Down-regulated in Transcription
  misc_feature: MA Experiment 20000173 PARAMETER Experiment Name: At_42deg_Heat_P Parameter: Age (day) Value: 14
  misc_feature: MA Experiment 20000173 PARAMETER Experiment Name: At_42deg_Heat_P Parameter: Organism Value: A. thaliana
  misc_feature: MA Experiment 20000173 PARAMETER Experiment Name: At_42deg_Heat_P Parameter: Plant Line Value: WS
  misc_feature: MA Experiment 20000173 PARAMETER Experiment Name: At_42deg_Heat_P Parameter: Temperature (deg C) Value: 42 vs. 22
  misc_feature: MA Experiment 20000173 PARAMETER Experiment Name: At_42deg_Heat_P Parameter: Timepoint (hr) Value: 6
  misc_feature: MA Experiment 20000173 PARAMETER Experiment Name: At_42deg_Heat_P Parameter: Tissue Value: Aerial
  misc_feature: MA Experiment ID: 20000185 Result: Down-regulated in Transcription
  misc_feature: MA Experiment 20000185 PARAMETER Experiment Name: At_Roots__P Parameter: Age (day) Value: 7 vs. 21
  misc_feature: MA Experiment 20000185 PARAMETER Experiment Name: At_Roots__P Parameter: Organism Value: A. thaliana
  misc_feature: MA Experiment 20000185 PARAMETER Experiment Name: At_Roots__P Parameter: Tissue Value: Roots vs. Whole Plant
  misc_feature: MA Experiment ID: 20000437 Result: Down-regulated in Transcription
  misc_feature: MA Experiment 20000437 PARAMETER Experiment Name: At_Drought_P Parameter: Age (day) Value: 8
  misc_feature: MA Experiment 20000437 PARAMETER Experiment Name: At_Drought_P Parameter: Organism Value: A. thaliana
  misc_feature: MA Experiment 20000437 PARAMETER Experiment Name: At_Drought_P Parameter: Plant Line Value: WS
  misc_feature: MA Experiment 20000437 PARAMETER Experiment Name: At_Drought_P Parameter: Timepoint (hr) Value: 24
  misc_feature: MA Experiment 20000437 PARAMETER Experiment Name: At_Drought_P Parameter: Tissue Value: Whole Plant
  misc_feature: MA Experiment 20000437 PARAMETER Experiment Name: At_Drought_P Parameter: Treatment Value: Drought vs. No Drought
  misc_feature: MA Experiment ID: 20000439 Result: Down-regulated in Transcription
  misc_feature: MA Experiment 20000439 PARAMETER Experiment Name: At_Roots__P Parameter: Age (day) Value: 14 vs. 21
  misc_feature: MA Experiment 20000439 PARAMETER Experiment Name: At_Roots__P Parameter: Organism Value: A. thaliana
  misc_feature: MA Experiment 20000439 PARAMETER Experiment Name: At_Roots__P Parameter: Tissue Value: Roots vs. Whole Plant
  misc_feature: MA Experiment ID: 20001555 Result: Down-regulated in Transcription
  misc_feature: MA Experiment 20001555 PARAMETER Experiment Name: At_Drought_Soil_Dry_P Parameter: Age (day) Value: 24
  misc_feature: MA Experiment 20001555 PARAMETER Experiment Name: At_Drought_Soil_Dry_P Parameter: Organism Value: A. thaliana
  misc_feature: MA Experiment 20001555 PARAMETER Experiment Name: At_Drought_Soil_Dry_P Parameter: Plant Line Value: WS
  misc_feature: MA Experiment 20001555 PARAMETER Experiment Name: At_Drought_Soil_Dry_P Parameter: Post Timepoint (hr) Value: None
  misc_feature: MA Experiment 20001555 PARAMETER Experiment Name: At_Drought_Soil_Dry_P Parameter: Post-Treatment Value: None
  misc_feature: MA Experiment 20001555 PARAMETER Experiment Name: At_Drought_Soil_Dry_P Parameter: Timepoint (day) Value: 10
  misc_feature: MA Experiment 20001555 PARAMETER Experiment Name: At_Drought_Soil_Dry_P Parameter: Treatment Value: Drought vs. No Drought
  misc_feature: MA Experiment ID: 20001557 Result: Down-regulated in Transcription
  misc_feature: MA Experiment 20001557 PARAMETER Experiment Name: At_Drought_Soil_Dry_P Parameter: Age (day) Value: 27
  misc_feature: MA Experiment 20001557 PARAMETER Experiment Name: At_Drought_Soil_Dry_P Parameter: Organism Value: A. thaliana
  misc_feature: MA Experiment 20001557 PARAMETER Experiment Name: At_Drought_Soil_Dry_P Parameter: Plant Line Value: WS
  misc_feature: MA Experiment 20001557 PARAMETER Experiment Name: At_Drought_Soil_Dry_P Parameter: Post Timepoint (hr) Value: 3
  misc_feature: MA Experiment 20001557 PARAMETER Experiment Name: At_Drought_Soil_Dry_P Parameter: Post-Treatment Value: Re-Water vs. No Drought
  misc_feature: MA Experiment 20001557 PARAMETER Experiment Name: At_Drought_Soil_Dry_P Parameter: Timepoint (day) Value: 13
  misc_feature: MA Experiment 20001557 PARAMETER Experiment Name: At_Drought_Soil_Dry_P Parameter: Treatment Value: Drought vs. No Drought
  misc_feature: MA Experiment ID: 20001904 Result: Down-regulated in Transcription
  misc_feature: MA Experiment 20001904 PARAMETER Experiment Name: At_Drought_Reproduction_P Parameter: Age (day) Value: 37
  misc_feature: MA Experiment 20001904 PARAMETER Experiment Name: At_Drought_Reproduction_P Parameter: Organism Value: A. thaliana
  misc_feature: MA Experiment 20001904 PARAMETER Experiment Name: At_Drought_Reproduction_P Parameter: Plant Line Value: WS
  misc_feature: MA Experiment 20001904 PARAMETER Experiment Name: At_Drought_Reproduction_P Parameter: Timepoint (day) Value: 7
  misc_feature: MA Experiment 20001904 PARAMETER Experiment Name: At_Drought_Reproduction_P Parameter: Tissue Value: Rosettes
  misc_feature: MA Experiment 20001904 PARAMETER Experiment Name: At_Drought_Reproduction_P Parameter: Treatment Value: Drought vs. No Drought
  misc_feature: MA Experiment ID: 20001905 Result: Down-regulated in Transcription
  misc_feature: MA Experiment 20001905 PARAMETER Experiment Name: At_Drought_Reproduction_P Parameter: Age (day) Value: 40
  misc_feature: MA Experiment 20001905 PARAMETER Experiment Name: At_Drought_Reproduction_P Parameter: Organism Value: A. thaliana
  misc_feature: MA Experiment 20001905 PARAMETER Experiment Name: At_Drought_Reproduction_P Parameter: Plant Line Value: WS
  misc_feature: MA Experiment 20001905 PARAMETER Experiment Name: At_Drought_Reproduction_P Parameter: Timepoint (day) Value: 10
  misc_feature: MA Experiment 20001905 PARAMETER Experiment Name: At_Drought_Reproduction_P Parameter: Tissue Value: Rosettes
  misc_feature: MA Experiment 20001905 PARAMETER Experiment Name: At_Drought_Reproduction_P Parameter: Treatment Value: Drought vs. No Drought
aaacgcatttggtaggctgagagaaagaaagaaaaagataaagatggatcacgcagcagatgctcaccgtacggatttgatgaccattacaagattcgtgttgaatgaacaatcaaagtatccagaatctcgtggtgatttcaccattttgcttagtcacatcgttttgggttgcaaattcgtttgcagtgctgttaataaggctggtttggctaagttaattggacttgcaggggaaacaaacattcagggtgaagagcaaaagaaacttgatgtgctctctaatgatgtctttgtcaacgctttggttagcagtggtagaacttctgttcttgtctcggaggaagatgaggaagctacgtttgtggagccatccaagcgtggaaagtactgtgttgtttttgatccgcttgatggatcttcaaacattgactgtggtgtttccattggcacaatgttctgaaacctgggaatgaaatggtggctgcaggttattgtatgtacggaagctcctgcatgcttgtgttgagcactggaaccggtgtccacggatttacactggacccatctctaggagagttcattctaactcacccggacattaagattccaaataagggaaacatttattcggtgaatgaaggcaatgcgcagaactgggatggtccaactacaaagtatgtagagaaatgcaagtttcctaaagatggttctcctgcaaagtctctgagatacgtaggaagtatggtagctgatgttcatcgtacactactttatggaggaatcttcttgtacccggctgacaagaaaagccccaatggaaaattgcgtgtcttgtatgaagttttcccgatgtcgtttttgatggagcaagccggaggtcaggcctttacgggaaagaaaagggcgctagaccttgtcccggagaagatccatgagcgttctccgatatttcttggtagctacgatgatgtagaagagattaaagctctctatgctgaggaggaaaagaagaactaagcttctcattcttcttttattctcttactgtctctgtctctcttatttctatatacagtatcttcttctgatgagaagaacaatataactcatttacaaaaggaagatctttctttatcattaaatgcacataaaaatcttctttctttc

SEQ ID NO: 73074 - protein, 180 aa, Arabidopsis thaliana
  peptide (1)..(180): Ceres Seq. ID no. 4957068
  misc_feature (1)..(176): Pfam Name: Fructose-1-6-bisphosphatase Pfam Description: Fructose-1-6-bisphosphatase
  misc_feature (1)..(180): Homolog of NCBI NO: 15218438 NR Description: fructose 1,6-bisphosphatase, putative; protein At1g43670.1 [Arabidopsis thaliana] >gi|25288990|pir||H96499
  misc_feature (1)..(178): Homolog of NCBI NO: 1169585 NR Description: FRUCTOSE-1,6-BISPHOSPHATASE, CYTOSOLIC
  misc_feature (1)..(178): Homolog of NCBI NO: 119748 NR Description: FRUCTOSE-1,6-BISPHOSPHATASE, CYTOSOLIC
  misc_feature (1)..(178): Homolog of NCBI NO: 11139718 NR Description: cytosolic fructose-1,6-bisphosphatase [Beta
  misc_feature (1)..(178): Homolog of NCBI NO: 20278691 NR Description: cytoplasmic fructose-1,6-bisphosphatase [Pisum
  misc_feature (1)..(177): Homolog of NCBI NO: 4741918 NR Description: cytosolic fructose-1,6-bisphosphatase [Musa
  misc_feature (1)..(178): Homolog of NCBI NO: 1169586 NR Description: FRUCTOSE-1,6-BISPHOSPHATASE, CYTOSOLIC
  misc_feature (1)..(178): Homolog of NCBI NO: 5305145 NR Description: fructose-1,6-bisphosphatase [Pisum sativum]
  misc_feature (1)..(178): Homolog of NCBI NO: 3913640 NR Description: FRUCTOSE-1,6-BISPHOSPHATASE, CYTOSOLIC
  misc_feature (1)..(178): Homolog of NCBI NO: 6684169 NR Description: fructose-1,6-bisphosphatase [Porteresia coarctata]
MVAAGYCMYGSSCMLVLSTGTGVHGFTLDPSLGEFILTHPDIKIPNKGNIYSVNEGNAQNWDGPTTKYVEKCKFPKDGSPAKSLRYVGSMVADVHRTLLYGGIFLYPADKKSPNGKLRVLYEVFPMSFLMEQAGGQAFTGKKRALDLVPEKIHERSPIFLGSYDDVEEIKALYAEEEKKN

SEQ ID NO: 73075 - protein, 173 aa, Arabidopsis thaliana
  peptide (1)..(173): Ceres Seq. ID no. 4957069
  misc_feature (1)..(169): Pfam Name: Fructose-1-6-bisphosphatase Pfam Description: Fructose-1-6-bisphosphatase
  misc_feature (1)..(173): Homolog of NCBI NO: 15218438 NR Description: fructose 1,6-bisphosphatase, putative; protein At1g43670.1 [Arabidopsis thaliana] >gi|25288990|pir||H96499
  misc_feature (1)..(171): Homolog of NCBI NO: 1169585 NR Description: FRUCTOSE-1,6-BISPHOSPHATASE, CYTOSOLIC
  misc_feature (1)..(171): Homolog of NCBI NO: 119748 NR Description: FRUCTOSE-1,6-BISPHOSPHATASE, CYTOSOLIC
  misc_feature (1)..(171): Homolog of NCBI NO: 11139718 NR Description: cytosolic fructose-1,6-bisphosphatase [Beta
  misc_feature (1)..(171): Homolog of NCBI NO: 20278691 NR Description: cytoplasmic fructose-1,6-bisphosphatase [Pisum
  misc_feature (1)..(170): Homolog of NCBI NO: 4741918 NR Description: cytosolic fructose-1,6-bisphosphatase [Musa
  misc_feature (1)..(171): Homolog of NCBI NO: 1169586 NR Description: FRUCTOSE-1,6-BISPHOSPHATASE, CYTOSOLIC
  misc_feature (1)..(171): Homolog of NCBI NO: 5305145 NR Description: fructose-1,6-bisphosphatase [Pisum sativum]
  misc_feature (1)..(171): Homolog of NCBI NO: 3913640 NR Description: FRUCTOSE-1,6-BISPHOSPHATASE, CYTOSOLIC
  misc_feature (1)..(171): Homolog of NCBI NO: 6684169 NR Description: fructose-1,6-bisphosphatase [Porteresia coarctata]
MYGSSCMLVLSTGTGVHGFTLDPSLGEFILTHPDIKIPNKGNIYSVNEGNAQNWDGPTTKYVEKCKFPKDGSPAKSLRYVGSMVADVHRTLLYGGIFLYPADKKSPNGKLRVLYEVFPMSFLMEQAGGQAFTGKKRALDLVPEKIHERSPIFLGSYDDVEEIKALYAEEEKKN

SEQ ID NO: 73076 - protein, 167 aa, Arabidopsis thaliana
  peptide (1)..(167): Ceres Seq. ID no. 4957070
  misc_feature (1)..(163): Pfam Name: Fructose-1-6-bisphosphatase Pfam Description: Fructose-1-6-bisphosphatase
  misc_feature (1)..(167): Homolog of NCBI NO: 15218438 NR Description: fructose 1,6-bisphosphatase, putative; protein At1g43670.1 [Arabidopsis thaliana] >gi|25288990|pir||H96499
  misc_feature (1)..(165): Homolog of NCBI NO: 1169585 NR Description: FRUCTOSE-1,6-BISPHOSPHATASE, CYTOSOLIC
  misc_feature (1)..(165): Homolog of NCBI NO: 119748 NR Description: FRUCTOSE-1,6-BISPHOSPHATASE, CYTOSOLIC
  misc_feature (1)..(165): Homolog of NCBI NO: 11139718 NR Description: cytosolic fructose-1,6-bisphosphatase [Beta
  misc_feature (1)..(165): Homolog of NCBI NO: 20278691 NR Description: cytoplasmic fructose-1,6-bisphosphatase [Pisum
  misc_feature (1)..(164): Homolog of NCBI NO: 4741918 NR Description: cytosolic fructose-1,6-bisphosphatase [Musa
  misc_feature (1)..(165): Homolog of NCBI NO: 1169586 NR Description: FRUCTOSE-1,6-BISPHOSPHATASE, CYTOSOLIC
  misc_feature (1)..(165): Homolog of NCBI NO: 5305145 NR Description: fructose-1,6-bisphosphatase [Pisum sativum]
  misc_feature (1)..(165): Homolog of NCBI NO: 3913640 NR Description: FRUCTOSE-1,6-BISPHOSPHATASE, CYTOSOLIC
  misc_feature (1)..(165): Homolog of NCBI NO: 6684169 NR Description: fructose-1,6-bisphosphatase [Porteresia coarctata]
MLVLSTGTGVHGFTLDPSLGEFILTHPDIKIPNKGNIYSVNEGNAQNWDGPTTKYVEKCKFPKDGSPAKSLRYVGSMVADVHRTLLYGGIFLYPADKKSPNGKLRVLYEVFPMSFLMEQAGGQAFTGKKRALDLVPEKIHERSPIFLGSYDDVEEIKALYAEEEKKN

SEQ ID NO: 73077 - DNA, 1902 bp, Arabidopsis thaliana
  misc_feature (1)..(1902): Ceres Seq. ID no. 4957173
  misc_feature: MA Experiment ID: 20000184 Result: Up-regulated in Transcription
  misc_feature: MA Experiment 20000184 PARAMETER Experiment Name: At_Shoots__P Parameter: Age (day) Value: 7
  misc_feature: MA Experiment 20000184 PARAMETER Experiment Name: At_Shoots__P Parameter: Tissue Value: Shoots vs. Whole Plant
atgttccaactgctccgacgagctcatggactttgcatgccgtcctctctctacttctcgcgtctcgtaaaccgctctttactctcaaagtctccaactttagccaaaatcgtccatgcccagctcctggaagctggattcgtacgcactacttattggggaaatcgctgccttcagctctacttcaaatccggatccgtcatcaatgccctccaactgttcgacgatattcctgataagaacaccataacctggaacgtttgcttaaagggtttgtttaaaaatggttatctcaataacgcacttgacctgttcgacgaaatgcctgaacgagatgttgttagctggaatacaatgatttcagggttggtttcttgtgggtttcatgaatatgggattagggttttcttcgatatgcagagatgggagattagaccaacggagtttactttttcgattctagcttctcttgttacttgtgttcgacatggggaacagattcatggtaatgctatttgtagtggtgtgagtaggtataatttggttgtgtggaactctgttatggatatgtatagaagattaggagtttttgattacgcgttatcggtgtttttaactatggaggatagagatgttgtctcgtggaactgtttgattttgtcttgttccgattctggtaataaggaagtggctttggatcagttttggttgatgagagaaatggagattcaacctgatgaatatacagtttcgatggttgtgtctatttgctctgatttacgagaactgagtaagggtaagcaggctcttgctctttgtatcaagatggggtttttatctaacagtattgttttaggagctgggattgatatgttttccaaatgtaacagattggatgattcggttaaactttttagagagttggagaaatgggattcagtgttgtgcaattccatgatcggtagctattcgtggcattgttgtggagaagatgctcttcggctctttatccttgccatgacgcagagtgttaggcctgataagttcacgttcagtagcgttctgagctcaatgaatgctgtgatgctagatcacggagcagacgttcattctttggttattaagttagggtttgatttggatacggcagtagctacctcactcatggagatgtacttcaaaaccggttcagttgatttagcaatgggagtgtttgccaaaacagatggaaaagatttgatcttttggaacacagtgataatgggcttggcgagaaacagtagagcagttgagtcccttgccattttcaatcaattgctgatgaaccaaagtctgaaacccgatagagtgacgttaatgggtatcttagtagcttgttgttatgctggctttgttaatgaaggaattcagatattctcttcaatggaaaaggctcatggagttaatcccgggaacgagcattacgcctgtataatcgaattgctttgcagagtcggtatgatcaatgaagcaaaggacattgctgacaagataccttttgaaccaagctctcatatctgggaaccgattctctgtgcatctcttgatcttggagacacaagactcgctgagactgtagcgaaaactatgttagaatctgaaccaaagtcatcttttccttacctggttctgattaagatatacgagatgacatggcgctgggaaaattcagtgaagttaagatacgccatgaatgaacataagttgaaatcggctcaaggatcgagcaagatcagtatagagagcagtgtgttcagcttcgaggctgaccagttgcaaattcatggaggtcatgatacttgcgcactcttggacttattgtcttgggattcttttgatcagaaaattcattggtctgcataa

SEQ ID NO: 73078 - protein, 633 aa, Arabidopsis thaliana
  peptide (1)..(633): Ceres Seq. ID no. 4957174
  misc_feature (114)..(148): Pfam Name: PPR repeat Pfam Description: PPR repeat
  misc_feature (19)..(604): Homolog of NCBI NO: 15237442 NR Description: putative protein; protein id: At5g46460.1 thaliana] >gi|10177583|dbj|BAB10814.1|
  misc_feature (89)..(600): Homolog of NCBI NO: 15226150 NR Description: hypothetical protein; protein id: At2g33680.1
  misc_feature (1)..(106): Homolog of NCBI NO: 15226150 NR Description: hypothetical protein; protein id: At2g33680.1
  misc_feature (101)..(604): Homolog of NCBI NO: 15232500 NR Description: hypothetical protein; protein id: At3g15130.1
  misc_feature (103)..(591): Homolog of NCBI NO: 15221304 NR Description: hypothetical protein; protein id: At1g74600.1
  misc_feature (9)..(127): Homolog of NCBI NO: 15221304 NR Description: hypothetical protein; protein id: At1g74600.1
  misc_feature (74)..(604): Homolog of NCBI NO: 11994503 NR Description: emb|CAB36829.1~gene_id:F4B12.5~strong similarity
  misc_feature (16)..(602): Homolog of NCBI NO: 15234006 NR Description: putative protein; protein id: At4g18750.1
  misc_feature (65)..(603): Homolog of NCBI NO: 27260973 NR Description: OJ1705_C03.3 [Oryza sativa (japonica
  misc_feature (98)..(600): Homolog of NCBI NO: 15236324 NR Description: putative protein; protein id: At4g13650.1
MFQLLRRAHGLCMPSSLYFSRLVNRSLLSKSPTLAKIVHAQLLEAGFVRTTYWGNRCLQLYFKSGSVINALQLFDDIPDKNTITWNVCLKGLFKNGYLNNALDLFDEMPERDVVSWNTMISGLVSCGFHEYGIRVFFDMQRWEIRPTEFTFSILASLVTCVRHGEQIHGNAICSGVSRYNLVVWNSVMDMYRRLGVFDYALSVFLTMEDRDVVSWNCLILSCSDSGNKEVALDQFWLMREMEIQPDEYTVSMVVSICSDLRELSKGKQALALCIKMGFLSNSIVLGAGIDMFSKCNRLDDSVKLFRELEKWDSVLCNSMIGSYSWHCCGEDALRLFILAMTQSVRPDKFTFSSVLSSMNAVMLDHGADVHSLVIKLGFDLDTAVATSLMEMYFKTGSVDLAMGVFAKTDGKDLIFWNTVIMGLARNSRAVESLAIFNQLLMNQSLKPDRVTLMGILVACCYAGFVNEGIQIFSSMEKAHGVNPGNEHYACIIELLCRVGMINEAKDIADKIPFEPSSHIWEPILCASLDLGDTRLAETVAKTMLESEPKSSFPYLVLIKIYEMTWRWENSVKLRYAMNEHKLKSAQGSSKISIESSVFSFEADQLQIHGGHDTCALLDLLSWDSFDQKIHWSA

SEQ ID NO: 73079 - protein, 621 aa, Arabidopsis thaliana
  peptide (1)..(621): Ceres Seq. ID no. 4957175
  misc_feature (102)..(136): Pfam Name: PPR repeat Pfam Description: PPR repeat
  misc_feature (7)..(592): Homolog of NCBI NO: 15237442 NR Description: putative protein; protein id: At5g46460.1 thaliana] >gi|10177583|dbj|BAB10814.1|
  misc_feature (77)..(588): Homolog of NCBI NO: 15226150 NR Description: hypothetical protein; protein id: At2g33680.1
  misc_feature (1)..(94): Homolog of NCBI NO: 15226150 NR Description: hypothetical protein; protein id: At2g33680.1
  misc_feature (89)..(592): Homolog of NCBI NO: 15232500 NR Description: hypothetical protein; protein id: At3g15130.1
  misc_feature (91)..(579): Homolog of NCBI NO: 15221304 NR Description: hypothetical protein; protein id: At1g74600.1
  misc_feature (1)..(115): Homolog of NCBI NO: 15221304 NR Description: hypothetical protein; protein id: At1g74600.1
  misc_feature (62)..(592): Homolog of NCBI NO: 11994503 NR Description: emb|CAB36829.1~gene_id:F4B12.5~strong similarity
  misc_feature (4)..(590): Homolog of NCBI NO: 15234006 NR Description: putative protein; protein id: At4g18750.1
  misc_feature (53)..(591): Homolog of NCBI NO: 27260973 NR Description: OJ1705_C03.3 [Oryza sativa (japonica
  misc_feature (86)..(588): Homolog of NCBI NO: 15236324 NR Description: putative protein; protein id: At4g13650.1
MPSSLYFSRLVNRSLLSKSPTLAKIVHAQLLEAGFVRTTYWGNRCLQLYFKSGSVINALQLFDDIPDKNTITWNVCLKGLFKNGYLNNALDLFDEMPERDVVSWNTMISGLVSCGFHEYGIRVFFDMQRWEIRPTEFTFSILASLVTCVRHGEQIHGNAICSGVSRYNLVVWNSVMDMYRRLGVFDYALSVFLTMEDRDVVSWNCLILSCSDSGNKEVALDQFWLMREMEIQPDEYTVSMVVSICSDLRELSKGKQALALCIKMGFLSNSIVLGAGIDMFSKCNRLDDSVKLFRELEKWDSVLCNSMIGSYSWHCCGEDALRLFILAMTQSVRPDKFTFSSVLSSMNAVMLDHGADVHSLVIKLGFDLDTAVATSLMEMYFKTGSVDLAMGVFAKTDGKDLIFWNTVIMGLARNSRAVESLAIFNQLLMNQSLKPDRVTLMGILVACCYAGFVNEGIQIFSSMEKAHGVNPGNEHYACIIELLCRVGMINEAKDIADKIPFEPSSHIWEPILCASLDLGDTRLAETVAKTMLESEPKSSFPYLVLIKIYEMTWRWENSVKLRYAMNEHKLKSAQGSSKISIESSVFSFEADQLQIHGGHDTCALLDLLSWDSFDQKIHWSA

SEQ ID NO: 73080 - protein, 526 aa, Arabidopsis thaliana
  peptide (1)..(526): Ceres Seq. ID no. 4957176
  misc_feature (7)..(41): Pfam Name: PPR repeat Pfam Description: PPR repeat
  misc_feature (1)..(497): Homolog of NCBI NO: 15237442 NR Description: putative protein; protein id: At5g46460.1 thaliana] >gi|10177583|dbj|BAB10814.1|
  misc_feature (1)..(493): Homolog of NCBI NO: 15226150 NR Description: hypothetical protein; protein id: At2g33680.1
  misc_feature (1)..(497): Homolog of NCBI NO: 15232500 NR Description: hypothetical protein; protein id: At3g15130.1
  misc_feature (1)..(484): Homolog of NCBI NO: 15221304 NR Description: hypothetical protein; protein id: At1g74600.1
  misc_feature (1)..(20): Homolog of NCBI NO: 15221304 NR Description: hypothetical protein; protein id: At1g74600.1
  misc_feature (1)..(497): Homolog of NCBI NO: 11994503 NR Description: emb|CAB36829.1~gene_id:F4B12.5~strong similarity
  misc_feature (1)..(495): Homolog of NCBI NO: 15234006 NR Description: putative protein; protein id: At4g18750.1
  misc_feature (1)..(496): Homolog of NCBI NO: 27260973 NR Description: OJ1705_C03.3 [Oryza sativa (japonica
  misc_feature (1)..(493): Homolog of NCBI NO: 15236324 NR Description: putative protein; protein id: At4g13650.1
  misc_feature (1)..(501): Homolog of NCBI NO: 32482936 NR Description: OSJNBb0072M01.1 [Oryza sativa (japonica
MPERDVVSWNTMISGLVSCGFHEYGIRVFFDMQRWEIRPTEFTFSILASLVTCVRHGEQIHGNAICSGVSRYNLVVWNSVMDMYRRLGVFDYALSVFLTMEDRDVVSWNCLILSCSDSGNKEVALDQFWLMREMEIQPDEYTVSMVVSICSDLRELSKGKQALALCIKMGFLSNSIVLGAGIDMFSKCNRLDDSVKLFRELEKWDSVLCNSMIGSYSWHCCGEDALRLFILAMTQSVRPDKFTFSSVLSSMNAVMLDHGADVHSLVIKLGFDLDTAVATSLMEMYFKTGSVDLAMGVFAKTDGKDLIFWNTVIMGLARNSRAVESLAIFNQLLMNQSLKPDRVTLMGILVACCYAGFVNEGIQIFSSMEKAHGVNPGNEHYACIIELLCRVGMINEAKDIADKIPFEPSSHIWEPILCASLDLGDTRLAETVAKTMLESEPKSSFPYLVLIKIYEMTWRWENSVKLRYAMNEHKLKSAQGSSKISIESSVFSFEADQLQIHGGHDTCALLDLLSWDSFDQKIHWSA

SEQ ID NO: 73081 - DNA, 1032 bp, Arabidopsis thaliana
  misc_feature (1)..(1032): Ceres Seq. ID no. 4957285
  misc_feature: MA Experiment ID: 20000437 Result: Down-regulated in Transcription
  misc_feature: MA Experiment 20000437 PARAMETER Experiment Name: At_Drought_P Parameter: Age (day) Value: 8
  misc_feature: MA Experiment 20000437 PARAMETER Experiment Name: At_Drought_P Parameter: Organism Value: A. thaliana
  misc_feature: MA Experiment 20000437 PARAMETER Experiment Name: At_Drought_P Parameter: Plant Line Value: WS
  misc_feature: MA Experiment 20000437 PARAMETER Experiment Name: At_Drought_P Parameter: Timepoint (hr) Value: 24
  misc_feature: MA Experiment 20000437 PARAMETER Experiment Name: At_Drought_P Parameter: Tissue Value: Whole Plant
  misc_feature: MA Experiment 20000437 PARAMETER Experiment Name: At_Drought_P Parameter: Treatment Value: Drought vs. No Drought
  misc_feature: MA Experiment ID: 20000794 Result: Down-regulated in Transcription
  misc_feature: MA Experiment 20000794 PARAMETER Experiment Name: At_Petals_P Parameter: Age (day) Value: 23-25 days
  misc_feature: MA Experiment 20000794 PARAMETER Experiment Name: At_Petals_P Parameter: Plant Line Value: WS
  misc_feature: MA Experiment 20000794 PARAMETER Experiment Name: At_Petals_P Parameter: Tissue Value: Petals vs. Whole plant
atggcgagagtttgtcttccttgttctttccttcgtacctctactctctcgattctcttccgttcaccgattctctccacaaccgccgcaatttcattttgctcgtcgtcggagttcgccgactctgtagccaaggatgattcaaaacgcggtcctctcaagcctgggctttacctcgtcggaactccaatcggaaacctcgaagatatcactttacgtgcgattcgtgtattgagatctgcggatgtgatactctctgaggatacaagacactctgggaagttgctacagtattacaatattaaagctcagcttcttagttatcacaagttcaacgaggctcagagagaacaagcggtgttgacacggttgaaacaaggagagattgttgcacttatcagcgatgctggcacaccgggaattagtgatcccggtactcaacttgctaaaatgtgtgcgaaagaaaatatagatgtgattccaatccctggggcttgtgctgtagttgctgctctttctgcatctggtttggagacagatgagttcacattcgttggatttcttcctaagcattctggaacaaggaaggagaggctgattgtttcatcaaatgagacaagaacacagatcttttatgttccccctcataagttgtcacagtttcttgaagaaacaaccccttactttggtgaatcaaggcaatgtgtaatagctcgagagattacaaagctgcatgaagagttttggaggggttcgatagcggaagccaagcaagagtttctgatccgccaaccaaaaggagaaatcacgcttttgatagaaggaaaggaagaaaccaaagctgaaaatccaacagagtctcaacttgaagaagagttgagaggcctgatctctgatgggcatagcctttccacggcggtgaaaacggttgcagaaagaacatcaatgagaaagaaagaagtatattctctggcattgaagaaattcgggaagcagattcgggtagaagaagaagatgaagctgatgagtaa

SEQ ID NO: 73082 - protein, 343 aa, Arabidopsis thaliana
  peptide (1)..(343): Ceres Seq. ID no. 4957286
  misc_feature (56)..(237): Pfam Name: Tetrapyrrole (Corrin/Porphyrin) Methylases Pfam Description: Tetrapyrrole (Corrin/Porphyrin) Methylases
  misc_feature (1)..(343): Homolog of NCBI NO: 30693914 NR Description: expressed protein [Arabidopsis thaliana]
  misc_feature (1)..(237): Homolog of NCBI NO: 7767663 NR Description: F27F5.18 [Arabidopsis thaliana]
  misc_feature (233)..(343): Homolog of NCBI NO: 7767663 NR Description: F27F5.18 [Arabidopsis thaliana]
  misc_feature (23)..(327): Homolog of NCBI NO: 37534330 NR Description: hypothetical protein [Oryza sativa (japonica group)] >gi|31432069|gb|AAP53754.1| hypothetical protein [Oryza
  misc_feature (54)..(326): Homolog of NCBI NO: 17232172 NR Description: tetrapyrrole methylase family protein [Nostoc sp.
  misc_feature (54)..(326): Homolog of NCBI NO: 23125107 NR Description: hypothetical protein [Nostoc punctiforme]
  misc_feature (57)..(327): Homolog of NCBI NO: 23041512 NR Description: hypothetical protein [Trichodesmium erythraeum
  misc_feature (57)..(327): Homolog of NCBI NO: 16330705 NR Description: hypothetical protein [Synechocystis sp. PCC 6803]
  misc_feature (57)..(326): Homolog of NCBI NO: 20806633 NR Description: predicted methyltransferases [Thermoanaerobacter >gi|20515080|gb|AAM23408.1| predicted methyltransferases
  misc_feature (57)..(327): Homolog of NCBI NO: 22299057 NR Description: tetrapyrrole methylase family protein
MARVCLPCSFLRTSTLSILFRSPILSTTAAISFCSSSEFADSVAKDDSKRGPLKPGLYLVGTPIGNLEDITLRAIRVLRSADVILSEDTRHSGKLLQYYNIKAQLLSYHKFNEAQREQAVLTRLKQGEIVALISDAGTPGISDPGTQLAKMCAKENIDVIPIPGACAVVAALSASGLETDEFTFVGFLPKHSGTRKERLIVSSNETRTQIFYVPPHKLSQFLEETTPYFGESRQCVIAREITKLHEEFWRGSIAEAKQEFLIRQPKGEITLLIEGKEETKAENPTESQLEEELRGLISDGHSLSTAVKTVAERTSMRKKEVYSLALKKFGKQIRVEEEDEADE

SEQ ID NO: 73083 - protein, 193 aa, Arabidopsis thaliana
  peptide (1)..(193): Ceres Seq. ID no. 4957287
  misc_feature (1)..(87): Pfam Name: Tetrapyrrole (Corrin/Porphyrin) Methylases Pfam Description: Tetrapyrrole (Corrin/Porphyrin) Methylases
  misc_feature (1)..(193): Homolog of NCBI NO: 30693914 NR Description: expressed protein [Arabidopsis thaliana]
  misc_feature (1)..(87): Homolog of NCBI NO: 7767663 NR Description: F27F5.18 [Arabidopsis thaliana]
  misc_feature (83)..(193): Homolog of NCBI NO: 7767663 NR Description: F27F5.18 [Arabidopsis thaliana]
  misc_feature (1)..(177): Homolog of NCBI NO: 37534330 NR Description: hypothetical protein [Oryza sativa (japonica group)] >gi|31432069|gb|AAP53754.1| hypothetical protein [Oryza
  misc_feature (1)..(176): Homolog of NCBI NO: 17232172 NR Description: tetrapyrrole methylase family protein [Nostoc sp.
  misc_feature (1)..(176): Homolog of NCBI NO: 23125107 NR Description: hypothetical protein [Nostoc punctiforme]
  misc_feature (1)..(177): Homolog of NCBI NO: 23041512 NR Description: hypothetical protein [Trichodesmium erythraeum
  misc_feature (1)..(177): Homolog of NCBI NO: 16330705 NR Description: hypothetical protein [Synechocystis sp. PCC 6803]
  misc_feature (1)..(176): Homolog of NCBI NO: 20806633 NR Description: predicted methyltransferases [Thermoanaerobacter >gi|20515080|gb|AAM23408.1| predicted methyltransferases
  misc_feature (1)..(177): Homolog of NCBI NO: 22299057 NR Description: tetrapyrrole methylase family protein
MCAKENIDVIPIPGACAVVAALSASGLETDEFTFVGFLPKHSGTRKERLIVSSNETRTQIFYVPPHKLSQFLEETTPYFGESRQCVIAREITKLHEEFWRGSIAEAKQEFLIRQPKGEITLLIEGKEETKAENPTESQLEEELRGLISDGHSLSTAVKTVAERTSMRKKEVYSLALKKFGKQIRVEEEDEADE

SEQ ID NO: 73084 - DNA, 1014 bp, Arabidopsis thaliana
  misc_feature (1)..(1014): Ceres Seq. ID no. 4957360
  misc_feature: MA Experiment ID: 20000437 Result: Down-regulated in Transcription
  misc_feature: MA Experiment 20000437 PARAMETER Experiment Name: At_Drought_P Parameter: Age (day) Value: 8
  misc_feature: MA Experiment 20000437 PARAMETER Experiment Name: At_Drought_P Parameter: Organism Value: A. thaliana
  misc_feature: MA Experiment 20000437 PARAMETER Experiment Name: At_Drought_P Parameter: Plant Line Value: WS
  misc_feature: MA Experiment 20000437 PARAMETER Experiment Name: At_Drought_P Parameter: Timepoint (hr) Value: 24
  misc_feature: MA Experiment 20000437 PARAMETER Experiment Name: At_Drought_P Parameter: Tissue Value: Whole Plant
  misc_feature: MA Experiment 20000437 PARAMETER Experiment Name: At_Drought_P Parameter: Treatment Value: Drought vs. No Drought
  misc_feature: MA Experiment ID: 20000794 Result: Down-regulated in Transcription
  misc_feature: MA Experiment 20000794 PARAMETER Experiment Name: At_Petals_P Parameter: Age (day) Value: 23-25 days
  misc_feature: MA Experiment 20000794 PARAMETER Experiment Name: At_Petals_P Parameter: Plant Line Value: WS
  misc_feature: MA Experiment 20000794 PARAMETER Experiment Name: At_Petals_P Parameter: Tissue Value: Petals vs. Whole plant
atggcgagagtttgtcttccttgttctttccttcgtacctctactctctcgattctcttccgttcaccgattctctccacaaccgccgcaatttcattttgctcgtcgtcggagttcgccgactctgtagccaaggatgattcaaaacgcggtcctctcaagcctgggctttacctcgtcggaactccaatcggaaacctcgaagatatcactttacgatctgcggatgtgatactctctgaggatacaagacactctgggaagttgctacagtattacaatattaaagctcagcttcttagttatcacaagttcaacgaggctcagagagaacaagcggtgttgacacggttgaaacaaggagagattgttgcacttatcagcgatgctggcacaccgggaattagtgatcccggtactcaacttgctaaaatgtgtgcgaaagaaaatatagatgtgattccaatccctggggcttgtgctgtagttgctgctctttctgcatctggtttggagacagatgagttcacattcgttggatttcttcctaagcattctggaacaaggaaggagaggctgattgtttcatcaaatgagacaagaacacagatcttttatgttccccctcataagttgtcacagtttcttgaagaaacaaccccttactttggtgaatcaaggcaatgtgtaatagctcgagagattacaaagctgcatgaagagttttggaggggttcgatagcggaagccaagcaagagtttctgatccgccaaccaaaaggagaaatcacgcttttgatagaaggaaaggaagaaaccaaagctgaaaatccaacagagtctcaacttgaagaagagttgagaggcctgatctctgatgggcatagcctttccacggcggtgaaaacggttgcagaaagaacatcaatgagaaagaaagaagtatattctctggcattgaagaaattcgggaagcagattcgggtagaagaagaagatgaagctgatgagtaa

SEQ ID NO: 73085 - protein, 337 aa, Arabidopsis thaliana
  peptide (1)..(337): Ceres Seq. ID no. 4957361
  misc_feature (56)..(231): Pfam Name: Tetrapyrrole (Corrin/Porphyrin) Methylases Pfam Description: Tetrapyrrole (Corrin/Porphyrin) Methylases
  misc_feature (1)..(231): Homolog of NCBI NO: 7767663 NR Description: F27F5.18 [Arabidopsis thaliana]
  misc_feature (227)..(337): Homolog of NCBI NO: 7767663 NR Description: F27F5.18 [Arabidopsis thaliana]
  misc_feature (1)..(337): Homolog of NCBI NO: 30693914 NR Description: expressed protein [Arabidopsis thaliana]
  misc_feature (23)..(321): Homolog of NCBI NO: 37534330 NR Description: hypothetical protein [Oryza sativa (japonica group)] >gi|31432069|gb|AAP53754.1| hypothetical protein [Oryza
  misc_feature (54)..(320): Homolog of NCBI NO: 17232172 NR Description: tetrapyrrole methylase family protein [Nostoc sp.
  misc_feature (54)..(320): Homolog of NCBI NO: 23125107 NR Description: hypothetical protein [Nostoc punctiforme]
  misc_feature (57)..(321): Homolog of NCBI NO: 23041512 NR Description: hypothetical protein [Trichodesmium erythraeum
  misc_feature (57)..(321): Homolog of NCBI NO: 16330705 NR Description: hypothetical protein [Synechocystis sp. PCC 6803]
  misc_feature (57)..(320): Homolog of NCBI NO: 20806633 NR Description: predicted methyltransferases [Thermoanaerobacter >gi|20515080|gb|AAM23408.1| predicted methyltransferases
  misc_feature (57)..(321): Homolog of NCBI NO: 22299057 NR Description: tetrapyrrole methylase family protein
MARVCLPCSFLRTSTLSILFRSPILSTTAAISFCSSSEFADSVAKDDSKRGPLKPGLYLVGTPIGNLEDITLRSADVILSEDTRHSGKLLQYYNIKAQLLSYHKFNEAQREQAVLTRLKQGEIVALISDAGTPGISDPGTQLAKMCAKENIDVIPIPGACAVVAALSASGLETDEFTFVGFLPKHSGTRKERLIVSSNETRTQIFYVPPHKLSQFLEETTPYFGESRQCVIAREITKLHEEFWRGSIAEAKQEFLIRQPKGEITLLIEGKEETKAENPTESQLEEELRGLISDGHSLSTAVKTVAERTSMRKKEVYSLALKKFGKQIRVEEEDEADE

SEQ ID NO: 73086 - protein, 193 aa, Arabidopsis thaliana; identical to SEQ ID NO: 73083
  peptide (1)..(193): Ceres Seq. ID no. 4957362
  misc_feature (1)..(87): Pfam Name: Tetrapyrrole (Corrin/Porphyrin) Methylases Pfam Description: Tetrapyrrole (Corrin/Porphyrin) Methylases
  misc_feature (1)..(87): Homolog of NCBI NO: 7767663 NR Description: F27F5.18 [Arabidopsis thaliana]
  misc_feature (83)..(193): Homolog of NCBI NO: 7767663 NR Description: F27F5.18 [Arabidopsis thaliana]
  misc_feature (1)..(193): Homolog of NCBI NO: 30693914 NR Description: expressed protein [Arabidopsis thaliana]
  misc_feature (1)..(177): Homolog of NCBI NO: 37534330 NR Description: hypothetical protein [Oryza sativa (japonica group)] >gi|31432069|gb|AAP53754.1| hypothetical protein [Oryza
  misc_feature (1)..(176): Homolog of NCBI NO: 17232172 NR Description: tetrapyrrole methylase family protein [Nostoc sp.
  misc_feature (1)..(176): Homolog of NCBI NO: 23125107 NR Description: hypothetical protein [Nostoc punctiforme]
  misc_feature (1)..(177): Homolog of NCBI NO: 23041512 NR Description: hypothetical protein [Trichodesmium erythraeum
  misc_feature (1)..(177): Homolog of NCBI NO: 16330705 NR Description: hypothetical protein [Synechocystis sp. PCC 6803]
  misc_feature (1)..(176): Homolog of NCBI NO: 20806633 NR Description: predicted methyltransferases [Thermoanaerobacter >gi|20515080|gb|AAM23408.1| predicted methyltransferases
  misc_feature (1)..(177): Homolog of NCBI NO: 22299057 NR Description: tetrapyrrole methylase family protein

SEQ ID NO: 73087 - DNA, 786 bp, Arabidopsis thaliana
  misc_feature (1)..(786): Ceres Seq. ID no. 4957382
  misc_feature: MA Experiment ID: 108462 Result: Up-regulated in Transcription
  misc_feature: MA Experiment 108462 PARAMETER Experiment Name: At_Germinating_Seeds_cDNA_P Parameter: Age (day) Value: 2 vs. 0
  misc_feature: MA Experiment 108462 PARAMETER Experiment Name: At_Germinating_Seeds_cDNA_P Parameter: Tissue Value: Germinating Seeds
  misc_feature: MA Experiment ID: 108561 Result: Down-regulated in Transcription
  misc_feature: MA Experiment 108561 PARAMETER Experiment Name: At_100uM_ABA_cDNA_P Parameter: Timepoint (hr) Value: 6
  misc_feature: MA Experiment 108561 PARAMETER Experiment Name: At_100uM_ABA_cDNA_P Parameter: Tissue Value: Aerial
  misc_feature: MA Experiment 108561 PARAMETER Experiment Name: At_100uM_ABA_cDNA_P Parameter: Treatment Value: 100uM ABA vs. No Treatment
  misc_feature: MA Experiment ID: 108595 Result: Down-regulated in Transcription
  misc_feature: MA Experiment 108595 PARAMETER Experiment Name: At_Ler-pi_Ovule_cDNA_P Parameter: Plant Line Value: null
atgagaatgttagttcttcgcactcccaccggacctgtctccgccgtcagattcatcaccaaatccaaaccttctcctttctcttctcccgattcatggctcctccctgcaccaaacactcaccggagtcgtccccgcgtcgtcctcgctctctctaaccccgacggaagcgtcaactcaaaaccctcaacctcagcttctcaaatcccttcttcaggagatgaaacagttttcgtgggtcaagataatgttcctctcgagggcgtgattcaattcgataaaccgtcatctacttcatcttctaacattaccaaatggggtcgtgtggctttacttgcgggtggtgatgttttagctctgcttatcttctctgccattgggagatttagccatggtttccctgttttttctcttgatactctccacacagctgaccctttcattgcgggatggtttctgagtgcttatttcttggggggttatgcggaggaaggacgaggaatgaagggaaagtctaaagctgtggttgcagctgcgaaatcttggattgtcggaactccgcttggaattatcattaggtcagcttcatcaggtcacattccggcatatagctttgtgttggtgacaatgggaagtactgctgttttacttataggatggagagcattgttattcagtgtgcttcctacagagtccaagaagaaagatgatacgtatcggaagggtagtgcattcgagctatttgagtatttaccgtgtttgttcaaaggtgatgctaatgaatga

SEQ ID NO: 73088 - protein, 261 aa, Arabidopsis thaliana
  peptide (1)..(261): Ceres Seq. ID no. 4957383
  misc_feature (1)..(261): Homolog of NCBI NO: 25405875 NR Description: protein F27F5.3 [imported] - Arabidopsis thaliana
  misc_feature (1)..(256): Homolog of NCBI NO: 18401414 NR Description: expressed protein; protein id: At1g44920.1, by cDNA: gi_13878106, supported by cDNA: gi_17104772 [Arabidopsis >gi|8656004|gb|AAF78277.1|AC020576_21 Contains similarity to
  misc_feature (3)..(256): Homolog of NCBI NO: 28273393 NR Description: unknown protein [Oryza sativa (japonica
  misc_feature (106)..(221): Homolog of NCBI NO: 22970530 NR Description: hypothetical protein [Chloroflexus aurantiacus]
  misc_feature (103)..(223): Homolog of NCBI NO: 25029256 NR Description: conserved hypothetical protein [Corynebacterium
MRMLVLRTPTGPVSAVRFITKSKPSPFSSPDSWLLPAPNTHRSRPRVVLALSNPDGSVNSKPSTSASQIPSSGDETVFVGQDNVPLEGVIQFDKPSSTSSSNITKWGRVALLAGGDVLALLIFSAIGRFSHGFPVFSLDTLHTADPFIAGWFLSAYFLGGYAEEGRGMKGKSKAVVAAAKSWIVGTPLGIIIRSASSGHIPAYSFVLVTMGSTAVLLIGWRALLFSVLPTESKKKDDTYRKGSAFELFEYLPCLFKGDANE

SEQ ID NO: 73089 - protein, 259 aa, Arabidopsis thaliana
  peptide (1)..(259): Ceres Seq. ID no. 4957384
  misc_feature (1)..(259): Homolog of NCBI NO: 25405875 NR Description: protein F27F5.3 [imported] - Arabidopsis thaliana
  misc_feature (1)..(254): Homolog of NCBI NO: 18401414 NR Description: expressed protein; protein id: At1g44920.1, by cDNA: gi_13878106, supported by cDNA: gi_17104772 [Arabidopsis >gi|8656004|gb|AAF78277.1|AC020576_21 Contains similarity to
  misc_feature (1)..(254): Homolog of NCBI NO: 28273393 NR Description: unknown protein [Oryza sativa (japonica
  misc_feature (104)..(219): Homolog of NCBI NO: 22970530 NR Description: hypothetical protein [Chloroflexus aurantiacus]
  misc_feature (101)..(221): Homolog of NCBI NO: 25029256 NR Description: conserved hypothetical protein [Corynebacterium
MLVLRTPTGPVSAVRFITKSKPSPFSSPDSWLLPAPNTHRSRPRVVLALSNPDGSVNSKPSTSASQIPSSGDETVFVGQDNVPLEGVIQFDKPSSTSSSNITKWGRVALLAGGDVLALLIFSAIGRFSHGFPVFSLDTLHTADPFIAGWFLSAYFLGGYAEEGRGMKGKSKAVVAAAKSWIVGTPLGIIIRSASSGHIPAYSFVLVTMGSTAVLLIGWRALLFSVLPTESKKKDDTYRKGSAFELFEYLPCLFKGDANE

SEQ ID NO: 73090 - DNA, 1179 bp, Arabidopsis thaliana
  misc_feature (1)..(1179): Ceres Seq. ID no. 4957757
  misc_feature: MA Experiment ID: 20000327 Result: Down-regulated in Transcription
  misc_feature: MA Experiment 20000327 PARAMETER Experiment Name: At_42deg_Heat_Sub_P Parameter: Age (day) Value: 14
  misc_feature: MA Experiment 20000327 PARAMETER Experiment Name: At_42deg_Heat_Sub_P Parameter: Organism Value: A. thaliana
  misc_feature: MA Experiment 20000327 PARAMETER Experiment Name: At_42deg_Heat_Sub_P Parameter: Plant Line Value: WS
  misc_feature: MA Experiment 20000327 PARAMETER Experiment Name: At_42deg_Heat_Sub_P Parameter: Temperature (deg C) Value: 42 vs. 22
  misc_feature: MA Experiment 20000327 PARAMETER Experiment Name: At_42deg_Heat_Sub_P Parameter: Timepoint (hr) Value: 1
  misc_feature: MA Experiment 20000327 PARAMETER Experiment Name: At_42deg_Heat_Sub_P Parameter: Tissue Value: Aerial
  misc_feature: MA Experiment ID: 20000328 Result: Down-regulated in Transcription
  misc_feature: MA Experiment 20000328 PARAMETER Experiment Name: At_42deg_Heat_Sub_P Parameter: Age (day) Value: 14
  misc_feature: MA Experiment 20000328 PARAMETER Experiment Name: At_42deg_Heat_Sub_P Parameter: Organism Value: A. thaliana
  misc_feature: MA Experiment 20000328 PARAMETER Experiment Name: At_42deg_Heat_Sub_P Parameter: Plant Line Value: WS
  misc_feature: MA Experiment 20000328 PARAMETER Experiment Name: At_42deg_Heat_Sub_P Parameter: Temperature (deg C) Value: 42 vs. 22
  misc_feature: MA Experiment 20000328 PARAMETER Experiment Name: At_42deg_Heat_Sub_P Parameter: Timepoint (hr) Value: 6
  misc_feature: MA Experiment 20000328 PARAMETER Experiment Name: At_42deg_Heat_Sub_P Parameter: Tissue Value: Aerial
atgcttgatgattacatagcgaaatcgaagctcagtgagagtttaacctctacggtttggttagcgaagcacaagttaaccggcgaagaagcagtgatgaagtgtttcgacctctcgaagctcaatcgcaatctccgagactgtttaaacaacgaactggagtttctatcttctgttgatcatcccaatatcattcgtctcctccatgtttctcaagatgatgattttctcgttatggttttggaatattgtgatggaggaactttatcatcgtatattcaacgttatggtagagttgaagaagatatcgccaagagatttatgaagcaaattggagctggtttggaaattattcatgataatcacattatccatagagacttgaaacctgagaatattttaattgacggatctggtgatgatttggtgttgaagattgccgattttagtcttgcaagaaaactacatccgggcaagtatcttgaaacagtgtgtggttctccgttttacatggctcctgaagttcttcagtttcagagatacaatgaaaaggctgatatgtggagtgtaggagcaatccttttcgagctacttcacgggtatccaccattccgtggtaataacaatgttcaggttctaaggaacatcaaatctagtacagctcttccattctctcggcttattcttcaacagatgcatcctgattgcatcgacgtctgctcaagattgctttctattaacccagctgccacactgggcatagaagattttccttttcttggccgtataaagaacagtagggtttgggtcaaggacacaacattttcttcaagacaacatggaacaagggaaagaaaagtggctacaattaacggaagacttcaatttgacctttcacaggatgcatacctcccacagaggcttcttgaaaacctgatgtatatttacaatactattgaaatggctcgtgtaactggagtccctacctcctaccttatttcaagaggagagagcatcaaggttctatctcaactacttaggaaagctaaacagaaaacctggttcttccaaatgctgagaagttggaacctgaacaaggaacttatgaaggttttagaagcaagaactggtttctacgagccaattgctactctggattttgcttcgttgtactcgtaa

SEQ ID NO: 73091 - protein, 392 aa, Arabidopsis thaliana
  peptide (1)..(392): Ceres Seq. ID no. 4957758
  misc_feature (1)..(392): Homolog of NCBI NO: 7770326 NR Description: F27J15.5 [Arabidopsis thaliana]
  misc_feature (1)..(392): Homolog of NCBI NO: 30694500 NR Description: protein kinase family [Arabidopsis thaliana]
  misc_feature (5)..(257): Homolog of NCBI NO: 38345825 NR Description: OSJNBa0070M12.8 [Oryza sativa (japonica
  misc_feature (1)..(337): Homolog of NCBI NO: 30687274 NR Description: protein kinase family [Arabidopsis thaliana]
  misc_feature (1)..(337): Homolog of NCBI NO: 20268768 NR Description: unknown protein [Arabidopsis thaliana]
  misc_feature (1)..(257): Homolog of NCBI NO: 11358841 NR Description: serine/threonine-protein kinase-like protein -
  misc_feature (1)..(257): Homolog of NCBI NO: 18412205 NR Description: serine/threonine-protein kinase-like protein; id: At3g61960.1, supported by cDNA: gi_14334751 [Arabidopsis
  misc_feature (1)..(248): Homolog of NCBI NO: 25287591 NR Description: probable protein kinase [imported] - Arabidopsis
  misc_feature (1)..(260): Homolog of NCBI NO: 30693945 NR Description: protein kinase family [Arabidopsis thaliana]
  misc_feature (38)..(260): Homolog of NCBI NO: 26452168 NR Description: unknown protein [Arabidopsis thaliana]
MLDDYIAKSKLSESLTSTVWLAKHKLTGEEAVMKCFDLSKLNRNLRDCLNNELEFLSSVDHPNIIRLLHVSQDDDFLVMVLEYCDGGTLSSYIQRYGRVEEDIAKRFMKQIGAGLEIIHDNHIIHRDLKPENILIDGSGDDLVLKIADFSLARKLHPGKYLETVCGSPFYMAPEVLQFQRYNEKADMWSVGAILFELLHGYPPFRGNNNVQVLRNIKSSTALPFSRLILQQMHPDCIDVCSRLLSINPAATLGIEDFPFLGRIKNSRVWVKDTTFSSRQHGTRERKVATINGRLQFDLSQDAYLPQRLLENLMYIYNTIEMARVTGVPTSYLISRGESIKVLSQLLRKAKQKTWFFQMLRSWNLNKELMKVLEARTGFYEPIATLDFASLYS

SEQ ID NO: 73092 - protein, 360 aa, Arabidopsis thaliana
  peptide (1)..(360): Ceres Seq. ID no. 4957759
  misc_feature (1)..(360): Homolog of NCBI NO: 7770326 NR Description: F27J15.5 [Arabidopsis thaliana]
  misc_feature (1)..(360): Homolog of NCBI NO: 30694500 NR Description: protein kinase family [Arabidopsis thaliana]
  misc_feature (1)..(225): Homolog of NCBI NO: 38345825 NR Description: OSJNBa0070M12.8 [Oryza sativa (japonica
  misc_feature (1)..(305): Homolog of NCBI NO: 30687274 NR Description: protein kinase family [Arabidopsis thaliana]
  misc_feature (1)..(305): Homolog of NCBI NO: 20268768 NR Description: unknown protein [Arabidopsis thaliana]
  misc_feature (1)..(225): Homolog of NCBI NO: 11358841 NR Description: serine/threonine-protein kinase-like protein -
  misc_feature (1)..(225): Homolog of NCBI NO: 18412205 NR Description: serine/threonine-protein kinase-like protein; id: At3g61960.1, supported by cDNA: gi_14334751 [Arabidopsis
  misc_feature (1)..(216): Homolog of NCBI NO: 25287591 NR Description: probable protein kinase [imported] - Arabidopsis
  misc_feature (1)..(228): Homolog of NCBI NO: 30693945 NR Description: protein kinase family [Arabidopsis thaliana]
  misc_feature (6)..(228): Homolog of NCBI NO: 26452168 NR Description: unknown protein [Arabidopsis thaliana]
MKCFDLSKLNRNLRDCLNNELEFLSSVDHPNIIRLLHVSQDDDFLVMVLEYCDGGTLSSYIQRYGRVEEDIAKRFMKQIGAGLEIIHDNHIIHRDLKPENILIDGSGDDLVLKIADFSLARKLHPGKYLETVCGSPFYMAPEVLQFQRYNEKADMWSVGAILFELLHGYPPFRGNNNVQVLRNIKSSTALPFSRLILQQMHPDCIDVCSRLLSINPAATLGIEDFPFLGRIKNSRVWVKDTTFSSRQHGTRERKVATINGRLQFDLSQDAYLPQRLLENLMYIYNTIEMARVTGVPTSYLISRGESIKVLSQLLRKAKQKTWFFQMLRSWNLNKELMKVLEARTGFYEPIATLDFASLYS

SEQ ID NO: 73093 - protein, 314 aa, Arabidopsis thaliana
  peptide (1)..(314): Ceres Seq. ID no. 4957760
  misc_feature (1)..(314): Homolog of NCBI NO: 7770326 NR Description: F27J15.5 [Arabidopsis thaliana]
  misc_feature (1)..(314): Homolog of NCBI NO: 30694500 NR Description: protein kinase family [Arabidopsis thaliana]
  misc_feature (1)..(179): Homolog of NCBI NO: 38345825 NR Description: OSJNBa0070M12.8 [Oryza sativa (japonica
  misc_feature (1)..(259): Homolog of NCBI NO: 30687274 NR Description: protein kinase family [Arabidopsis thaliana]
  misc_feature (1)..(259): Homolog of NCBI NO: 20268768 NR Description: unknown protein [Arabidopsis thaliana]
  misc_feature (1)..(179): Homolog of NCBI NO: 11358841 NR Description: serine/threonine-protein kinase-like protein -
  misc_feature (1)..(179): Homolog of NCBI NO: 18412205 NR Description: serine/threonine-protein kinase-like protein; id: At3g61960.1, supported by cDNA: gi_14334751 [Arabidopsis
  misc_feature (1)..(170): Homolog of NCBI NO: 25287591 NR Description: probable protein kinase [imported] - Arabidopsis
  misc_feature (1)..(182): Homolog of NCBI NO: 30693945 NR Description: protein kinase family [Arabidopsis thaliana]
  misc_feature (1)..(182): Homolog of NCBI NO: 26452168 NR Description: unknown protein [Arabidopsis thaliana]
MVLEYCDGGTLSSYIQRYGRVEEDIAKRFMKQIGAGLEIIHDNHIIHRDLKPENILIDGSGDDLVLKIADFSLARKLHPGKYLETVCGSPFYMAPEVLQFQRYNEKADMWSVGAILFELLHGYPPFRGNNNVQVLRNIKSSTALPFSRLILQQMHPDCIDVCSRLLSINPAATLGIEDFPFLGRIKNSRVWVKDTTFSSRQHGTRERKVATINGRLQFDLSQDAYLPQRLLENLMYIYNTIEMARVTGVPTSYLISRGESIKVLSQLLRKAKQKTWFFQMLRSWNLNKELMKVLEARTGFYEPIATLDFASLYS

SEQ ID NO: 73094 - DNA, 2097 bp, Arabidopsis thaliana
  misc_feature (1)..(2097): Ceres Seq. ID no. 4957791
  misc_feature: MA Experiment ID: 108462 Result: Down-regulated in Transcription
  misc_feature: MA Experiment 108462 PARAMETER Experiment Name: At_Germinating_Seeds_cDNA_P Parameter: Age (day) Value: 2 vs. 0
  misc_feature: MA Experiment 108462 PARAMETER Experiment Name: At_Germinating_Seeds_cDNA_P Parameter: Tissue Value: Germinating Seeds
  misc_feature: MA Experiment ID: 108463 Result: Down-regulated in Transcription
  misc_feature: MA Experiment 108463 PARAMETER Experiment Name: At_Germinating_Seeds_cDNA_P Parameter: Age (day) Value: 3 vs. 0
  misc_feature: MA Experiment 108463 PARAMETER Experiment Name: At_Germinating_Seeds_cDNA_P Parameter: Tissue Value: Germinating Seeds
  misc_feature: MA Experiment ID: 108464 Result: Down-regulated in Transcription
  misc_feature: MA Experiment 108464 PARAMETER Experiment Name: At_Germinating_Seeds_cDNA_P Parameter: Age (day) Value: 4 vs. 0
  misc_feature: MA Experiment 108464 PARAMETER Experiment Name: At_Germinating_Seeds_cDNA_P Parameter: Tissue Value: Germinating Seeds
  misc_feature: MA Experiment ID: 108579 Result: Up-regulated in Transcription
  misc_feature: MA Experiment 108579 PARAMETER Experiment Name: At_4deg_Cold_cDNA_P Parameter: Temperature (deg C) Value: 4 vs. 22
  misc_feature: MA Experiment 108579 PARAMETER Experiment Name: At_4deg_Cold_cDNA_P Parameter: Timepoint (hr) Value: 6
  misc_feature: MA Experiment 108579 PARAMETER Experiment Name: At_4deg_Cold_cDNA_P Parameter: Tissue Value: Aerial
  misc_feature: MA Experiment ID: 108668 Result: Down-regulated in Transcription
  misc_feature: MA Experiment 108668 PARAMETER Experiment Name: At_2mM_SA_cDNA_P Parameter: Plant Line Value: WS
  misc_feature: MA Experiment 108668 PARAMETER Experiment Name: At_2mM_SA_cDNA_P Parameter: Timepoint (hr) Value: 6
  misc_feature: MA Experiment 108668 PARAMETER Experiment Name: At_2mM_SA_cDNA_P Parameter: Treatment Value: 2mM SA vs. No Treatment
  misc_feature: MA Experiment ID: 20000093 Result: Down-regulated in Transcription
  misc_feature: MA Experiment 20000093 PARAMETER Experiment Name: At_42deg_Heat_cDNA_P Parameter: Temperature (deg C) Value: 42 vs. 22
  misc_feature: MA Experiment 20000093 PARAMETER Experiment Name: At_42deg_Heat_cDNA_P Parameter: Timepoint (hr) Value: 0.5
  misc_feature: MA Experiment 20000093 PARAMETER Experiment Name: At_42deg_Heat_cDNA_P Parameter: Tissue Value: Aerial
atggaatctgaaatcgcctccgagtttcttcctttctgccggatttacaaagacggtcgtgtagaacgactcatcggcaccgataccatcccggcctctctagatccaacatacgacgtcgtttcaaaagacgttatatactcaccggagaataacctctccgttcgtctcttcctccctcacaaatcaacaaaactcaccgccggtaacaagctccctctacttatctacatccacggcggagcttggatcatcgagtcacctttctccccactctaccacaattacctcactgaagtagtcaaatccgctaactgcctcgctgtctctgttcagtatcgccgtgcaccggaagatcctgttccggcggcttatgaagatgtatggtccgcgattcagtggatttttgctcattctaatggatctggtcctgtagattggattaacaaacacgccgatttcggtaaagttttcctcggcggagatagcgcaggcggtaacatatcgcatcacatggcgatgaaagctggtaaagagaagaagctagatctcaaaatcaaaggtattgctgttgttcatccagctttctggggaacagatccggttgatgaatacgatgtgcaagataaagaaacgagaagcggaatcgcggaaatttgggagaagattgcgagtccgaatagtgttaatgggacggatgatccgttgtttaatgtaaacggatccgggtcggatttttctgggttgggatgtgataaggttttggttgcggtagctgggaaagatgtgtttgttaggcaaggattggcttatgcggcgaagctggagaagtgtgagtgggaaggtactgttgaggtggttgaggaagaaggtgaggaccatgtgtttcatttgcagaatcctaaatctgataaggctttgaaattcttgaagaagtttgtcgagtttattattgaaaatattccgggaaccatgctccgaagaatcacttgttcttcttcacttgcttcaccctctctcttcctccgcttctttcgccaactccctcgctcttactcctcaccgaccaccatcgccgtctcaggccgcaacattcgccgactatcaactccaaccactcttcgttgcatttgttcacactcttcatctgaaatcatctccgagcatcctccgttcgtcagggtttacaaagacggtcgtatcgaacgtctttccggcaccgaaacagtcccggcttctctaaacccacgaaacgacgtcgtttcaaaagacgttgtctactcaccggggcataacctctccgttcgtctctttctccctcacaaatcaacacaactcgccgccggtaacaaactccctctacttatctacttccacggcggagcttggataaacgaatcccctttctccccaatctaccacaatttcctcacggaggtagttaaatccgctaactgcctcgccgtctcggttcaataccgccgtgcaccggaagatccggttccggctgcctatgaagatacatggtctgctattcaatggattttctcacattcctgtggatctggtgaagaagattggattaacaaatacgctgatttcgaaagagtttttctcgccggagatagtgccggtggtaatatatctcatcacatggctatgagagctggtaaagagaagcttaagcctagaatcaaagggactgtgattgtgcatccagcgatttgggggaaagatccggtcgatgagcacgatgtgcaagatagagagatcagagacggagttgcagaagtttgggagaaaattgtgagtccgaatagtgttgatggagcggatgatccgtggtttaatgtggttggatccgggtcgaatttttccgggatgggatgtgacaaggttttggttgaggtggctgggaaagatgtgttttggcggcaaggattagcttacgcggcgaagctaaagaagagtgggtggaaaggagaggtggaggtgattgaggaagaagatgaagagcattgcttccatctcttaaatccaagttctgaaaatgctcccagcttcatgaagagatttgtggagtttatcactggttaa

SEQ ID NO: 73095 - protein, 698 aa, Arabidopsis thaliana
  peptide (1)..(698): Ceres Seq. ID no. 4957792
  misc_feature (46)..(97): Pfam Name: Carboxylesterase Pfam Description: Carboxylesterase
  misc_feature (325)..(698): Homolog of NCBI NO: 18402731 NR Description: expressed protein; protein id: At1g49650.1, by cDNA: 12638. [Arabidopsis thaliana]
  misc_feature (325)..(698): Homolog of NCBI NO: 21537287 NR Description: putative esterase [Arabidopsis thaliana]
  misc_feature (1)..(318): Homolog of NCBI NO: 15222795 NR Description: unknown protein; protein id: At1g49660.1
  misc_feature (383)..(698): Homolog of NCBI NO: 15222795 NR Description: unknown protein; protein id: At1g49660.1
  misc_feature (3)..(317): Homolog of NCBI NO: 18402731 NR Description: expressed protein; protein id: At1g49650.1, by cDNA: 12638. [Arabidopsis thaliana]
  misc_feature (3)..(317): Homolog of NCBI NO: 21537287 NR Description: putative esterase [Arabidopsis thaliana]
  misc_feature (383)..(696): Homolog of NCBI NO: 15222791 NR Description: hypothetical protein; protein id: At1g49640.1
  misc_feature (1)..(318): Homolog of NCBI NO: 15222791 NR Description: hypothetical protein; protein id: At1g49640.1
  misc_feature (1)..(317): Homolog of NCBI NO: 15227669 NR Description: putative esterase; protein id: At2g03550.1
  misc_feature (383)..(698): Homolog of NCBI NO: 15228425 NR Description: putative protein; protein id: At3g48690.1, by cDNA: gi_18086340 [Arabidopsis thaliana]
MESEIASEFLPFCRIYKDGRVERLIGTDTIPASLDPTYDVVSKDVIYSPENNLSVRLFLPHKSTKLTAGNKLPLLIYIHGGAWIIESPFSPLYHNYLTEVVKSANCLAVSVQYRRAPEDPVPAAYEDVWSAIQWIFAHSNGSGPVDWINKHADFGKVFLGGDSAGGNISHHMAMKAGKEKKLDLKIKGIAVVHPAFWGTDPVDEYDVQDKETRSGIAEIWEKIASPNSVNGTDDPLFNVNGSGSDFSGLGCDKVLVAVAGKDVFVRQGLAYAAKLEKCEWEGTVEVVEEEGEDHVFHLQNPKSDKALKFLKKFVEFIIENIPGTMLRRITCSSSLASPSLFLRFFRQLPRSYSSPTTIAVSGRNIRRLSTPTTLRCICSHSSSEIISEHPPFVRVYKDGRIERLSGTETVPASLNPRNDVVSKDVVYSPGHNLSVRLFLPHKSTQLAAGNKLPLLIYFHGGAWINESPFSPIYHNFLTEVVKSANCLAVSVQYRRAPEDPVPAAYEDTWSAIQWIFSHSCGSGEEDWINKYADFERVFLAGDSAGGNISHHMAMRAGKEKLKPRIKGTVIVHPAIWGKDPVDEHDVQDREIRDGVAEVWEKIVSPNSVDGADDPWFNVVGSGSNFSGMGCDKVLVEVAGKDVFWRQGLAYAAKLKKSGWKGEVEVIEEEDEEHCFHLLNPSSENAPSFMKRFVEFITG

SEQ ID NO: 73096 - protein, 527 aa, Arabidopsis thaliana
  peptide (1)..(527): Ceres Seq. ID no. 4957793
  misc_feature (255)..(306): Pfam Name: Carboxylesterase Pfam Description: Carboxylesterase
  misc_feature (154)..(527): Homolog of NCBI NO: 18402731 NR Description: expressed protein; protein id: At1g49650.1, by cDNA: 12638. [Arabidopsis thaliana]
  misc_feature (154)..(527): Homolog of NCBI NO: 21537287 NR Description: putative esterase [Arabidopsis thaliana]
  misc_feature (1)..(147): Homolog of NCBI NO: 15222795 NR Description: unknown protein; protein id: At1g49660.1
  misc_feature (212)..(527): Homolog of NCBI NO: 15222795 NR Description: unknown protein; protein id: At1g49660.1
  misc_feature (1)..(146): Homolog of NCBI NO: 18402731 NR Description: expressed protein; protein id: At1g49650.1, by cDNA: 12638. [Arabidopsis thaliana]
  misc_feature (1)..(146): Homolog of NCBI NO: 21537287 NR Description: putative esterase [Arabidopsis thaliana]
  misc_feature (212)..(525): Homolog of NCBI NO: 15222791 NR Description: hypothetical protein; protein id: At1g49640.1
  misc_feature (1)..(147): Homolog of NCBI NO: 15222791 NR Description: hypothetical protein; protein id: At1g49640.1
  misc_feature (1)..(146): Homolog of NCBI NO: 15227669 NR Description: putative esterase; protein id: At2g03550.1
  misc_feature (212)..(527): Homolog of NCBI NO: 15228425 NR Description: putative protein; protein id: At3g48690.1, by cDNA: gi_18086340 [Arabidopsis thaliana]
MAMKAGKEKKLDLKIKGIAVVHPAFWGTDPVDEYDVQDKETRSGIAEIWEKIASPNSVNGTDDPLFNVNGSGSDFSGLGCDKVLVAVAGKDVFVRQGLAYAAKLEKCEWEGTVEVVEEEGEDHVFHLQNPKSDKALKFLKKFVEFIIENIPGTMLRRITCSSSLASPSLFLRFFRQLPRSYSSPTTIAVSGRNIRRLSTPTTLRCICSHSSSEIISEHPPFVRVYKDGRIERLSGTETVPASLNPRNDVVSKDVVYSPGHNLSVRLFLPHKSTQLAAGNKLPLLIYFHGGAWINESPFSPIYHNFLTEVVKSANCLAVSVQYRRAPEDPVPAAYEDTWSAIQWIFSHSCGSGEEDWINKYADFERVFLAGDSAGGNISHHMAMRAGKEKLKPRIKGTVIVHPAIWGKDPVDEHDVQDREIRDGVAEVWEKIVSPNSVDGADDPWFNVVGSGSNFSGMGCDKVLVEVAGKDVFWRQGLAYAAKLKKSGWKGEVEVIEEEDEEHCFHLLNPSSENAPSFMKRFVEFITG

SEQ ID NO: 73097 - protein, 525 aa, Arabidopsis thaliana
  peptide (1)..(525): Ceres Seq. ID no. 4957794
  misc_feature (253)..(304): Pfam Name: Carboxylesterase Pfam Description: Carboxylesterase
  misc_feature (152)..(525): Homolog of NCBI NO: 18402731 NR Description: expressed protein; protein id: At1g49650.1, by cDNA: 12638. [Arabidopsis thaliana]
  misc_feature (152)..(525): Homolog of NCBI NO: 21537287 NR Description: putative esterase [Arabidopsis thaliana]
  misc_feature (1)..(145): Homolog of NCBI NO: 15222795 NR Description: unknown protein; protein id: At1g49660.1
  misc_feature (210)..(525): Homolog of NCBI NO: 15222795 NR Description: unknown protein; protein id: At1g49660.1
  misc_feature (1)..(144): Homolog of NCBI NO: 18402731 NR Description: expressed protein; protein id: At1g49650.1, by cDNA: 12638. [Arabidopsis thaliana]
  misc_feature (1)..(144): Homolog of NCBI NO: 21537287 NR Description: putative esterase [Arabidopsis thaliana]
  misc_feature (210)..(523): Homolog of NCBI NO: 15222791 NR Description: hypothetical protein; protein id: At1g49640.1
  misc_feature (1)..(145): Homolog of NCBI NO: 15222791 NR Description: hypothetical protein; protein id: At1g49640.1
  misc_feature (1)..(144): Homolog of NCBI NO: 15227669 NR Description: putative esterase; protein id: At2g03550.1
  misc_feature (210)..(525): Homolog of NCBI NO: 15228425 NR Description: putative protein; protein id: At3g48690.1, by cDNA: gi_18086340 [Arabidopsis thaliana]
MKAGKEKKLDLKIKGIAVVHPAFWGTDPVDEYDVQDKETRSGIAEIWEKIASPNSVNGTDDPLFNVNGSGSDFSGLGCDKVLVAVAGKDVFVRQGLAYAAKLEKCEWEGTVEVVEEEGEDHVFHLQNPKSDKALKFLKKFVEFIIENIPGTMLRRITCSSSLASPSLFLRFFRQLPRSYSSPTTIAVSGRNIRRLSTPTTLRCICSHSSSEIISEHPPFVRVYKDGRIERLSGTETVPASLNPRNDVVSKDVVYSPGHNLSVRLFLPHKSTQLAAGNKLPLLIYFHGGAWINESPFSPIYHNFLTEVVKSANCLAVSVQYRRAPEDPVPAAYEDTWSAIQWIFSHSCGSGEEDWINKYADFERVFLAGDSAGGNISHHMAMRAGKEKLKPRIKGTVIVHPAIWGKDPVDEHDVQDREIRDGVAEVWEKIVSPNSVDGADDPWFNVVGSGSNFSGMGCDKVLVEVAGKDVFWRQGLAYAAKLKKSGWKGEVEVIEEEDEEHCFHLLNPSSENAPSFMKRFVEFITG

SEQ ID NO: 73098 - DNA, 1378 bp, Arabidopsis thaliana
  misc_feature (1)..(1378): Ceres Seq. ID no. 4957818
  misc_feature: MA Experiment ID: 108461 Result: Up-regulated in Transcription
  misc_feature: MA Experiment 108461 PARAMETER Experiment Name: At_Germinating_Seeds_cDNA_P Parameter: Age (day) Value: 1 vs. 0
  misc_feature: MA Experiment 108461 PARAMETER Experiment Name: At_Germinating_Seeds_cDNA_P Parameter: Tissue Value: Germinating Seeds
  misc_feature: MA Experiment ID: 20000069 Result: Up-regulated in Transcription
  misc_feature: MA Experiment 20000069 PARAMETER Experiment Name: At_100uM_ABA_Mutants_cDNA_P Parameter: Plant Line Value: CS23
  misc_feature: MA Experiment 20000069 PARAMETER Experiment Name: At_100uM_ABA_Mutants_cDNA_P Parameter: Timepoint (hr) Value: 6
  misc_feature: MA Experiment 20000069 PARAMETER Experiment Name: At_100uM_ABA_Mutants_cDNA_P Parameter: Tissue Value: Aerial
  misc_feature: MA Experiment 20000069 PARAMETER Experiment Name: At_100uM_ABA_Mutants_cDNA_P Parameter: Treatment Value: 100uM ABA vs. No Treatment
  misc_feature: MA Experiment ID: 20000070 Result: Up-regulated in Transcription
  misc_feature: MA Experiment 20000070 PARAMETER Experiment Name: At_100uM_ABA_Mutants_cDNA_P Parameter: Plant Line Value: CS24
  misc_feature: MA Experiment 20000070 PARAMETER Experiment Name: At_100uM_ABA_Mutants_cDNA_P Parameter: Timepoint (hr) Value: 6
  misc_feature: MA Experiment 20000070 PARAMETER Experiment Name: At_100uM_ABA_Mutants_cDNA_P Parameter: Tissue Value: Aerial
  misc_feature: MA Experiment 20000070 PARAMETER Experiment Name: At_100uM_ABA_Mutants_cDNA_P Parameter: Treatment Value: 100uM ABA vs. No Treatment
  misc_feature: MA Experiment ID: 20000071 Result: Up-regulated in Transcription
  misc_feature: MA Experiment 20000071 PARAMETER Experiment Name: At_100uM_ABA_Mutants_cDNA_P Parameter: Plant Line Value: CS8104
  misc_feature: MA Experiment 20000071 PARAMETER Experiment Name: At_100uM_ABA_Mutants_cDNA_P Parameter: Timepoint (hr) Value: 6
  misc_feature: MA Experiment 20000071 PARAMETER Experiment Name: At_100uM_ABA_Mutants_cDNA_P Parameter: Tissue Value: Aerial
  misc_feature: MA Experiment 20000071 PARAMETER Experiment Name: At_100uM_ABA_Mutants_cDNA_P Parameter: Treatment Value: 100uM ABA vs. No Treatment
  misc_feature: MA Experiment ID: 20000087 Result: Up-regulated in Transcription
  misc_feature: MA Experiment 20000087 PARAMETER Experiment Name: At_100uM_ABA_Mutants_cDNA_P Parameter: Plant Line Value: WS
  misc_feature: MA Experiment 20000087 PARAMETER Experiment Name: At_100uM_ABA_Mutants_cDNA_P Parameter: Timepoint (hr) Value: 6
  misc_feature: MA Experiment 20000087 PARAMETER Experiment Name: At_100uM_ABA_Mutants_cDNA_P Parameter: Tissue Value: Aerial
  misc_feature: MA Experiment 20000087 PARAMETER Experiment Name: At_100uM_ABA_Mutants_cDNA_P Parameter: Treatment Value: 100uM ABA vs. No Treatment
  misc_feature: MA Experiment ID: 20000088 Result: Up-regulated in Transcription
  misc_feature: MA Experiment 20000088 PARAMETER Experiment Name: At_100uM_ABA_Mutants_cDNA_P Parameter: Plant Line Value: Landsberg
  misc_feature: MA Experiment 20000088 PARAMETER Experiment Name: At_100uM_ABA_Mutants_cDNA_P Parameter: Timepoint (hr) Value: 6
  misc_feature: MA Experiment 20000088 PARAMETER Experiment Name: At_100uM_ABA_Mutants_cDNA_P Parameter: Tissue Value: Aerial
  misc_feature: MA Experiment 20000088 PARAMETER Experiment Name: At_100uM_ABA_Mutants_cDNA_P Parameter: Treatment Value: 100uM ABA vs. No Treatment
  misc_feature: MA Experiment ID: 20000089 Result: Up-regulated in Transcription
  misc_feature: MA Experiment ID: 20000090 Result: Up-regulated in Transcription
  misc_feature: MA Experiment ID: 20000144 Result: Up-regulated in Transcription
  misc_feature: MA Experiment 20000144 PARAMETER Experiment Name: At_42deg_Heat_cDNA_P Parameter: Temperature (deg C) Value: 42 vs. 22
  misc_feature: MA Experiment 20000144 PARAMETER Experiment Name: At_42deg_Heat_cDNA_P Parameter: Timepoint (hr) Value: 1
  misc_feature: MA Experiment 20000144 PARAMETER Experiment Name: At_42deg_Heat_cDNA_P Parameter: Tissue Value: Aerial
  misc_feature: MA Experiment ID: 20000171 Result: Up-regulated in Transcription
  misc_feature: MA Experiment 20000171 PARAMETER Experiment Name: At_42deg_Heat_P Parameter: Age (day) Value: 14
  misc_feature: MA Experiment 20000171 PARAMETER Experiment Name: At_42deg_Heat_P Parameter: Organism Value: A. thaliana
  misc_feature: MA Experiment 20000171 PARAMETER Experiment Name: At_42deg_Heat_P Parameter: Plant Line Value: WS
  misc_feature: MA Experiment 20000171 PARAMETER Experiment Name: At_42deg_Heat_P Parameter: Temperature (deg C) Value: 42 vs. 22
  misc_feature: MA Experiment 20000171 PARAMETER Experiment Name: At_42deg_Heat_P Parameter: Timepoint (hr) Value: 1
  misc_feature: MA Experiment 20000171 PARAMETER Experiment Name: At_42deg_Heat_P Parameter: Tissue Value: Aerial
  misc_feature: MA Experiment ID: 20000184 Result: Down-regulated in Transcription
  misc_feature: MA Experiment 20000184 PARAMETER Experiment Name: At_Shoots__P Parameter: Age (day) Value: 7
  misc_feature: MA Experiment 20000184 PARAMETER Experiment Name: At_Shoots__P Parameter: Tissue Value: Shoots vs. Whole Plant
  misc_feature: MA Experiment ID: 20000224 Result: Up-regulated in Transcription
  misc_feature: MA Experiment ID: 20000234 Result: Up-regulated in Transcription
  misc_feature: MA Experiment 20000234 PARAMETER Experiment Name: At_Siliques_P Parameter: Age (day) Value: 21
  misc_feature: MA Experiment 20000234 PARAMETER Experiment Name: At_Siliques_P Parameter: Organism Value: A. thaliana
  misc_feature: MA Experiment 20000234 PARAMETER Experiment Name: At_Siliques_P Parameter: Plant Line Value: WS
  misc_feature: MA Experiment 20000234 PARAMETER Experiment Name: At_Siliques_P Parameter: Tissue Value: Less Than 5mm Siliques vs. Whole Plant
  misc_feature: MA Experiment ID: 20000235 Result: Up-regulated in Transcription
  misc_feature: MA Experiment 20000235 PARAMETER Experiment Name: At_Siliques_P Parameter: Age (day) Value: 21
  misc_feature: MA Experiment 20000235 PARAMETER Experiment Name: At_Siliques_P Parameter: Organism Value: A. thaliana
  misc_feature: MA Experiment 20000235 PARAMETER Experiment Name: At_Siliques_P Parameter: Plant Line Value: WS
  misc_feature: MA Experiment 20000235 PARAMETER Experiment Name: At_Siliques_P Parameter: Tissue Value: 5-10mm Siliques vs. Whole Plant
  misc_feature: MA Experiment ID: 20000264 Result: Up-regulated in Transcription
  misc_feature: MA Experiment 20000264 PARAMETER Experiment Name: At_Open_Flower_P Parameter: Age (day) Value: 21
  misc_feature: MA Experiment 20000264 PARAMETER Experiment Name: At_Open_Flower_P Parameter: Plant Line Value: WS
  misc_feature: MA Experiment 20000264 PARAMETER Experiment Name: At_Open_Flower_P Parameter: Tissue Value: Open Flower vs. Whole Plant
  misc_feature: MA Experiment ID: 20000265 Result: Up-regulated in Transcription
  misc_feature: MA Experiment 20000265 PARAMETER Experiment Name: At_Open_Flower_P Parameter: Age (day) Value: 21
  misc_feature: MA Experiment 20000265 PARAMETER Experiment Name: At_Open_Flower_P Parameter: Plant Line Value: WS
  misc_feature: MA Experiment 20000265 PARAMETER Experiment Name: At_Open_Flower_P Parameter: Tissue Value: Closed Flower vs. Whole Plant
  misc_feature: MA Experiment ID: 20000437 Result: Up-regulated in Transcription
  misc_feature: MA Experiment 20000437 PARAMETER Experiment Name: At_Drought_P Parameter: Age (day) Value: 8
  misc_feature: MA Experiment 20000437 PARAMETER Experiment Name: At_Drought_P Parameter: Organism Value: A. thaliana
  misc_feature: MA Experiment 20000437 PARAMETER Experiment Name: At_Drought_P Parameter: Plant Line Value: WS
  misc_feature: MA Experiment 20000437 PARAMETER Experiment Name: At_Drought_P Parameter: Timepoint (hr) Value: 24
  misc_feature: MA Experiment 20000437 PARAMETER Experiment Name: At_Drought_P Parameter: Tissue Value: Whole Plant
  misc_feature: MA Experiment 20000437 PARAMETER Experiment Name: At_Drought_P Parameter: Treatment Value: Drought vs. No Drought
  misc_feature: MA Experiment ID: 20000495 Result: Up-regulated in Transcription
  misc_feature: MA Experiment 20000495 PARAMETER Experiment Name: At_Guard_Cells_P Parameter: Harvest Date Value: 8/2/2002
  misc_feature: MA Experiment 20000495 PARAMETER Experiment Name: At_Guard_Cells_P Parameter: Organism Value: A. thaliana
  misc_feature: MA Experiment 20000495 PARAMETER Experiment Name: At_Guard_Cells_P Parameter: Tissue Value: Guard Cells vs. Leaves
gtttcttcttcacactctgattctcttactatttgactctgttgttgttgttattgttgtgatatcaagagagtgggtttgagatcatgccaaattctggaaaaagtttgagtttttaattcgaatcgagaaaaaataaaaatgggttctttaggtgatgagcttagtttgggatcgatctttgggagaggagtttcgatgaatgttgtggcggttgagaaagttgatgaacatgttaagaagcttgaagaagagaagagaaagctcgaaagttgtcaacttgagcttcctctgtctttgcagattttaaacgatgcgattttgtatctgaaggataagagatgttcagagatggagactcaaccattgttgaaagatttcatttctgttaataaacctattcaaggagaaagaggaatagaattgctgaaaagagaggagctaatgagggagaagaagtttcagcaatggaaagctaatgatgatcacactagtaagatcaagagcaagcttgagattaagagaaatgaggagaaatctcctatgttgttgattccaaaggtggaaactggtttaggcctcggtttaagttcgagttcgataagaagaaaagggattgttgcctcatgtggctttacttctaactctatgccacaaccaccaacaccagcagtaccacaacaaccagcatttcttaagcagcaagctttacggaagcaaagaaggtgttggaatccagagttgcatcgccgatttgtcgatgcattgcaacagctaggtggaccgggagtggcaactcctaaacaaattagagaacatatgcaagaagaaggcttaaccaatgatgaagtcaagagtcatttacagaaatacaggttacacatcaggaagccaaattcgaatgcggagaaacaatcagcagttgttttagggtttaacttgtggaattcttcagcacaagatgaagaagagacatgtgaaggaggagaatcattgaagagaagcaatgcgcaatcagattctcctcaaggtcctttgcagttaccgtctacaacaacaacaactggtggagatagtagcatggaagatgttgaagatgctaagtctgagagctttcaactggagagattgagatcaccataaatctcaagaaaccaaactcttgatcacggttttgttattttggattcattactatatctattagtagtgaatgagaacaataattatagaaaggtttatagatatatatatagagaaaaagagagagtgaggatggttcaaattatttgcagagattatacttagccttgtttttgtaaacggctttttttggttgggtttttatttttcttgaggcattatccaatattcaagt

SEQ ID NO: 73099 - protein, 333 aa, Arabidopsis thaliana
  peptide (1)..(333): Ceres Seq. ID no. 4957819
  misc_feature (194)..(245): Pfam Name: Myb-like DNA-binding domain Pfam Description: Myb-like DNA-binding domain
  misc_feature (1)..(333): Homolog of NCBI NO: 18402692 NR Description: expressed protein; protein id: At1g49560.1, by cDNA: 2686. [Arabidopsis thaliana] >gi|25405320|pir||B96532
  misc_feature (1)..(333): Homolog of NCBI NO: 21554992 NR Description: unknown [Arabidopsis thaliana]
  misc_feature (159)..(325): Homolog of NCBI NO: 31415946 NR Description: putative Myb-like DNA-binding protein [Oryza
  misc_feature (4)..(66): Homolog of NCBI NO: 31415946 NR Description: putative Myb-like DNA-binding protein [Oryza
  misc_feature (191)..(313): Homolog of NCBI NO: 18409089 NR Description: expressed protein; protein id: At1g68670.1, by cDNA: 40196., supported by cDNA: gi_20258928 [Arabidopsis >gi|17380860|gb|AAL36242.1| unknown protein [Arabidopsis
  misc_feature (191)..(313): Homolog of NCBI NO: 25404762 NR Description: F24J5.9 [imported] - Arabidopsis thaliana
  misc_feature (191)..(313): Homolog of NCBI NO: 21593572 NR Description: unknown [Arabidopsis thaliana]
  misc_feature (25)..(85): Homolog of NCBI NO: 18409089 NR Description: expressed protein; protein id: At1g68670.1, by cDNA: 40196., supported by cDNA: gi_20258928 [Arabidopsis >gi|17380860|gb|AAL36242.1| unknown protein [Arabidopsis
  misc_feature (25)..(85): Homolog of NCBI NO: 21593572 NR Description: unknown [Arabidopsis thaliana]
  misc_feature (25)..(85): Homolog of NCBI NO: 25404762 NR Description: F24J5.9 [imported] - Arabidopsis thaliana
MGSLGDELSLGSIFGRGVSMNVVAVEKVDEHVKKLEEEKRKLESCQLELPLSLQILNDAILYLKDKRCSEMETQPLLKDFISVNKPIQGERGIELLKREELMREKKFQQWKANDDHTSKIKSKLEIKRNEEKSPMLLIPKVETGLGLGLSSSSIRRKGIVASCGFTSNSMPQPPTPAVPQQPAFLKQQALRKQRRCWNPELHRRFVDALQQLGGPGVATPKQIREHMQEEGLTNDEVKSHLQKYRLHIRKPNSNAEKQSAVVLGFNLWNSSAQDEEETCEGGESLKRSNAQSDSPQGPLQLPSTTTTTGGDSSMEDVEDAKSESFQLERLRSP

SEQ ID NO: 73100 - protein, 314 aa, Arabidopsis thaliana
  peptide (1)..(314): Ceres Seq. ID no. 4957820
  misc_feature (175)..(226): Pfam Name: Myb-like DNA-binding domain Pfam Description: Myb-like DNA-binding domain
  misc_feature (1)..(314): Homolog of NCBI NO: 18402692 NR Description: expressed protein; protein id: At1g49560.1, by cDNA: 2686. [Arabidopsis thaliana] >gi|25405320|pir||B96532
  misc_feature (1)..(314): Homolog of NCBI NO: 21554992 NR Description: unknown [Arabidopsis thaliana]
  misc_feature (140)..(306): Homolog of NCBI NO: 31415946 NR Description: putative Myb-like DNA-binding protein [Oryza
  misc_feature (1)..(47): Homolog of NCBI NO: 31415946 NR Description: putative Myb-like DNA-binding protein [Oryza
  misc_feature (172)..(294): Homolog of NCBI NO: 18409089 NR Description: expressed protein; protein id: At1g68670.1, by cDNA: 40196., supported by cDNA: gi_20258928 [Arabidopsis >gi|17380860|gb|AAL36242.1| unknown protein [Arabidopsis
  misc_feature (172)..(294): Homolog of NCBI NO: 21593572 NR Description: unknown [Arabidopsis thaliana]
  misc_feature (172)..(294): Homolog of NCBI NO: 25404762 NR Description: F24J5.9 [imported] - Arabidopsis thaliana
  misc_feature (6)..(66): Homolog of NCBI NO: 18409089 NR Description: expressed protein; protein id: At1g68670.1, by cDNA: 40196., supported by cDNA: gi_20258928 [Arabidopsis >gi|17380860|gb|AAL36242.1| unknown protein [Arabidopsis
  misc_feature (6)..(66): Homolog of NCBI NO: 25404762 NR Description: F24J5.9 [imported] - Arabidopsis thaliana
  misc_feature (6)..(66): Homolog of NCBI NO: 21593572 NR Description: unknown [Arabidopsis thaliana]
MNVVAVEKVDEHVKKLEEEKRKLESCQLELPLSLQILNDAILYLKDKRCSEMETQPLLKDFISVNKPIQGERGIELLKREELMREKKFQQWKANDDHTSKIKSKLEIKRNEEKSPMLLIPKVETGLGLGLSSSSIRRKGIVASCGFTSNSMPQPPTPAVPQQPAFLKQQALRKQRRCWNPELHRRFVDALQQLGGPGVATPKQIREHMQEEGLTNDEVKSHLQKYRLHIRKPNSNAEKQSAVVLGFNLWNSSAQDEEETCEGGESLKRSNAQSDSPQGPLQLPSTTTTTGGDSSMEDVEDAKSESFQLERLRSP

SEQ ID NO: 73101 - protein, 263 aa, Arabidopsis thaliana
  peptide (1)..(263): Ceres Seq. ID no. 4957821
  misc_feature (124)..(175): Pfam Name: Myb-like DNA-binding domain Pfam Description: Myb-like DNA-binding domain
  misc_feature (1)..(263): Homolog of NCBI NO: 18402692 NR Description: expressed protein; protein id: At1g49560.1, by cDNA: 2686. [Arabidopsis thaliana] >gi|25405320|pir||B96532
  misc_feature (1)..(263): Homolog of NCBI NO: 21554992 NR Description: unknown [Arabidopsis thaliana]
  misc_feature (89)..(255): Homolog of NCBI NO: 31415946 NR Description: putative Myb-like DNA-binding protein [Oryza
  misc_feature (121)..(243): Homolog of NCBI NO: 18409089 NR Description: expressed protein; protein id: At1g68670.1, by cDNA: 40196., supported by cDNA: gi_20258928 [Arabidopsis >gi|17380860|gb|AAL36242.1| unknown protein [Arabidopsis
  misc_feature (121)..(243): Homolog of NCBI NO: 21593572 NR Description: unknown [Arabidopsis thaliana]
  misc_feature (121)..(243): Homolog of NCBI NO: 25404762 NR Description: F24J5.9 [imported] - Arabidopsis thaliana
  misc_feature (1)..(15): Homolog of NCBI NO: 18409089 NR Description: expressed protein; protein id: At1g68670.1, by cDNA: 40196., supported by cDNA: gi_20258928 [Arabidopsis >gi|17380860|gb|AAL36242.1| unknown protein [Arabidopsis
  misc_feature (1)..(15): Homolog of NCBI NO: 25404762 NR Description: F24J5.9 [imported] - Arabidopsis thaliana
  misc_feature (1)..(15): Homolog of NCBI NO: 21593572 NR Description: unknown [Arabidopsis thaliana]
  misc_feature (121)..(253): Homolog of NCBI NO: 18419989 NR Description: putative cytoskeletal protein; protein id:
METQPLLKDFISVNKPIQGERGIELLKREELMREKKFQQWKANDDHTSKIKSKLEIKRNEEKSPMLLIPKVETGLGLGLSSSSIRRKGIVASCGFTSNSMPQPPTPAVPQQPAFLKQQALRKQRRCWNPELHRRFVDALQQLGGPGVATPKQIREHMQEEGLTNDEVKSHLQKYRLHIRKPNSNAEKQSAVVLGFNLWNSSAQDEEETCEGGESLKRSNAQSDSPQGPLQLPSTTTTTGGDSSMEDVEDAKSESFQLERLRSP

SEQ ID NO: 73102 - DNA, 1193 bp, Arabidopsis thaliana
  misc_feature (1)..(1193): Ceres Seq. ID no. 4957947
  misc_feature: MA Experiment ID: 108461 Result: Up-regulated in Transcription
  misc_feature: MA Experiment 108461 PARAMETER Experiment Name: At_Germinating_Seeds_cDNA_P Parameter: Age (day) Value: 1 vs. 0
  misc_feature: MA Experiment 108461 PARAMETER Experiment Name: At_Germinating_Seeds_cDNA_P Parameter: Tissue Value: Germinating Seeds
  misc_feature: MA Experiment ID: 108462 Result: Up-regulated in Transcription
  misc_feature: MA Experiment 108462 PARAMETER Experiment Name: At_Germinating_Seeds_cDNA_P Parameter: Age (day) Value: 2 vs. 0
  misc_feature: MA Experiment 108462 PARAMETER Experiment Name: At_Germinating_Seeds_cDNA_P Parameter: Tissue Value: Germinating Seeds
  misc_feature: MA Experiment ID: 108463 Result: Up-regulated in Transcription
  misc_feature: MA Experiment 108463 PARAMETER Experiment Name: At_Germinating_Seeds_cDNA_P Parameter: Age (day) Value: 3 vs. 0
  misc_feature: MA Experiment 108463 PARAMETER Experiment Name: At_Germinating_Seeds_cDNA_P Parameter: Tissue Value: Germinating Seeds
  misc_feature: MA Experiment ID: 108464 Result: Up-regulated in Transcription
  misc_feature: MA Experiment 108464 PARAMETER Experiment Name: At_Germinating_Seeds_cDNA_P Parameter: Age (day) Value: 4 vs. 0
  misc_feature: MA Experiment 108464 PARAMETER Experiment Name: At_Germinating_Seeds_cDNA_P Parameter: Tissue Value: Germinating Seeds
  misc_feature: MA Experiment ID: 108489 Result: Down-regulated in Transcription
  misc_feature: MA Experiment ID: 20000111 Result: Down-regulated in Transcription
  misc_feature: MA Experiment 20000111 PARAMETER Experiment Name: At_42deg_Heat_cDNA_P Parameter: Temperature (deg C) Value: 42 vs. 22
  misc_feature: MA Experiment 20000111 PARAMETER Experiment Name: At_42deg_Heat_cDNA_P Parameter: Timepoint (hr) Value: 6
  misc_feature: MA Experiment 20000111 PARAMETER Experiment Name: At_42deg_Heat_cDNA_P Parameter: Tissue Value: Aerial
  misc_feature: MA Experiment ID: 20000144 Result: Down-regulated in Transcription
  misc_feature: MA Experiment 20000144 PARAMETER Experiment Name: At_42deg_Heat_cDNA_P Parameter: Temperature (deg C) Value: 42 vs. 22
  misc_feature: MA Experiment 20000144 PARAMETER Experiment Name: At_42deg_Heat_cDNA_P Parameter: Timepoint (hr) Value: 1
  misc_feature: MA Experiment 20000144 PARAMETER Experiment Name: At_42deg_Heat_cDNA_P Parameter: Tissue Value: Aerial
  misc_feature: MA Experiment ID: 20000184 Result: Down-regulated in Transcription
  misc_feature: MA Experiment 20000184 PARAMETER Experiment Name: At_Shoots__P Parameter: Age (day) Value: 7
  misc_feature: MA Experiment 20000184 PARAMETER Experiment Name: At_Shoots__P Parameter: Tissue Value: Shoots vs. Whole Plant
  misc_feature: MA Experiment ID: 20000286 Result: Down-regulated in Transcription
  misc_feature: MA Experiment 20000286 PARAMETER Experiment Name: At_Open_Flower_P Parameter: Age (day) Value: 21
  misc_feature: MA Experiment 20000286 PARAMETER Experiment Name: At_Open_Flower_P Parameter: Plant Line Value: WS
  misc_feature: MA Experiment 20000286 PARAMETER Experiment Name: At_Open_Flower_P Parameter: Tissue Value: Half Open vs. Whole Plant
ttcttagcttcttctctctcaaccctcaaaagatcttcgtcatctctgtattcaacacatagtgatgaatcgagactaacaaaatcaaattctcttcactctgattcgcagtcatagtttaccaatttcttctaactcgcaagcaatggcttgccttggaagaaaattctccagaattggttgaattcgtttttttttcatttccagaaattttagtatgtttaagagatgcaattagtgcctagtgatgatgatgatgatagaaaggaacagattttattcgacgaatcaacatcctcaaacgaaatcgtagcagcggaaagaggagatcgtgttgtggaggaaggacaagtttcagaaatagctgagactgatgatgacgaaaccacacttcttgtttctggagatcaaccacaatgtcgaatttgccttgatgttggaggggaagatctgattgctccgtgcaattgtaaaggtactcaaaagcacgttcacagatcttgtctcgataattggcgctccaccaaggaaggttttgcattttcgcattgtacagagtgtagagcctttttcaaactccgagccaatgtgcctgctgatagatggtggttgagattgagatttcagctgctggttgctagagatcatgccttcatcttcatttctgtccagatgattgtagcattcttggggttactagtttacaagttctacggtgaagaactacgagaaatgtttggttatgaggaacatccttatgggttctacacattggctgttttggccattgtcttggtaggactgctatatggattcttcatcgccataatatgtggccaaaagatcaacgagcggcattaccatgttctcgccaaacaagaactcacaaaggaatatatagtggaagaccgcgactgcaagaatgttcctgagcttgatcagagtcatgtgatggaactaaaaatgttgggactttattgaacatatactacaagaaaagagcttgttggatctttactcttcatgtcacctgtaaattatattcttcattgatttatatggttgcttcaacgaacgattgtgtcatctccaagtggttttttgatttttttttttttttaagttgtatatcttctgatgaacatgtttatctgttcgagtatacatatcagaagtaaattggtttacaaagt

SEQ ID NO: 73103 - protein, 250 aa, Arabidopsis thaliana; identical to SEQ ID NO: 42070
  peptide (1)..(250): Ceres Seq. ID no. 4957948
  misc_feature (64)..(111): Pfam Name: Zinc finger, C3HC4 type (RING finger) Pfam Description: Zinc finger, C3HC4 type (RING finger)
  misc_feature (1)..(250): Homolog of NCBI NO: 18403075 NR Description: expressed protein; protein id: At1g50440.1, by cDNA: 126074. [Arabidopsis thaliana] >gi|25371331|pir||G96540
  misc_feature (1)..(250): Homolog of NCBI NO: 26450547 NR Description: unknown protein [Arabidopsis thaliana]
  misc_feature (59)..(192): Homolog of NCBI NO: 28393273 NR Description: unknown protein [Arabidopsis thaliana]
  misc_feature (176)..(249): Homolog of NCBI NO: 28393273 NR Description: unknown protein [Arabidopsis thaliana]
  misc_feature (59)..(154): Homolog of NCBI NO: 15227153 NR Description: hypothetical protein; protein id: At2g22120.1
  misc_feature (176)..(249): Homolog of NCBI NO: 15227153 NR Description: hypothetical protein; protein id: At2g22120.1
  misc_feature (1)..(182): Homolog of NCBI NO: 25402638 NR Description: hypothetical protein [imported] - Arabidopsis
  misc_feature (162)..(249): Homolog of NCBI NO: 25402638 NR Description: hypothetical protein [imported] - Arabidopsis
  misc_feature (46)..(150): Homolog of NCBI NO: 34912564 NR Description: P0410E03.20 [Oryza sativa (japonica
  misc_feature (184)..(249): Homolog of NCBI NO: 34912564 NR Description: P0410E03.20 [Oryza sativa (japonica

SEQ ID NO: 73104 - DNA, 771 bp, Arabidopsis thaliana
  misc_feature (1)..(771): Ceres Seq. ID no. 4958296
  misc_feature: MA Experiment ID: 20000166 Result: Up-regulated in Transcription
  misc_feature: MA Experiment 20000166 PARAMETER Experiment Name: At_100uM_ABA_P Parameter: Age (day) Value: 14
  misc_feature: MA Experiment 20000166 PARAMETER Experiment Name: At_100uM_ABA_P Parameter: Organism Value: A. thaliana
  misc_feature: MA Experiment 20000166 PARAMETER Experiment Name: At_100uM_ABA_P Parameter: Plant Line Value: WS
  misc_feature: MA Experiment 20000166 PARAMETER Experiment Name: At_100uM_ABA_P Parameter: Timepoint (hr) Value: 1
  misc_feature: MA Experiment 20000166 PARAMETER Experiment Name: At_100uM_ABA_P Parameter: Tissue Value: Aerial
  misc_feature: MA Experiment 20000166 PARAMETER Experiment Name: At_100uM_ABA_P Parameter: Treatment Value: 100uM ABA vs. No Treatment
  misc_feature: MA Experiment ID: 20000169 Result: Up-regulated in Transcription
  misc_feature: MA Experiment 20000169 PARAMETER Experiment Name: At_100uM_ABA_P Parameter: Age (day) Value: 14
  misc_feature: MA Experiment 20000169 PARAMETER Experiment Name: At_100uM_ABA_P Parameter: Organism Value: A. thaliana
  misc_feature: MA Experiment 20000169 PARAMETER Experiment Name: At_100uM_ABA_P Parameter: Plant Line Value: WS
  misc_feature: MA Experiment 20000169 PARAMETER Experiment Name: At_100uM_ABA_P Parameter: Timepoint (hr) Value: 6
  misc_feature: MA Experiment 20000169 PARAMETER Experiment Name: At_100uM_ABA_P Parameter: Tissue Value: Aerial
  misc_feature: MA Experiment 20000169 PARAMETER Experiment Name: At_100uM_ABA_P Parameter: Treatment Value: 100uM ABA vs. No Treatment
  misc_feature: MA Experiment ID: 20000184 Result: Down-regulated in Transcription
  misc_feature: MA Experiment 20000184 PARAMETER Experiment Name: At_Shoots__P Parameter: Age (day) Value: 7
  misc_feature: MA Experiment 20000184 PARAMETER Experiment Name: At_Shoots__P Parameter: Tissue Value: Shoots vs. Whole Plant
  misc_feature: MA Experiment ID: 20000214 Result: Down-regulated in Transcription
  misc_feature: MA Experiment 20000214 PARAMETER Experiment Name: At_4deg_Cold_P Parameter: Timepoint (hr) Value: 6
  misc_feature: MA Experiment ID: 20000234 Result: Down-regulated in Transcription
  misc_feature: MA Experiment 20000234 PARAMETER Experiment Name: At_Siliques_P Parameter: Age (day) Value: 21
  misc_feature: MA Experiment 20000234 PARAMETER Experiment Name: At_Siliques_P Parameter: Organism Value: A. thaliana
  misc_feature: MA Experiment 20000234 PARAMETER Experiment Name: At_Siliques_P Parameter: Plant Line Value: WS
  misc_feature: MA Experiment 20000234 PARAMETER Experiment Name: At_Siliques_P Parameter: Tissue Value: Less Than 5mm Siliques vs. Whole Plant
  misc_feature: MA Experiment ID: 20000235 Result: Down-regulated in Transcription
  misc_feature: MA Experiment 20000235 PARAMETER Experiment Name: At_Siliques_P Parameter: Age (day) Value: 21
  misc_feature: MA Experiment 20000235 PARAMETER Experiment Name: At_Siliques_P Parameter: Organism Value: A. thaliana
  misc_feature: MA Experiment 20000235 PARAMETER Experiment Name: At_Siliques_P Parameter: Plant Line Value: WS
  misc_feature: MA Experiment 20000235 PARAMETER Experiment Name: At_Siliques_P Parameter: Tissue Value: 5-10mm Siliques vs. Whole Plant
  misc_feature: MA Experiment ID: 20000265 Result: Down-regulated in Transcription
  misc_feature: MA Experiment 20000265 PARAMETER Experiment Name: At_Open_Flower_P Parameter: Age (day) Value: 21
  misc_feature: MA Experiment 20000265 PARAMETER Experiment Name: At_Open_Flower_P Parameter: Plant Line Value: WS
  misc_feature: MA Experiment 20000265 PARAMETER Experiment Name: At_Open_Flower_P Parameter: Tissue Value: Closed Flower vs. Whole Plant
  misc_feature: MA Experiment ID: 20000286 Result: Down-regulated in Transcription
  misc_feature: MA Experiment 20000286 PARAMETER Experiment Name: At_Open_Flower_P Parameter: Age (day) Value: 21
  misc_feature: MA Experiment 20000286 PARAMETER Experiment Name: At_Open_Flower_P Parameter: Plant Line Value: WS
  misc_feature: MA Experiment 20000286 PARAMETER Experiment Name: At_Open_Flower_P Parameter: Tissue Value: Half Open vs. Whole Plant
  misc_feature: MA Experiment ID: 20000436 Result: Up-regulated in Transcription
  misc_feature: MA Experiment 20000436 PARAMETER Experiment Name: At_Drought_P Parameter: Age (day) Value: 7
  misc_feature: MA Experiment 20000436 PARAMETER Experiment Name: At_Drought_P Parameter: Organism Value: A. thaliana
  misc_feature: MA Experiment 20000436 PARAMETER Experiment Name: At_Drought_P Parameter: Plant Line Value: WS
  misc_feature: MA Experiment 20000436 PARAMETER Experiment Name: At_Drought_P Parameter: Timepoint (hr) Value: 12
  misc_feature: MA Experiment 20000436 PARAMETER Experiment Name: At_Drought_P Parameter: Tissue Value: Whole Plant
  misc_feature: MA Experiment 20000436 PARAMETER Experiment Name: At_Drought_P Parameter: Treatment Value: Drought vs. No Drought
  misc_feature: MA Experiment ID: 20000437 Result: Up-regulated in Transcription
  misc_feature: MA Experiment 20000437 PARAMETER Experiment Name: At_Drought_P Parameter: Age (day) Value: 8
  misc_feature: MA Experiment 20000437 PARAMETER Experiment Name: At_Drought_P Parameter: Organism Value: A. thaliana
  misc_feature: MA Experiment 20000437 PARAMETER Experiment Name: At_Drought_P Parameter: Plant Line Value: WS
  misc_feature: MA Experiment 20000437 PARAMETER Experiment Name: At_Drought_P Parameter: Timepoint (hr) Value: 24
  misc_feature: MA Experiment 20000437 PARAMETER Experiment Name: At_Drought_P Parameter: Tissue Value: Whole Plant
  misc_feature: MA Experiment 20000437 PARAMETER Experiment Name: At_Drought_P Parameter: Treatment Value: Drought vs. No Drought
  misc_feature: MA Experiment ID: 20000453 Result: Up-regulated in Transcription
  misc_feature: MA Experiment 20000453 PARAMETER Experiment Name: At_100uM_ABA_P Parameter: Age (day) Value: 15
  misc_feature: MA Experiment 20000453 PARAMETER Experiment Name: At_100uM_ABA_P Parameter: Organism Value: A. thaliana
  misc_feature: MA Experiment 20000453 PARAMETER Experiment Name: At_100uM_ABA_P Parameter: Plant Line Value: WS
  misc_feature: MA Experiment 20000453 PARAMETER Experiment Name: At_100uM_ABA_P Parameter: Timepoint (hr) Value: 24
  misc_feature: MA Experiment 20000453 PARAMETER Experiment Name: At_100uM_ABA_P Parameter: Tissue Value: Aerial
  misc_feature: MA Experiment 20000453 PARAMETER Experiment Name: At_100uM_ABA_P Parameter: Treatment Value: 100uM ABA vs. No Treatment
  misc_feature: MA Experiment ID: 20000794 Result: Up-regulated in Transcription
  misc_feature: MA Experiment 20000794 PARAMETER Experiment Name: At_Petals_P Parameter: Age (day) Value: 23-25 days
  misc_feature: MA Experiment 20000794 PARAMETER Experiment Name: At_Petals_P Parameter: Plant Line Value: WS
  misc_feature: MA Experiment 20000794 PARAMETER Experiment Name: At_Petals_P Parameter: Tissue Value: Petals vs. Whole plant
  misc_feature: MA Experiment ID: 20001450 Result: Up-regulated in Transcription
  misc_feature: MA Experiment 20001450 PARAMETER Experiment Name: At_Far-red-induction_P Parameter: Age (day) Value: 7
  misc_feature: MA Experiment 20001450 PARAMETER Experiment Name: At_Far-red-induction_P Parameter: Light Value: Far-red vs. White
  misc_feature: MA Experiment 20001450 PARAMETER Experiment Name: At_Far-red-induction_P Parameter: Organism Value: A. thaliana
  misc_feature: MA Experiment 20001450 PARAMETER Experiment Name: At_Far-red-induction_P Parameter: Plant Line Value: Columbia
  misc_feature: MA Experiment 20001450 PARAMETER Experiment Name: At_Far-red-induction_P Parameter: Timepoint (hr) Value: 8
  misc_feature: MA Experiment 20001450 PARAMETER Experiment Name: At_Far-red-induction_P Parameter: Tissue Value: Whole Plant
  misc_feature: MA Experiment ID: 20001451 Result: Up-regulated in Transcription
  misc_feature: MA Experiment 20001451 PARAMETER Experiment Name: At_Far-red-induction_P Parameter: Age (day) Value: 7
  misc_feature: MA Experiment 20001451 PARAMETER Experiment Name: At_Far-red-induction_P Parameter: Light Value: Far-red vs. White
  misc_feature: MA Experiment 20001451 PARAMETER Experiment Name: At_Far-red-induction_P Parameter: Organism Value: A. thaliana
  misc_feature: MA Experiment 20001451 PARAMETER Experiment Name: At_Far-red-induction_P Parameter: Plant Line Value: Columbia
  misc_feature: MA Experiment 20001451 PARAMETER Experiment Name: At_Far-red-induction_P Parameter: Timepoint (hr) Value: 24
  misc_feature: MA Experiment 20001451 PARAMETER Experiment Name: At_Far-red-induction_P Parameter: Tissue Value: Whole Plant
  misc_feature: MA Experiment ID: 20001554 Result: Up-regulated in Transcription
  misc_feature: MA Experiment 20001554 PARAMETER Experiment Name: At_Drought_Soil_Dry_P Parameter: Age (day) Value: 21
  misc_feature: MA Experiment 20001554 PARAMETER Experiment Name: At_Drought_Soil_Dry_P Parameter: Organism Value: A. thaliana
  misc_feature: MA Experiment 20001554 PARAMETER Experiment Name: At_Drought_Soil_Dry_P Parameter: Plant Line Value: WS
  misc_feature: MA Experiment 20001554 PARAMETER Experiment Name: At_Drought_Soil_Dry_P Parameter: Post Timepoint (hr) Value: None
  misc_feature: MA Experiment 20001554 PARAMETER Experiment Name: At_Drought_Soil_Dry_P Parameter: Post-Treatment Value: None
  misc_feature: MA Experiment 20001554 PARAMETER Experiment Name: At_Drought_Soil_Dry_P Parameter: Timepoint (day) Value: 7
  misc_feature: MA Experiment 20001554 PARAMETER Experiment Name: At_Drought_Soil_Dry_P Parameter: Treatment Value: Drought vs. No Drought
  misc_feature: MA Experiment ID: 20001555 Result: Up-regulated in Transcription
  misc_feature: MA Experiment 20001555 PARAMETER Experiment Name: At_Drought_Soil_Dry_P Parameter: Age (day) Value: 24
  misc_feature: MA Experiment 20001555 PARAMETER Experiment Name: At_Drought_Soil_Dry_P Parameter: Organism Value: A. thaliana
  misc_feature: MA Experiment 20001555 PARAMETER Experiment Name: At_Drought_Soil_Dry_P Parameter: Plant Line Value: WS
  misc_feature: MA Experiment 20001555 PARAMETER Experiment Name: At_Drought_Soil_Dry_P Parameter: Post Timepoint (hr) Value: None
  misc_feature: MA Experiment 20001555 PARAMETER Experiment Name: At_Drought_Soil_Dry_P Parameter: Post-Treatment Value: None
  misc_feature: MA Experiment 20001555 PARAMETER Experiment Name: At_Drought_Soil_Dry_P Parameter: Timepoint (day) Value: 10
  misc_feature: MA Experiment 20001555 PARAMETER Experiment Name: At_Drought_Soil_Dry_P Parameter: Treatment Value: Drought vs. No Drought
  misc_feature: MA Experiment ID: 20001559 Result: Up-regulated in Transcription
  misc_feature: MA Experiment 20001559 PARAMETER Experiment Name: At_Drought_Soil_Dry_P Parameter: Age (day) Value: 28
  misc_feature: MA Experiment 20001559 PARAMETER Experiment Name: At_Drought_Soil_Dry_P Parameter: Organism Value: A. thaliana
  misc_feature: MA Experiment 20001559 PARAMETER Experiment Name: At_Drought_Soil_Dry_P Parameter: Plant Line Value: WS
  misc_feature: MA Experiment 20001559 PARAMETER Experiment Name: At_Drought_Soil_Dry_P Parameter: Post Timepoint (hr) Value: 29
  misc_feature: MA Experiment 20001559 PARAMETER Experiment Name: At_Drought_Soil_Dry_P Parameter: Post-Treatment Value: Re-Water vs. No Drought
  misc_feature: MA Experiment 20001559 PARAMETER Experiment Name: At_Drought_Soil_Dry_P Parameter: Timepoint (day) Value: 14
  misc_feature: MA Experiment 20001559 PARAMETER Experiment Name: At_Drought_Soil_Dry_P Parameter: Treatment Value: Drought vs. No Drought
  misc_feature: MA Experiment ID: 20001904 Result: Up-regulated in Transcription
  misc_feature: MA Experiment 20001904 PARAMETER Experiment Name: At_Drought_Reproduction_P Parameter: Age (day) Value: 37
  misc_feature: MA Experiment 20001904 PARAMETER Experiment Name: At_Drought_Reproduction_P Parameter: Organism Value: A. thaliana
  misc_feature: MA Experiment 20001904 PARAMETER Experiment Name: At_Drought_Reproduction_P Parameter: Plant Line Value: WS
  misc_feature: MA Experiment 20001904 PARAMETER Experiment Name: At_Drought_Reproduction_P Parameter: Timepoint (day) Value: 7
  misc_feature: MA Experiment 20001904 PARAMETER Experiment Name: At_Drought_Reproduction_P Parameter: Tissue Value: Rosettes
  misc_feature: MA Experiment 20001904 PARAMETER Experiment Name: At_Drought_Reproduction_P Parameter: Treatment Value: Drought vs. No Drought
  misc_feature: MA Experiment ID: 20001905 Result: Up-regulated in Transcription
  misc_feature: MA Experiment 20001905 PARAMETER Experiment Name: At_Drought_Reproduction_P Parameter: Age (day) Value: 40
  misc_feature: MA Experiment 20001905 PARAMETER Experiment Name: At_Drought_Reproduction_P Parameter: Organism Value: A. thaliana
  misc_feature: MA Experiment 20001905 PARAMETER Experiment Name: At_Drought_Reproduction_P Parameter: Plant Line Value: WS
  misc_feature: MA Experiment 20001905 PARAMETER Experiment Name: At_Drought_Reproduction_P Parameter: Timepoint (day) Value: 10
  misc_feature: MA Experiment 20001905 PARAMETER Experiment Name: At_Drought_Reproduction_P Parameter: Tissue Value: Rosettes
  misc_feature: MA Experiment 20001905 PARAMETER Experiment Name: At_Drought_Reproduction_P Parameter: Treatment Value: Drought vs. No Drought
  misc_feature: MA Experiment ID: 20001911 Result: Up-regulated in Transcription
  misc_feature: MA Experiment 20001911 PARAMETER Experiment Name: At_Drought_Reproduction_P Parameter: Age (day) Value: 40
  misc_feature: MA Experiment 20001911 PARAMETER Experiment Name: At_Drought_Reproduction_P Parameter: Organism Value: A. thaliana
  misc_feature: MA Experiment 20001911 PARAMETER Experiment Name: At_Drought_Reproduction_P Parameter: Plant Line Value: WS
  misc_feature: MA Experiment 20001911 PARAMETER Experiment Name: At_Drought_Reproduction_P Parameter: Timepoint (day) Value: 10
  misc_feature: MA Experiment 20001911 PARAMETER Experiment Name: At_Drought_Reproduction_P Parameter: Tissue Value: Flowers
  misc_feature: MA Experiment 20001911 PARAMETER Experiment Name: At_Drought_Reproduction_P Parameter: Treatment Value: Drought vs. No Drought
atgggttcgtcttcttctttctcctcttcttcctcgaagcttctctttcgtcaactctttgagaacgaatcttccacctttacttatcttctcgccgacgtttctcatcctgataaacctgctttgttgattgatccggtggacaagactgtggatagagacttgaaactgattgatgagttaggactaaagcttatctatgctatgaacactcatgttcatgctgatcatgtcactggtactggacttcttaagacgaagctcccgggtgtgaaatccgttatttcgaaagcaagtggttccaaagctgatttgtttcttgaacctggtgacaaagtatctattggtgatatataccttgaggttcgtgctacacctggacacactgcaggatgtgttacatatgtgactggtgaaggagctgatcagccccaaccaagaatggcttttaccggggatgctgtactcatccgtggttgtgggaggactgactttcaggaaggaagctcagatcaactctacgagtctgtacattcacagatatttacattgccaaaggacacattgatctatcctgctcacgactacaaaggtttcgaggtaagtacagttggagaagagatgcaacacaacccgcgtctaactaaagataaagaaacattcaaaaccattatgtcaaatctgaatctgtcgtatccgaagatgattgatgttgcagtaccagcaaatatggtctgtgggttacaagatgtgccttctcaagccaactaa

SEQ ID NO: 73105 - protein, 256 aa, Arabidopsis thaliana; identical to SEQ ID NO: 28790
  peptide (1)..(256): Ceres Seq. ID no. 4958297
  misc_feature (25)..(194): Pfam Name: Metallo-beta-lactamase superfamily Pfam Description: Metallo-beta-lactamase superfamily
  misc_feature (1)..(256): Homolog of NCBI NO: 18404530 NR Description: glyoxalase II, putative (hydroxyacylglutathione protein id: At1g53580.1, supported by cDNA: gi_15450394, by cDNA: gi_1644426, supported by cDNA: gi_16648756 [Arabidopsis
  misc_feature (1)..(256): Homolog of NCBI NO: 25405648 NR Description: probable glyoxalase II, 78941-80643 [imported] -
  misc_feature (1)..(256): Homolog of NCBI NO: 1644427 NR Description: glyoxalase II [Arabidopsis thaliana]
  misc_feature (1)..(201): Homolog of NCBI NO: 8671869 NR Description: Contains similarity to an unknown glyoxalase II
  misc_feature (200)..(256): Homolog of NCBI NO: 8671869 NR Description: Contains similarity to an unknown glyoxalase II
  misc_feature (2)..(252): Homolog of NCBI NO: 34910930 NR Description: putative glyoxalase II [Oryza sativa (japonica group)] >gi|20161580|dbj|BAB90501.1| putative glyoxalase II
  misc_feature (6)..(250): Homolog of NCBI NO: 27371293 NR Description: Similar to RIKEN cDNA 0610025L15 gene [Xenopus
  misc_feature (5)..(253): Homolog of NCBI NO: 12963539 NR Description: HSCO protein [Mus musculus] HSCO protein [Mus musculus] >gi|14714875|gb|AAH10592.1| RIKEN
  misc_feature (5)..(249): Homolog of NCBI NO: 14198377 NR Description: Similar to RIKEN cDNA 0610025L15 gene [Homo
  misc_feature (5)..(253): Homolog of NCBI NO: 27676450 NR Description: similar to HSCO protein [Mus musculus] [Rattus

SEQ ID NO: 73106 - protein, 188 aa, Arabidopsis thaliana
  peptide (1)..(188): Ceres Seq. ID no. 4958298
  misc_feature (1)..(126): Pfam Name: Metallo-beta-lactamase superfamily Pfam Description: Metallo-beta-lactamase superfamily
  misc_feature (1)..(188): Homolog of NCBI NO: 18404530 NR Description: glyoxalase II, putative (hydroxyacylglutathione protein id: At1g53580.1, supported by cDNA: gi_15450394, by cDNA: gi_1644426, supported by cDNA: gi_16648756 [Arabidopsis
  misc_feature (1)..(188): Homolog of NCBI NO: 25405648 NR Description: probable glyoxalase II, 78941-80643 [imported] -
  misc_feature (1)..(188): Homolog of NCBI NO: 1644427 NR Description: glyoxalase II [Arabidopsis thaliana]
  misc_feature (1)..(133): Homolog of NCBI NO: 8671869 NR Description: Contains similarity to an unknown glyoxalase II
  misc_feature (132)..(188): Homolog of NCBI NO: 8671869 NR Description: Contains similarity to an unknown glyoxalase II
  misc_feature (1)..(184): Homolog of NCBI NO: 34910930 NR Description: putative glyoxalase II [Oryza sativa (japonica group)] >gi|20161580|dbj|BAB90501.1| putative glyoxalase II
  misc_feature (1)..(182): Homolog of NCBI NO: 27371293 NR Description: Similar to RIKEN cDNA 0610025L15 gene [Xenopus
  misc_feature (1)..(185): Homolog of NCBI NO: 12963539 NR Description: HSCO protein [Mus musculus] HSCO protein [Mus musculus] >gi|14714875|gb|AAH10592.1| RIKEN
  misc_feature (1)..(181): Homolog of NCBI NO: 14198377 NR Description: Similar to RIKEN cDNA 0610025L15 gene [Homo
  misc_feature (1)..(185): Homolog of NCBI NO: 27676450 NR Description: similar to HSCO protein [Mus musculus] [Rattus
MNTHVHADHVTGTGLLKTKLPGVKSVISKASGSKADLFLEPGDKVSIGDIYLEVRATPGHTAGCVTYVTGEGADQPQPRMAFTGDAVLIRGCGRTDFQEGSSDQLYESVHSQIFTLPKDTLIYPAHDYKGFEVSTVGEEMQHNPRLTKDKETFKTIMSNLNLSYPKMIDVAVPANMVCGLQDVPSQAN

SEQ ID NO: 73107 - DNA, 1395 bp, Arabidopsis thaliana
  misc_feature (1)..(1395): Ceres Seq. ID no. 4958420
  misc_feature: MA Experiment ID: 20000307 Result: Down-regulated in Transcription
  misc_feature: MA Experiment 20000307 PARAMETER Experiment Name: At_Germinating_Seeds_Sub_P Parameter: Age (hr) Value: 24 vs. 0
  misc_feature: MA Experiment 20000307 PARAMETER Experiment Name: At_Germinating_Seeds_Sub_P Parameter: Organism Value: A. thaliana
  misc_feature: MA Experiment 20000307 PARAMETER Experiment Name: At_Germinating_Seeds_Sub_P Parameter: Plant Line Value: WS
  misc_feature: MA Experiment 20000307 PARAMETER Experiment Name: At_Germinating_Seeds_Sub_P Parameter: Tissue Value: Germinating Seeds
atgatcataagagatattatggaggatcctgagaatgagggcccccacaatatgcgttcagactttgaacctctcttatcagtgctccgcctccgggattacgagacaggtgacatcatagagtttgatagtacagaggcaagtgaagaagcgctttctgacattacagagtttgggagtacggaggcaagtgaagcacattttgaggagccttactctgcacgcataaagaaagtagagaaagaaatcaatgagctcgccgagaagatctgcaatcttggtatcaaggagtccgatactggtttagctcctcccaatcaatgggatcttgtatctgataagcaaatgatgcaagaggagcaacctctgcttgttgcgacatgcacacagataatcagtccaaacactgaagatgcaaagtatgtcgttgatatcaaaaagataggcaagtatgttgttggacttggcgataaagcttctcccactgacatagaagcaggaatgcgtgtgggagttgatcagaagaaatatcagatacagattcctctacctccaaagattgatcctagtgtgaccatgatgacggttgaagagaaacctgatgcaacttacagtgatatcggtggctgcaaggagcagattgagaagattagagaggtcgttgaactgccaatgcttcatccagagaaatttgtgaggcttggaatagatcctcccaagggtgttctttgctatggtcctcctggtagcggaaaaacccttgtcgctagagctgtggcgaatagaactggtgcttgctttatcagggttgttggcagtgagctcgttcagaagtacattggtgaaggagctaggatggttcgtgaactgtttcagatggcacggtcaaagaaagcttgcattttgttctttgacgaaattgatgccattggcggtgcaagatttgatgacggtgtaggcagtgataatgaagtccaacgtaccatgcttgagattttgtatcagcttgatgggtttgacgcacgtggtaacatcaaggttcttatggcaacaaacaggcctgacatactagacccagctcttttacgtcctggacgtcttgaccgcaaggttgagttttgtctgcctgatctggagggcagaacacagatcttcaagattcacacacgaacaatgagttgtgaaagagacatccggtttgaactccttgctggcctctgcccaaactcaaccggagctgatatcagaagtgtatgcatagaagccggaatgtatgcaatcggagctaggagaaagtctgtgactgagaaggactttctggacgcagtgaacaaagttgttaaaggttatcaaaagttcagtgcaacacccaagtatatggcctactacatttag

SEQ ID NO: 73108 - protein, 464 aa, Arabidopsis thaliana
  peptide (1)..(464): Ceres Seq. ID no. 4958421
  misc_feature (241)..(428): Pfam Name: ATPase family associated with various cellular Pfam Description: ATPase family associated with various cellular
  misc_feature (1)..(464): Homolog of NCBI NO: 15220933 NR Description: 26S proteasome ATPase subunit, putative; protein
  misc_feature (33)..(464): Homolog of NCBI NO: 25289951 NR Description: hypothetical protein T18A20.2 [imported] - thaliana >gi|6056389|gb|AAF02853.1|AC009324_2 Putative 26S
  misc_feature (71)..(462): Homolog of NCBI NO: 28558165 NR Description: 26S protease regulatory subunit 7 (26S proteasome
  misc_feature (71)..(462): Homolog of NCBI NO: 15220930 NR Description: 26S proteasome AAA-ATPase subunit RPT1a; protein At1g53750.1, supported by cDNA: 36419., supported by cDNA: supported by cDNA: gi_6652877 [Arabidopsis thaliana] (26S
  misc_feature (71)..(462): Homolog of NCBI NO: 6652878 NR Description: 26S proteasome AAA-ATPase subunit RPT1a
  misc_feature (71)..(462): Homolog of NCBI NO: 2492519 NR Description: 26S protease regulatory subunit 7 (26S proteasome
  misc_feature (71)..(462): Homolog of NCBI NO: 3914449 NR Description: 26S protease regulatory subunit 7 (26S proteasome
  misc_feature (26)..(462): Homolog of NCBI NO: 33859604 NR Description: proteasome (prosome, macropain) 26S subunit,
  misc_feature (33)..(462): Homolog of NCBI NO: 1172640 NR Description: 26S PROTEASE REGULATORY SUBUNIT 7 (MSS1 PROTEIN)
  misc_feature (33)..(462): Homolog of NCBI NO: 27735425 NR Description: similar to proteasome (prosome, macropain) 26S
MIIRDIMEDPENEGPHNMRSDFEPLLSVLRLRDYETGDIIEFDSTEASEEALSDITEFGSTEASEAHFEEPYSARIKKVEKEINELAEKICNLGIKESDTGLAPPNQWDLVSDKQMMQEEQPLLVATCTQIISPNTEDAKYVVDIKKIGKYVVGLGDKASPTDIEAGMRVGVDQKKYQIQIPLPPKIDPSVTMMTVEEKPDATYSDIGGCKEQIEKIREVVELPMLHPEKFVRLGIDPPKGVLCYGPPGSGKTLVARAVANRTGACFIRVVGSELVQKYIGEGARMVRELFQMARSKKACILFFDEIDAIGGARFDDGVGSDNEVQRTMLEILYQLDGFDARGNIKVLMATNRPDILDPALLRPGRLDRKVEFCLPDLEGRTQIFKIHTRTMSCERDIRFELLAGLCPNSTGADIRSVCIEAGMYAIGARRKSVTEKDFLDAVNKVVKGYQKFSATPKYMAYYI

SEQ ID NO: 73109 - protein, 458 aa, Arabidopsis thaliana
  peptide (1)..(458): Ceres Seq. ID no. 4958422
  misc_feature (235)..(422): Pfam Name: ATPase family associated with various cellular Pfam Description: ATPase family associated with various cellular
  misc_feature (1)..(458): Homolog of NCBI NO: 15220933 NR Description: 26S proteasome ATPase subunit, putative; protein
  misc_feature (27)..(458): Homolog of NCBI NO: 25289951 NR Description: hypothetical protein T18A20.2 [imported] - thaliana >gi|6056389|gb|AAF02853.1|AC009324_2 Putative 26S
  misc_feature (65)..(456): Homolog of NCBI NO: 28558165 NR Description: 26S protease regulatory subunit 7 (26S proteasome
  misc_feature (65)..(456): Homolog of NCBI NO: 15220930 NR Description: 26S proteasome AAA-ATPase subunit RPT1a; protein At1g53750.1, supported by cDNA: 36419., supported by cDNA: supported by cDNA: gi_6652877 [Arabidopsis thaliana] (26S
  misc_feature (65)..(456): Homolog of NCBI NO: 6652878 NR Description: 26S proteasome AAA-ATPase subunit RPT1a
  misc_feature (65)..(456): Homolog of NCBI NO: 2492519 NR Description: 26S protease regulatory subunit 7 (26S proteasome
  misc_feature (65)..(456): Homolog of NCBI NO: 3914449 NR Description: 26S protease regulatory subunit 7 (26S proteasome
  misc_feature (20)..(456): Homolog of NCBI NO: 33859604 NR Description: proteasome (prosome, macropain) 26S subunit,
  misc_feature (27)..(456): Homolog of NCBI NO: 1172640 NR Description: 26S PROTEASE REGULATORY SUBUNIT 7 (MSS1 PROTEIN)
  misc_feature (27)..(456): Homolog of NCBI NO: 27735425 NR Description: similar to proteasome (prosome, macropain) 26S
MEDPENEGPHNMRSDFEPLLSVLRLRDYETGDIIEFDSTEASEEALSDITEFGSTEASEAHFEEPYSARIKKVEKEINELAEKICNLGIKESDTGLAPPNQWDLVSDKQMMQEEQPLLVATCTQIISPNTEDAKYVVDIKKIGKYVVGLGDKASPTDIEAGMRVGVDQKKYQIQIPLPPKIDPSVTMMTVEEKPDATYSDIGGCKEQIEKIREVVELPMLHPEKFVRLGIDPPKGVLCYGPPGSGKTLVARAVANRTGACFIRVVGSELVQKYIGEGARMVRELFQMARSKKACILFFDEIDAIGGARFDDGVGSDNEVQRTMLEILYQLDGFDARGNIKVLMATNRPDILDPALLRPGRLDRKVEFCLPDLEGRTQIFKIHTRTMSCERDIRFELLAGLCPNSTGADIRSVCIEAGMYAIGARRKSVTEKDFLDAVNKVVKGYQKFSATPKYMAYYI

SEQ ID NO: 73110 - protein, 447 aa, Arabidopsis thaliana
  peptide (1)..(447): Ceres Seq. ID no. 4958423
  misc_feature (224)..(411): Pfam Name: ATPase family associated with various cellular Pfam Description: ATPase family associated with various cellular
  misc_feature (1)..(447): Homolog of NCBI NO: 15220933 NR Description: 26S proteasome ATPase subunit, putative; protein
  misc_feature (16)..(447): Homolog of NCBI NO: 25289951 NR Description: hypothetical protein T18A20.2 [imported] - thaliana >gi|6056389|gb|AAF02853.1|AC009324_2 Putative 26S
  misc_feature (54)..(445): Homolog of NCBI NO: 28558165 NR Description: 26S protease regulatory subunit 7 (26S proteasome
  misc_feature (54)..(445): Homolog of NCBI NO: 15220930 NR Description: 26S proteasome AAA-ATPase subunit RPT1a; protein At1g53750.1, supported by cDNA: 36419., supported by cDNA: supported by cDNA: gi_6652877 [Arabidopsis thaliana] (26S
  misc_feature (54)..(445): Homolog of NCBI NO: 6652878 NR Description: 26S proteasome AAA-ATPase subunit RPT1a
  misc_feature (54)..(445): Homolog of NCBI NO: 2492519 NR Description: 26S protease regulatory subunit 7 (26S proteasome
  misc_feature (54)..(445): Homolog of NCBI NO: 3914449 NR Description: 26S protease regulatory subunit 7 (26S proteasome
  misc_feature (9)..(445): Homolog of NCBI NO: 33859604 NR Description: proteasome (prosome, macropain) 26S subunit,
  misc_feature (16)..(445): Homolog of NCBI NO: 1172640 NR Description: 26S PROTEASE REGULATORY SUBUNIT 7 (MSS1 PROTEIN)
  misc_feature (16)..(445): Homolog of NCBI NO: 27735425 NR Description: similar to proteasome (prosome, macropain) 26S
MRSDFEPLLSVLRLRDYETGDIIEFDSTEASEEALSDITEFGSTEASEAHFEEPYSARIKKVEKEINELAEKICNLGIKESDTGLAPPNQWDLVSDKQMMQEEQPLLVATCTQIISPNTEDAKYVVDIKKIGKYVVGLGDKASPTDIEAGMRVGVDQKKYQIQIPLPPKIDPSVTMMTVEEKPDATYSDIGGCKEQIEKIREVVELPMLHPEKFVRLGIDPPKGVLCYGPPGSGKTLVARAVANRTGACFIRVVGSELVQKYIGEGARMVRELFQMARSKKACILFFDEIDAIGGARFDDGVGSDNEVQRTMLEILYQLDGFDARGNIKVLMATNRPDILDPALLRPGRLDRKVEFCLPDLEGRTQIFKIHTRTMSCERDIRFELLAGLCPNSTGADIRSVCIEAGMYAIGARRKSVTEKDFLDAVNKVVKGYQKFSATPKYMAYYI

SEQ ID NO: 73111 - DNA, 2265 bp, Arabidopsis thaliana
  misc_feature (1)..(2265): Ceres Seq. ID no. 4958676
  misc_feature: MA Experiment ID: 20000180 Result: Down-regulated in Transcription
  misc_feature: MA Experiment 20000180 PARAMETER Experiment Name: At_Germinating_Seeds_P Parameter: Age (hr) Value: 24 vs. 0
  misc_feature: MA Experiment 20000180 PARAMETER Experiment Name: At_Germinating_Seeds_P Parameter: Tissue Value: Germinating Seeds
  misc_feature: MA Experiment ID: 20000182 Result: Up-regulated in Transcription
  misc_feature: MA Experiment 20000182 PARAMETER Experiment Name: At_2mM_SA_P Parameter: Age (day) Value: 14
  misc_feature: MA Experiment 20000182 PARAMETER Experiment Name: At_2mM_SA_P Parameter: Organism Value: A. thaliana
  misc_feature: MA Experiment 20000182 PARAMETER Experiment Name: At_2mM_SA_P Parameter: Plant Line Value: WS
  misc_feature: MA Experiment 20000182 PARAMETER Experiment Name: At_2mM_SA_P Parameter: Timepoint (hr) Value: 6
  misc_feature: MA Experiment 20000182 PARAMETER Experiment Name: At_2mM_SA_P Parameter: Tissue Value: Aerial
  misc_feature: MA Experiment 20000182 PARAMETER Experiment Name: At_2mM_SA_P Parameter: Treatment Value: 2mM SA vs. No Treatment
  misc_feature: MA Experiment ID: 20000185 Result: Up-regulated in Transcription
  misc_feature: MA Experiment 20000185 PARAMETER Experiment Name: At_Roots__P Parameter: Age (day) Value: 7 vs. 21
  misc_feature: MA Experiment 20000185 PARAMETER Experiment Name: At_Roots__P Parameter: Organism Value: A. thaliana
  misc_feature: MA Experiment 20000185 PARAMETER Experiment Name: At_Roots__P Parameter: Tissue Value: Roots vs. Whole Plant
  misc_feature: MA Experiment ID: 20000436 Result: Up-regulated in Transcription
  misc_feature: MA Experiment 20000436 PARAMETER Experiment Name: At_Drought_P Parameter: Age (day) Value: 7
  misc_feature: MA Experiment 20000436 PARAMETER Experiment Name: At_Drought_P Parameter: Organism Value: A. thaliana
  misc_feature: MA Experiment 20000436 PARAMETER Experiment Name: At_Drought_P Parameter: Plant Line Value: WS
  misc_feature: MA Experiment 20000436 PARAMETER Experiment Name: At_Drought_P Parameter: Timepoint (hr) Value: 12
  misc_feature: MA Experiment 20000436 PARAMETER Experiment Name: At_Drought_P Parameter: Tissue Value: Whole Plant
  misc_feature: MA Experiment 20000436 PARAMETER Experiment Name: At_Drought_P Parameter: Treatment Value: Drought vs. No Drought
  misc_feature: MA Experiment ID: 20000437 Result: Up-regulated in Transcription
  misc_feature: MA Experiment 20000437 PARAMETER Experiment Name: At_Drought_P Parameter: Age (day) Value: 8
  misc_feature: MA Experiment 20000437 PARAMETER Experiment Name: At_Drought_P Parameter: Organism Value: A. thaliana
  misc_feature: MA Experiment 20000437 PARAMETER Experiment Name: At_Drought_P Parameter: Plant Line Value: WS
  misc_feature: MA Experiment 20000437 PARAMETER Experiment Name: At_Drought_P Parameter: Timepoint (hr) Value: 24
  misc_feature: MA Experiment 20000437 PARAMETER Experiment Name: At_Drought_P Parameter: Tissue Value: Whole Plant
  misc_feature: MA Experiment 20000437 PARAMETER Experiment Name: At_Drought_P Parameter: Treatment Value: Drought vs. No Drought
  misc_feature: MA Experiment ID: 20000439 Result: Up-regulated in Transcription
  misc_feature: MA Experiment 20000439 PARAMETER Experiment Name: At_Roots__P Parameter: Age (day) Value: 14 vs. 21
  misc_feature: MA Experiment 20000439 PARAMETER Experiment Name: At_Roots__P Parameter: Organism Value: A. thaliana
  misc_feature: MA Experiment 20000439 PARAMETER Experiment Name: At_Roots__P Parameter: Tissue Value: Roots vs. Whole Plant
  misc_feature: MA Experiment ID: 20000794 Result: Up-regulated in Transcription
  misc_feature: MA Experiment 20000794 PARAMETER Experiment Name: At_Petals_P Parameter: Age (day) Value: 23-25 days
  misc_feature: MA Experiment 20000794 PARAMETER Experiment Name: At_Petals_P Parameter: Plant Line Value: WS
  misc_feature: MA Experiment 20000794 PARAMETER Experiment Name: At_Petals_P Parameter: Tissue Value: Petals vs. Whole plant
  misc_feature: Pfam Name: Raffinose_syn Pfam Description: Raffinose synthase or seed imbibition protein Sip1
atgaccgttggtgccggaatcagcgtcaccgactcagatttggtggtgctaggtcaccgtgttcttcacggcgttccggagaatgtcttagttaccccagcttcgggaaacgccttaatcgacggcgcgttcatcggcgtcacgtcagatcaaaccggaagccaccgtgtcttctcccttggcaaactcgaagacctaaggtttatgtgtgtcttccggtttaaattatggtggatgactcaaagaatggggactaatgggaaagagattccttgtgagactcagtttctaatcgtagaagcaaaccaaggttctgatttaggaggaagagatcaatcttcttcgtacgttgtattcttacctatacttgaaggagattttagagctgttcttcaagggaacgaggctaatgagctagagatttgtcttgaaagtggtgatccaaccgttgaccaattcgaagggagtcatttggtttttgtggctgctggctccgacccttttgatgtcattaccaaagctgtcaaggctgttgaacaacatcttcaaacattttcacaccgagagagaaagaaaatgccagatatgttgaattggtttggttggtgcacttgggatgcattctataccaatgtcacagccaaagacgtcaagcaaggacttgagagcctcaaagctggtggggttaccccaaagtttgtcataattgatgatggatggcaatctgttggcatggatgagaccagtgtagaattcaacgctgataatgctgccaattttgcaaaccggttaactcacatcaaggagaatcataagtttcaaaaggatggcaaagaaggccaccgggtggatgacccttcattgagtcttggacatgttatcacagacattaagagtaataattcgctcaagtatgtttatgtttggcatgcgataacaggatattggggaggagtcaaaccaggtgtttctggtatggaacactacgaatccaaggttgcgtatccagtttcttcaccaggagttatgtccagtgagaattgtggatgtttagaaagcataactaagaatggacttggtttggtgaatcctgagaaagtctttagcttctataatgatcttcactcataccttgcatccgttggggtcgatggtgtcaaagtagacgtccaaaacattcttgaaactcttggagctggacatggtggtcgtgtcaaacttgcaaagaagtatcaccaggctttggaagcttctatttcaagaaacttccctgacaatggtattatctcttgcatgagtcataacacagatggtctctacagcgcaaaaaagactgctgttataagagcatcagacgatttctggcctagagaccccgcttcacacacgatccacattgcttctgttgcatataacacacttttccttggagagtttatgcagccggactgggacatgtttcatagtttgcatccgatggctgaatatcatgctgcagctcgcgcggttggaggatgtgccatatatgtcagcgacaaaccgggacaacatgacttcaaccttttaagaaagctagtacttcgagacggttccatactcagagcaaagcttcccggaagaccaaccagtgattgcttcttcagtgatccagtcagagacaataaaagtcttctgaaaatatggaacctgaacgaattcactggcgttattggagttttcaactgccaaggcgctggatggtgtaagaacgagaagagatacctaatccatgaccaagaacctgggaccatttctggttgtgtccgaaccaatgatgttcattatcttcataaagtagcagcctttgaatggacaggagattccattgtctattcccatctcagaggagagttagtgtatctcccaaaagatacatctttaccagtgacattgatgccacgtgaatacgaagttttcacggtggttccggtgaaggaattttccgatggaagtaaatttgcaccggtggggcttatggagatgtttaattctggaggagccattgtgagtttaagatacgatgacgaggggactaaatttgtcgttaggatgaaacttcgaggcagtggtttggttggtgtttactcgtccgttcgacgaccacgaagtgttacggtggattcagacgacgtggagtaccggtatgaaccggaatccggtttagttacgtttactttaggagttccggagaaagaattgtatctgtgggacgtggtcatccaataa

SEQ ID NO: 73112 - protein, 754 aa, Arabidopsis thaliana
  peptide (1)..(754): Ceres Seq. ID no. 4958677
  misc_feature: Pfam Name: Raffinose_syn Pfam Description: Raffinose synthase or seed imbibition protein Sip1
  misc_feature (1)..(754): Homolog of NCBI NO: 23452226 NR Description: alkaline alpha-galactosidase seed imbibition
  misc_feature (1)..(754): Homolog of NCBI NO: 29838629 NR Description: alkaline alpha galactosidase I [Cucumis melo]
  misc_feature (1)..(684): Homolog of NCBI NO: 15230330 NR Description: glycosyl hydrolase family 36; protein id: supported by cDNA: gi_15292676 [Arabidopsis thaliana]
  misc_feature (687)..(753): Homolog of NCBI NO: 15230330 NR Description: glycosyl hydrolase family 36; protein id: supported by cDNA: gi_15292676 [Arabidopsis thaliana]
  misc_feature (1)..(684): Homolog of NCBI NO: 15292677 NR Description: putative imbibition protein homolog [Arabidopsis
  misc_feature (687)..(753): Homolog of NCBI NO: 15292677 NR Description: putative imbibition protein homolog [Arabidopsis
  misc_feature (1)..(681): Homolog of NCBI NO: 29838631 NR Description: alkaline alpha galactosidase II [Cucumis melo]
  misc_feature (687)..(754): Homolog of NCBI NO: 29838631 NR Description: alkaline alpha galactosidase II [Cucumis melo]
  misc_feature (1)..(753): Homolog of NCBI NO: 629602 NR Description: probable imbibition protein - wild cabbage
  misc_feature (1)..(747): Homolog of NCBI NO: 282994 NR Description: Sip1 protein - barley >gi|167100|gb|AAA32975.1|
MTVGAGISVTDSDLVVLGHRVLHGVPENVLVTPASGNALIDGAFIGVTSDQTGSHRVFSLGKLEDLRFMCVFRFKLWWMTQRMGTNGKEIPCETQFLIVEANQGSDLGGRDQSSSYVVFLPILEGDFRAVLQGNEANELEICLESGDPTVDQFEGSHLVFVAAGSDPFDVITKAVKAVEQHLQTFSHRERKKMPDMLNWFGWCTWDAFYTNVTAKDVKQGLESLKAGGVTPKFVIIDDGWQSVGMDETSVEFNADNAANFANRLTHIKENHKFQKDGKEGHRVDDPSLSLGHVITDIKSNNSLKYVYVWHAITGYWGGVKPGVSGMEHYESKVAYPVSSPGVMSSENCGCLESITKNGLGLVNPEKVFSFYNDLHSYLASVGVDGVKVDVQNILETLGAGHGGRVKLAKKYHQALEASISRNFPDNGIISCMSHNTDGLYSAKKTAVIRASDDFWPRDPASHTIHIASVAYNTLFLGEFMQPDWDMFHSLHPMAEYHAAARAVGGCAIYVSDKPGQHDFNLLRKLVLRDGSILRAKLPGRPTSDCFFSDPVRDNKSLLKIWNLNEFTGVIGVFNCQGAGWCKNEKRYLIHDQEPGTISGCVRTNDVHYLHKVAAFEWTGDSIVYSHLRGELVYLPKDTSLPVTLMPREYEVFTVVPVKEFSDGSKFAPVGLMEMFNSGGAIVSLRYDDEGTKFVVRMKLRGSGLVGVYSSVRRPRSVTVDSDDVEYRYEPESGLVTFTLGVPEKELYLWDVVIQ

SEQ ID NO: 73113 - protein, 686 aa, Arabidopsis thaliana
  peptide (1)..(686): Ceres Seq. ID no. 4958678
  misc_feature: Pfam Name: Raffinose_syn Pfam Description: Raffinose synthase or seed imbibition protein Sip1
  misc_feature (1)..(686): Homolog of NCBI NO: 23452226 NR Description: alkaline alpha-galactosidase seed imbibition
  misc_feature (1)..(686): Homolog of NCBI NO: 29838629 NR Description: alkaline alpha galactosidase I [Cucumis melo]
  misc_feature (1)..(616): Homolog of NCBI NO: 15230330 NR Description: glycosyl hydrolase family 36; protein id: supported by cDNA: gi_15292676 [Arabidopsis thaliana]
  misc_feature (619)..(685): Homolog of NCBI NO: 15230330 NR Description: glycosyl hydrolase family 36; protein id: supported by cDNA: gi_15292676 [Arabidopsis thaliana]
  misc_feature (1)..(616): Homolog of NCBI NO: 15292677 NR Description: putative imbibition protein homolog [Arabidopsis
  misc_feature (619)..(685): Homolog of NCBI NO: 15292677 NR Description: putative imbibition protein homolog [Arabidopsis
  misc_feature (1)..(613): Homolog of NCBI NO: 29838631 NR Description: alkaline alpha galactosidase II [Cucumis melo]
  misc_feature (619)..(686): Homolog of NCBI NO: 29838631 NR Description: alkaline alpha galactosidase II [Cucumis melo]
  misc_feature (1)..(685): Homolog of NCBI NO: 629602 NR Description: probable imbibition protein - wild cabbage
  misc_feature (1)..(679): Homolog of NCBI NO: 282994 NR Description: Sip1 protein - barley >gi|167100|gb|AAA32975.1|
MCVFRFKLWWMTQRMGTNGKEIPCETQFLIVEANQGSDLGGRDQSSSYVVFLPILEGDFRAVLQGNEANELEICLESGDPTVDQFEGSHLVFVAAGSDPFDVITKAVKAVEQHLQTFSHRERKKMPDMLNWFGWCTWDAFYTNVTAKDVKQGLESLKAGGVTPKFVIIDDGWQSVGMDETSVEFNADNAANFANRLTHIKENHKFQKDGKEGHRVDDPSLSLGHVITDIKSNNSLKYVYVWHAITGYWGGVKPGVSGMEHYESKVAYPVSSPGVMSSENCGCLESITKNGLGLVNPEKVFSFYNDLHSYLASVGVDGVKVDVQNILETLGAGHGGRVKLAKKYHQALEASISRNFPDNGIISCMSHNTDGLYSAKKTAVIRASDDFWPRDPASHTIHIASVAYNTLFLGEFMQPDWDMFHSLHPMAEYHAAARAVGGCAIYVSDKPGQHDFNLLRKLVLRDGSILRAKLPGRPTSDCFFSDPVRDNKSLLKIWNLNEFTGVIGVFNCQGAGWCKNEKRYLIHDQEPGTISGCVRTNDVHYLHKVAAFEWTGDSIVYSHLRGELVYLPKDTSLPVTLMPREYEVFTVVPVKEFSDGSKFAPVGLMEMFNSGGAIVSLRYDDEGTKFVVRMKLRGSGLVGVYSSVRRPRSVTVDSDDVEYRYEPESGLVTFTLGVPEKELYLWDVVIQ

SEQ ID NO: 73114 - protein, 676 aa, Arabidopsis thaliana
  peptide (1)..(676): Ceres Seq. ID no. 4958679
  misc_feature: Pfam Name: Raffinose_syn Pfam Description: Raffinose synthase or seed imbibition protein Sip1
  misc_feature (1)..(676): Homolog of NCBI NO: 23452226 NR Description: alkaline alpha-galactosidase seed imbibition
  misc_feature (1)..(676): Homolog of NCBI NO: 29838629 NR Description: alkaline alpha galactosidase I [Cucumis melo]
  misc_feature (1)..(606): Homolog of NCBI NO: 15230330 NR Description: glycosyl hydrolase family 36; protein id: supported by cDNA: gi_15292676 [Arabidopsis thaliana]
  misc_feature (609)..(675): Homolog of NCBI NO: 15230330 NR Description: glycosyl hydrolase family 36; protein id: supported by cDNA: gi_15292676 [Arabidopsis thaliana]
  misc_feature (1)..(606): Homolog of NCBI NO: 15292677 NR Description: putative imbibition protein homolog [Arabidopsis
  misc_feature (609)..(675): Homolog of NCBI NO: 15292677 NR Description: putative imbibition protein homolog [Arabidopsis
  misc_feature (1)..(603): Homolog of NCBI NO: 29838631 NR Description: alkaline alpha galactosidase II [Cucumis melo]
  misc_feature (609)..(676): Homolog of NCBI NO: 29838631 NR Description: alkaline alpha galactosidase II [Cucumis melo]
  misc_feature (1)..(675): Homolog of NCBI NO: 629602 NR Description: probable imbibition protein - wild cabbage
  misc_feature (1)..(669): Homolog of NCBI NO: 282994 NR Description: Sip1 protein - barley >gi|167100|gb|AAA32975.1|
MTQRMGTNGKEIPCETQFLIVEANQGSDLGGRDQSSSYVVFLPILEGDFRAVLQGNEANELEICLESGDPTVDQFEGSHLVFVAAGSDPFDVITKAVKAVEQHLQTFSHRERKKMPDMLNWFGWCTWDAFYTNVTAKDVKQGLESLKAGGVTPKFVIIDDGWQSVGMDETSVEFNADNAANFANRLTHIKENHKFQKDGKEGHRVDDPSLSLGHVITDIKSNNSLKYVYVWHAITGYWGGVKPGVSGMEHYESKVAYPVSSPGVMSSENCGCLESITKNGLGLVNPEKVFSFYNDLHSYLASVGVDGVKVDVQNILETLGAGHGGRVKLAKKYHQALEASISRNFPDNGIISCMSHNTDGLYSAKKTAVIRASDDFWPRDPASHTIHIASVAYNTLFLGEFMQPDWDMFHSLHPMAEYHAAARAVGGCAIYVSDKPGQHDFNLLRKLVLRDGSILRAKLPGRPTSDCFFSDPVRDNKSLLKIWNLNEFTGVIGVFNCQGAGWCKNEKRYLIHDQEPGTISGCVRTNDVHYLHKVAAFEWTGDSIVYSHLRGELVYLPKDTSLPVTLMPREYEVFTVVPVKEFSDGSKFAPVGLMEMFNSGGAIVSLRYDDEGTKFVVRMKLRGSGLVGVYSSVRRPRSVTVDSDDVEYRYEPESGLVTFTLGVPEKELYLWDVVIQ

SEQ ID NO: 73115 - DNA, 984 bp, Arabidopsis thaliana
  misc_feature (1)..(984): Ceres Seq. ID no. 4958714
  misc_feature: MA Experiment ID: 20000185 Result: Up-regulated in Transcription
  misc_feature: MA Experiment 20000185 PARAMETER Experiment Name: At_Roots__P Parameter: Age (day) Value: 7 vs. 21
  misc_feature: MA Experiment 20000185 PARAMETER Experiment Name: At_Roots__P Parameter: Organism Value: A. thaliana
  misc_feature: MA Experiment 20000185 PARAMETER Experiment Name: At_Roots__P Parameter: Tissue Value: Roots vs. Whole Plant
  misc_feature: MA Experiment ID: 20000234 Result: Up-regulated in Transcription
  misc_feature: MA Experiment 20000234 PARAMETER Experiment Name: At_Siliques_P Parameter: Age (day) Value: 21
  misc_feature: MA Experiment 20000234 PARAMETER Experiment Name: At_Siliques_P Parameter: Organism Value: A. thaliana
  misc_feature: MA Experiment 20000234 PARAMETER Experiment Name: At_Siliques_P Parameter: Plant Line Value: WS
  misc_feature: MA Experiment 20000234 PARAMETER Experiment Name: At_Siliques_P Parameter: Tissue Value: Less Than 5mm Siliques vs. Whole Plant
  misc_feature: MA Experiment ID: 20000264 Result: Up-regulated in Transcription
  misc_feature: MA Experiment 20000264 PARAMETER Experiment Name: At_Open_Flower_P Parameter: Age (day) Value: 21
  misc_feature: MA Experiment 20000264 PARAMETER Experiment Name: At_Open_Flower_P Parameter: Plant Line Value: WS
  misc_feature: MA Experiment 20000264 PARAMETER Experiment Name: At_Open_Flower_P Parameter: Tissue Value: Open Flower vs. Whole Plant
  misc_feature: MA Experiment ID: 20000265 Result: Up-regulated in Transcription
  misc_feature: MA Experiment 20000265 PARAMETER Experiment Name: At_Open_Flower_P Parameter: Age (day) Value: 21
  misc_feature: MA Experiment 20000265 PARAMETER Experiment Name: At_Open_Flower_P Parameter: Plant Line Value: WS
  misc_feature: MA Experiment 20000265 PARAMETER Experiment Name: At_Open_Flower_P Parameter: Tissue Value: Closed Flower vs. Whole Plant
  misc_feature: MA Experiment ID: 20000439 Result: Up-regulated in Transcription
  misc_feature: MA Experiment 20000439 PARAMETER Experiment Name: At_Roots__P Parameter: Age (day) Value: 14 vs. 21
  misc_feature: MA Experiment 20000439 PARAMETER Experiment Name: At_Roots__P Parameter: Organism Value: A. thaliana
  misc_feature: MA Experiment 20000439 PARAMETER Experiment Name: At_Roots__P Parameter: Tissue Value: Roots vs. Whole Plant
  misc_feature: MA Experiment ID: 20000794 Result: Up-regulated in Transcription
  misc_feature: MA Experiment 20000794 PARAMETER Experiment Name: At_Petals_P Parameter: Age (day) Value: 23-25 days
  misc_feature: MA Experiment 20000794 PARAMETER Experiment Name: At_Petals_P Parameter: Plant Line Value: WS
  misc_feature: MA Experiment 20000794 PARAMETER Experiment Name: At_Petals_P Parameter: Tissue Value: Petals vs. Whole plant
atgtctcaaagcggcggtgacttcaacctctccgacgagattctcgccgtgattcccaccgacccttatgatcaactcgacctcgccaggaagatcacttccatggctatcgcttcaagggtttcgaatctggaatctcaagtctccggcttgagacagaagcttcttgagaaggatcggcttgttcatgaacttgaagacagagtctcttcctttgaaagactttaccatgaagctgactcgagtttgaagaatgttgtcgatgaaaatatgaaactgactcaagaacgagattcactggcaatcactgcgaagaaactcggtcgtgattatgcaaagttggaagcattcaagagacaattgatgcagtcattgaatgatgataatccatctcaaactgagactgctgatgtcagaatggttcctcgaggcaaagtctcttcaagagttgcttgttctgatgttatttactctgtatgcattgtagatgagaattcaaatggatcctactcaaacaatgaaggtttaagtgaagcgaggcaaagacagtctatgactccgcagttctctcccgcgtttacaccaagcggaacaccaaagatcttatctactgctgcttctccgagaagctactctgctgcttcatcgccaaagctattctctggagctgcatctccaacatcttcacattatgatatacgtatgtggtcttcaactagccagcaatcttcagtagcaaactctcctccacgctcgcattctgtttcagctcggcatccgcggattgatgggaaagagttctttagacaagccaggagccgtttgtcttacgaacagttcagtgcattcctggctaacatcaaggaacttaacgcccggaagcagggccgcgaggaaacattacagaaagcagaggaaatatttggaaaggaaaacaatgatctttacatatcctttaagggacttctcacaagtgggcgttga

SEQ ID NO: 73116 - protein, 327 aa, Arabidopsis thaliana
  peptide (1)..(327): Ceres Seq. ID no. 4958715
  misc_feature (1)..(327): Homolog of NCBI NO: 15222835 NR Description: hypothetical protein; protein id: At1g56080.1
  misc_feature (62)..(256): Homolog of NCBI NO: 25404089 NR Description: hypothetical protein T6H22.12 [imported] - thaliana >gi|6056378|gb|AAF02842.1|AC009894_13 Hypothetical
  misc_feature (7)..(323): Homolog of NCBI NO: 30684901 NR Description: expressed protein [Arabidopsis thaliana] ESTs gb|N38586 and gb|N38613 come from this gene. [Arabidopsis >gi|26452357|dbj|BAC43264.1| unknown protein [Arabidopsis
  misc_feature (1)..(113): Homolog of NCBI NO: 25404089 NR Description: hypothetical protein T6H22.12 [imported] - thaliana >gi|6056378|gb|AAF02842.1|AC009894_13 Hypothetical
  misc_feature (8)..(324): Homolog of NCBI NO: 18414476 NR Description: Expressed protein; protein id: At4g15545.1, by cDNA: 307., supported by cDNA: gi_14517355, supported by cDNA: supported by cDNA: gi_16323275 [Arabidopsis thaliana] thaliana]
  misc_feature (10)..(143): Homolog of NCBI NO: 34909876 NR Description: B1143G03.2 [Oryza sativa (japonica
  misc_feature (181)..(281): Homolog of NCBI NO: 34909876 NR Description: B1143G03.2 [Oryza sativa (japonica
  misc_feature (44)..(323): Homolog of NCBI NO: 38344261 NR Description: OSJNBa0008M17.14 [Oryza sativa (japonica
  misc_feature (4)..(298): Homolog of NCBI NO: 7485048 NR Description: hypothetical protein - Arabidopsis thaliana hypothetical protein [Arabidopsis thaliana]
  misc_feature (7)..(249): Homolog of NCBI NO: 38344261 NR Description: OSJNBa0008M17.14 [Oryza sativa (japonica
MSQSGGDFNLSDEILAVIPTDPYDQLDLARKITSMAIASRVSNLESQVSGLRQKLLEKDRLVHELEDRVSSFERLYHEADSSLKNVVDENMKLTQERDSLAITAKKLGRDYAKLEAFKRQLMQSLNDDNPSQTETADVRMVPRGKVSSRVACSDVIYSVCIVDENSNGSYSNNEGLSEARQRQSMTPQFSPAFTPSGTPKILSTAASPRSYSAASSPKLFSGAASPTSSHYDIRMWSSTSQQSSVANSPPRSHSVSARHPRIDGKEFFRQARSRLSYEQFSAFLANIKELNARKQGREETLQKAEEIFGKENNDLYISFKGLLTSGR

SEQ ID NO: 73117 - protein, 293 aa, Arabidopsis thaliana
  peptide (1)..(293): Ceres Seq. ID no. 4958716
  misc_feature (1)..(293): Homolog of NCBI NO: 15222835 NR Description: hypothetical protein; protein id: At1g56080.1
  misc_feature (28)..(222): Homolog of NCBI NO: 25404089 NR Description: hypothetical protein T6H22.12 [imported] - thaliana >gi|6056378|gb|AAF02842.1|AC009894_13 Hypothetical
  misc_feature (1)..(289): Homolog of NCBI NO: 30684901 NR Description: expressed protein [Arabidopsis thaliana] ESTs gb|N38586 and gb|N38613 come from this gene. [Arabidopsis >gi|26452357|dbj|BAC43264.1| unknown protein [Arabidopsis
  misc_feature (1)..(79): Homolog of NCBI NO: 25404089 NR Description: hypothetical protein T6H22.12 [imported] - thaliana >gi|6056378|gb|AAF02842.1|AC009894_13 Hypothetical
  misc_feature (1)..(290): Homolog of NCBI NO: 18414476 NR Description: Expressed protein; protein id: At4g15545.1, by cDNA: 307., supported by cDNA: gi_14517355, supported by cDNA: supported by cDNA: gi_16323275 [Arabidopsis thaliana] thaliana]
  misc_feature (1)..(109): Homolog of NCBI NO: 34909876 NR Description: B1143G03.2 [Oryza sativa (japonica
  misc_feature (147)..(247): Homolog of NCBI NO: 34909876 NR Description: B1143G03.2 [Oryza sativa (japonica
  misc_feature (10)..(289): Homolog of NCBI NO: 38344261 NR Description: OSJNBa0008M17.14 [Oryza sativa (japonica
  misc_feature (1)..(264): Homolog of NCBI NO: 7485048 NR Description: hypothetical protein - Arabidopsis thaliana hypothetical protein [Arabidopsis thaliana]
  misc_feature (1)..(215): Homolog of NCBI NO: 38344261 NR Description: OSJNBa0008M17.14 [Oryza sativa (japonica
MAIASRVSNLESQVSGLRQKLLEKDRLVHELEDRVSSFERLYHEADSSLKNVVDENMKLTQERDSLAITAKKLGRDYAKLEAFKRQLMQSLNDDNPSQTETADVRMVPRGKVSSRVACSDVIYSVCIVDENSNGSYSNNEGLSEARQRQSMTPQFSPAFTPSGTPKILSTAASPRSYSAASSPKLFSGAASPTSSHYDIRMWSSTSQQSSVANSPPRSHSVSARHPRIDGKEFFRQARSRLSYEQFSAFLANIKELNARKQGREETLQKAEEIFGKENNDLYISFKGLLTSGR

SEQ ID NO: 73118 - protein, 237 aa, Arabidopsis thaliana
  peptide (1)..(237): Ceres Seq. ID no. 4958717
  misc_feature (1)..(237): Homolog of NCBI NO: 15222835 NR Description: hypothetical protein; protein id: At1g56080.1
  misc_feature (1)..(166): Homolog of NCBI NO: 25404089 NR Description: hypothetical protein T6H22.12 [imported] - thaliana >gi|6056378|gb|AAF02842.1|AC009894_13 Hypothetical
  misc_feature (1)..(233): Homolog of NCBI NO: 30684901 NR Description: expressed protein [Arabidopsis thaliana] ESTs gb|N38586 and gb|N38613 come from this gene. [Arabidopsis >gi|26452357|dbj|BAC43264.1| unknown protein [Arabidopsis
  misc_feature (1)..(23): Homolog of NCBI NO: 25404089 NR Description: hypothetical protein T6H22.12 [imported] - thaliana >gi|6056378|gb|AAF02842.1|AC009894_13 Hypothetical
  misc_feature (1)..(234): Homolog of NCBI NO: 18414476 NR Description: Expressed protein; protein id: At4g15545.1, by cDNA: 307., supported by cDNA: gi_14517355, supported by cDNA: supported by cDNA: gi_16323275 [Arabidopsis thaliana] thaliana]
  misc_feature (1)..(53): Homolog of NCBI NO: 34909876 NR Description: B1143G03.2 [Oryza sativa (japonica
  misc_feature (91)..(191): Homolog of NCBI NO: 34909876 NR Description: B1143G03.2 [Oryza sativa (japonica
  misc_feature (1)..(233): Homolog of NCBI NO: 38344261 NR Description: OSJNBa0008M17.14 [Oryza sativa (japonica
  misc_feature (1)..(208): Homolog of NCBI NO: 7485048 NR Description: hypothetical protein - Arabidopsis thaliana hypothetical protein [Arabidopsis thaliana]
  misc_feature (1)..(159): Homolog of NCBI NO: 38344261 NR Description: OSJNBa0008M17.14 [Oryza sativa (japonica
MKLTQERDSLAITAKKLGRDYAKLEAFKRQLMQSLNDDNPSQTETADVRMVPRGKVSSRVACSDVIYSVCIVDENSNGSYSNNEGLSEARQRQSMTPQFSPAFTPSGTPKILSTAASPRSYSAASSPKLFSGAASPTSSHYDIRMWSSTSQQSSVANSPPRSHSVSARHPRIDGKEFFRQARSRLSYEQFSAFLANIKELNARKQGREETLQKAEEIFGKENNDLYISFKGLLTSGR

SEQ ID NO: 73119 - DNA, 3138 bp, Arabidopsis thaliana
  misc_feature (1)..(3138): Ceres Seq. ID no. 4958718
  misc_feature: MA Experiment ID: 20000315 Result: Down-regulated in Transcription
  misc_feature: MA Experiment 20000315 PARAMETER Experiment Name: At_14day_Shoots-Roots_Sub_P Parameter: Age (day) Value: 14
  misc_feature: MA Experiment 20000315 PARAMETER Experiment Name: At_14day_Shoots-Roots_Sub_P Parameter: Organism Value: A. thaliana
  misc_feature: MA Experiment 20000315 PARAMETER Experiment Name: At_14day_Shoots-Roots_Sub_P Parameter: Plant Line Value: WS
  misc_feature: MA Experiment 20000315 PARAMETER Experiment Name: At_14day_Shoots-Roots_Sub_P Parameter: Tissue Value: Shoots vs. Whole Plant
  misc_feature: MA Experiment ID: 20000327 Result: Down-regulated in Transcription
  misc_feature: MA Experiment 20000327 PARAMETER Experiment Name: At_42deg_Heat_Sub_P Parameter: Age (day) Value: 14
  misc_feature: MA Experiment 20000327 PARAMETER Experiment Name: At_42deg_Heat_Sub_P Parameter: Organism Value: A. thaliana
  misc_feature: MA Experiment 20000327 PARAMETER Experiment Name: At_42deg_Heat_Sub_P Parameter: Plant Line Value: WS
  misc_feature: MA Experiment 20000327 PARAMETER Experiment Name: At_42deg_Heat_Sub_P Parameter: Temperature (deg C) Value: 42 vs. 22
  misc_feature: MA Experiment 20000327 PARAMETER Experiment Name: At_42deg_Heat_Sub_P Parameter: Timepoint (hr) Value: 1
  misc_feature: MA Experiment 20000327 PARAMETER Experiment Name: At_42deg_Heat_Sub_P Parameter: Tissue Value: Aerial
  misc_feature: MA Experiment ID: 20000328 Result: Down-regulated in Transcription
  misc_feature: MA Experiment 20000328 PARAMETER Experiment Name: At_42deg_Heat_Sub_P Parameter: Age (day) Value: 14
  misc_feature: MA Experiment 20000328 PARAMETER Experiment Name: At_42deg_Heat_Sub_P Parameter: Organism Value: A. thaliana
  misc_feature: MA Experiment 20000328 PARAMETER Experiment Name: At_42deg_Heat_Sub_P Parameter: Plant Line Value: WS
  misc_feature: MA Experiment 20000328 PARAMETER Experiment Name: At_42deg_Heat_Sub_P Parameter: Temperature (deg C) Value: 42 vs. 22
  misc_feature: MA Experiment 20000328 PARAMETER Experiment Name: At_42deg_Heat_Sub_P Parameter: Timepoint (hr) Value: 6
  misc_feature: MA Experiment 20000328 PARAMETER Experiment Name: At_42deg_Heat_Sub_P Parameter: Tissue Value: Aerial
  misc_feature: MA Experiment ID: 20000347 Result: Up-regulated in Transcription
  misc_feature: MA Experiment 20000347 PARAMETER Experiment Name: At_2mM_SA_Sub_P Parameter: Age (day) Value: 14
  misc_feature: MA Experiment 20000347 PARAMETER Experiment Name: At_2mM_SA_Sub_P Parameter: Organism Value: A. thaliana
  misc_feature: MA Experiment 20000347 PARAMETER Experiment Name: At_2mM_SA_Sub_P Parameter: Plant Line Value: WS
  misc_feature: MA Experiment 20000347 PARAMETER Experiment Name: At_2mM_SA_Sub_P Parameter: Timepoint (hr) Value: 6
  misc_feature: MA Experiment 20000347 PARAMETER Experiment Name: At_2mM_SA_Sub_P Parameter: Tissue Value: Aerial
  misc_feature: MA Experiment 20000347 PARAMETER Experiment Name: At_2mM_SA_Sub_P Parameter: Treatment Value: 2mM SA vs. No Treatment
  misc_feature: MA Experiment ID: 20000355 Result: Down-regulated in Transcription
  misc_feature: MA Experiment 20000355 PARAMETER Experiment Name: At_Siliques_Sub_P Parameter: Age (day) Value: 21
  misc_feature: MA Experiment 20000355 PARAMETER Experiment Name: At_Siliques_Sub_P Parameter: Organism Value: A. thaliana
  misc_feature: MA Experiment 20000355 PARAMETER Experiment Name: At_Siliques_Sub_P Parameter: Plant Line Value: WS
  misc_feature: MA Experiment 20000355 PARAMETER Experiment Name: At_Siliques_Sub_P Parameter: Tissue Value: Less Than 5mm Siliques vs. Whole Plant
  misc_feature: Pfam Name: Pkinase Pfam Description: Protein kinase domain
atggttcgagcccaaaaccgaaccagacccactactcatcccgacgatgcgcgagctttgaactccatcttcgcggcttggaagattcgggcgccgagggaatggaacatcagcggcgaactttgctccggcgtcgccatcgacgccagtgtactcgactcaaaccatgcctacaatcctctcatcaaatgcgactgtagtttccaaaactccacaatctgccgcataaataacataaaggtttatgcgatagatgttgtaggacctatacctccagagctctggaccttaacatacctcaccaatctgctcactgtctcctgctattgggaatttgactcggatgcagtggatgtaaaagcctctgaaaccttgacttttggaatcaacgcgttgtctggccctattcctaaggaaatcggtttgcttacggatttaagattacttggtattagttcaaataacttttccggttccttaccagctgagattgggagttgtacaaaactacagcaaatgtacatcgatagttctggactcagcggaggaatacctttatcatttgctaattttgtggagttggaagtcgcttggattatggatgtggaacttacaggtcggataccagactttataggattctggaccaaacttactaccttgaggatcctcggaactggtttgagcggcccaataccgtcgtcattttccaacttaattgctttgacagaactgaggcttggtgatatatccaatggaagctcttctcttgatttcatcaaagacatgaaatctctaagtgtattagtattgaggaacaacaatctcactgggacaataccgtctactattggaggatacacaagtttgcaacaagttgatttgagcttcaacaaattacatggaccaattccggcttcacttttcaacttaagtcgacttactcacttgtttctgggaaacaacacgttgaatggatccttgcccactctaaaggggcagtctctgagcaatttagatgtgtcgtacaatgatttgtctggaagtcttccttcatgggtcagcttaccagatttgaagctcaatctagttgctaacaacttcacactggaaggtcttgacaacagggttttatcaggactacattgcctgcagaagaacttcccctgcaatcgaggcgaaggaatctgtaagtgtaacaaaaagataccctcacaaattatgttctccatgttgaatgtgcaaacatatggacagggctccaatgtcttattggaaaaaaattgttttaagactttcgctattgactggtgtctagattataacttttcgatcaactgcggaggcccagagataaggtctgttagtggagcactatttgaaaaggaggacgcggatcttggaccagcttcgtttgttgtgagtgctgcaaagagatgggcagccagtagtgtaggaaattttgctggcagtagcaacaatatatacatagctacttcactagcacaatttatcaacactatggactcagagctttttcagtcagcacgactttctgcatcttccctaaggtattatgggttggggctagaaaatggagggtacaccgtaacacttcagtttgctgaagtacaaattgaaggttctaactcttggaaaggtattggaagacgacgttttaacatttatgtccagggaagacttgttgaaaaggattttgatatacgcagaacagctggtggctcttcggttcgagcagttcagagagaatataaaacaaatgtatcagaaaatcatctcgaagtccatcttttctgggctggaaaaggaacatgttgtattcctatccaaggggcttatgggccattaatagcggccgtcagtgcgacaccagatttcacaccaactgtggctaataggccaccatcaaagggaaagagcaggactggtactattgtgggtgtcattgttggtgttggacttttgagcatctttgcgggtgtggttatcctcgtcattcgaaaaagaagaaaaccgtacacagatgatgaagagatacttagtatggacgtaaagccttacacctttacttactcggaacttaagaatgcaacacaagattttgatctctcaaacaagcttggagagggagggtttggggctgtttataagggaaacctcaatgatggaagagaggtggcggtgaagcagttgtcaattggatcacggcaagggaagggacaatttgttgcagaaattattgcaatttcttcagttctacatcgcaacctagtaaaactttacgggtgctgctttgaaggagatcatcgtttgctcgtatatgagtatctccctaatggaagtctcgatcaggcattatttggggataagagtttgcatcttgattggtcaacccgttatgagatatgtctgggagtagccagaggtctagtttatctccacgaggaagcaagtgttcgcataatacacagagatgtgaaggccagcaacattttactggactctgaactggtcccaaaagtttctgattttgggcttgcaaaactatatgatgacaagaaaacccatattagtaccagagtggcagggacgattgggtatcttgcgccagagtatgccatgcgtggacatctaacagagaaaacagatgtgtatgcctttggtgttgtggctcttgagctagtgagtggaaggaaaaactctgatgagaacctggaagagggaaaaaaatatcttcttgaatgggcatggaatctacacgagaaaaaccgtgacgttgaactaatagatgatgagctaagtgaatacaacatggaagaagtgaaacgcatgattggcattgctctgctttgcactcagtcatcttatgcgttgagaccaccaatgtcacgagtagtagccatgttgtcaggagatgctgaggtcaatgatgccacctctaagccaggctacctaaccgactgtacatttgatgacaccacaagctcctcattcagcaactttcaaacgaaagacactagcttctcgacgagctttatagcgcctggcccggagatgccacttagagacggcgaatcgaagccaatggttggattcaagatcaaggagggaagatga

SEQ ID NO: 73120 - protein, 1045 aa, Arabidopsis thaliana
  peptide (1)..(1045): Ceres Seq. ID no. 4958719
  misc_feature: Pfam Name: Pkinase Pfam Description: Protein kinase domain
  misc_feature (106)..(1045): Homolog of NCBI NO: 15223460 NR Description: receptor-like protein kinase, putative; protein
  misc_feature (106)..(1045): Homolog of NCBI NO: 25404097 NR Description: probable receptor protein kinase F14G9.24 - Arabidopsis thaliana >gi|12321749|gb|AAG50909.1|AC069159_10
  misc_feature (106)..(1045): Homolog of NCBI NO: 18405700 NR Description: similar to receptor-like protein kinase,
  misc_feature (441)..(1034): Homolog of NCBI NO: 6056375 NR Description: Similar to serine/threonine kinases [Arabidopsis
  misc_feature (1)..(245): Homolog of NCBI NO: 6056375 NR Description: Similar to serine/threonine kinases [Arabidopsis
  misc_feature (125)..(284): Homolog of NCBI NO: 6056375 NR Description: Similar to serine/threonine kinases [Arabidopsis
  misc_feature (116)..(330): Homolog of NCBI NO: 6056375 NR Description: Similar to serine/threonine kinases [Arabidopsis
  misc_feature (132)..(1034): Homolog of NCBI NO: 18405703 NR Description: receptor protein kinase, putative; protein id:
  misc_feature (202)..(396): Homolog of NCBI NO: 6056375 NR Description: Similar to serine/threonine kinases [Arabidopsis
  misc_feature (132)..(1038): Homolog of NCBI NO: 25404097 NR Description: probable receptor protein kinase F14G9.24 - Arabidopsis thaliana >gi|12321749|gb|AAG50909.1|AC069159_10
MVRAQNRTRPTTHPDDARALNSIFAAWKIRAPREWNISGELCSGVAIDASVLDSNHAYNPLIKCDCSFQNSTICRINNIKVYAIDVVGPIPPELWTLTYLTNLLTVSCYWEFDSDAVDVKASETLTFGINALSGPIPKEIGLLTDLRLLGISSNNFSGSLPAEIGSCTKLQQMYIDSSGLSGGIPLSFANFVELEVAWIMDVELTGRIPDFIGFWTKLTTLRILGTGLSGPIPSSFSNLIALTELRLGDISNGSSSLDFIKDMKSLSVLVLRNNNLTGTIPSTIGGYTSLQQVDLSFNKLHGPIPASLFNLSRLTHLFLGNNTLNGSLPTLKGQSLSNLDVSYNDLSGSLPSWVSLPDLKLNLVANNFTLEGLDNRVLSGLHCLQKNFPCNRGEGICKCNKKIPSQIMFSMLNVQTYGQGSNVLLEKNCFKTFAIDWCLDYNFSINCGGPEIRSVSGALFEKEDADLGPASFVVSAAKRWAASSVGNFAGSSNNIYIATSLAQFINTMDSELFQSARLSASSLRYYGLGLENGGYTVTLQFAEVQIEGSNSWKGIGRRRFNIYVQGRLVEKDFDIRRTAGGSSVRAVQREYKTNVSENHLEVHLFWAGKGTCCIPIQGAYGPLIAAVSATPDFTPTVANRPPSKGKSRTGTIVGVIVGVGLLSIFAGVVILVIRKRRKPYTDDEEILSMDVKPYTFTYSELKNATQDFDLSNKLGEGGFGAVYKGNLNDGREVAVKQLSIGSRQGKGQFVAEIIAISSVLHRNLVKLYGCCFEGDHRLLVYEYLPNGSLDQALFGDKSLHLDWSTRYEICLGVARGLVYLHEEASVRIIHRDVKASNILLDSELVPKVSDFGLAKLYDDKKTHISTRVAGTIGYLAPEYAMRGHLTEKTDVYAFGVVALELVSGRKNSDENLEEGKKYLLEWAWNLHEKNRDVELIDDELSEYNMEEVKRMIGIALLCTQSSYALRPPMSRVVAMLSGDAEVNDATSKPGYLTDCTFDDTTSSSFSNFQTKDTSFSTSFIAPGPEMPLRDGESKPMVGFKIKEGR

SEQ ID NO: 73121 - protein, 873 aa, Arabidopsis thaliana
  peptide (1)..(873): Ceres Seq. ID no. 4958720
  misc_feature: Pfam Name: Pkinase Pfam Description: Protein kinase domain
  misc_feature (1)..(873): Homolog of NCBI NO: 15223460 NR Description: receptor-like protein kinase, putative; protein
  misc_feature (1)..(873): Homolog of NCBI NO: 25404097 NR Description: probable receptor protein kinase F14G9.24 - Arabidopsis thaliana >gi|12321749|gb|AAG50909.1|AC069159_10
  misc_feature (1)..(873): Homolog of NCBI NO: 18405700 NR Description: similar to receptor-like protein kinase,
  misc_feature (269)..(862): Homolog of NCBI NO: 6056375 NR Description: Similar to serine/threonine kinases [Arabidopsis
  misc_feature (1)..(73): Homolog of NCBI NO: 6056375 NR Description: Similar to serine/threonine kinases [Arabidopsis
  misc_feature (1)..(112): Homolog of NCBI NO: 6056375 NR Description: Similar to serine/threonine kinases [Arabidopsis
  misc_feature (1)..(158): Homolog of NCBI NO: 6056375 NR Description: Similar to serine/threonine kinases [Arabidopsis
  misc_feature (1)..(862): Homolog of NCBI NO: 18405703 NR Description: receptor protein kinase, putative; protein id:
  misc_feature (30)..(224): Homolog of NCBI NO: 6056375 NR Description: Similar to serine/threonine kinases [Arabidopsis
  misc_feature (1)..(866): Homolog of NCBI NO: 25404097 NR Description: probable receptor protein kinase F14G9.24 - Arabidopsis thaliana >gi|12321749|gb|AAG50909.1|AC069159_10
MYIDSSGLSGGIPLSFANFVELEVAWIMDVELTGRIPDFIGFWTKLTTLRILGTGLSGPIPSSFSNLIALTELRLGDISNGSSSLDFIKDMKSLSVLVLRNNNLTGTIPSTIGGYTSLQQVDLSFNKLHGPIPASLFNLSRLTHLFLGNNTLNGSLPTLKGQSLSNLDVSYNDLSGSLPSWVSLPDLKLNLVANNFTLEGLDNRVLSGLHCLQKNFPCNRGEGICKCNKKIPSQIMFSMLNVQTYGQGSNVLLEKNCFKTFAIDWCLDYNFSINCGGPEIRSVSGALFEKEDADLGPASFVVSAAKRWAASSVGNFAGSSNNIYIATSLAQFINTMDSELFQSARLSASSLRYYGLGLENGGYTVTLQFAEVQIEGSNSWKGIGRRRFNIYVQGRLVEKDFDIRRTAGGSSVRAVQREYKTNVSENHLEVHLFWAGKGTCCIPIQGAYGPLIAAVSATPDFTPTVANRPPSKGKSRTGTIVGVIVGVGLLSIFAGVVILVIRKRRKPYTDDEEILSMDVKPYTFTYSELKNATQDFDLSNKLGEGGFGAVYKGNLNDGREVAVKQLSIGSRQGKGQFVAEIIAISSVLHRNLVKLYGCCFEGDHRLLVYEYLPNGSLDQALFGDKSLHLDWSTRYEICLGVARGLVYLHEEASVRIIHRDVKASNILLDSELVPKVSDFGLAKLYDDKKTHISTRVAGTIGYLAPEYAMRGHLTEKTDVYAFGVVALELVSGRKNSDENLEEGKKYLLEWAWNLHEKNRDVELIDDELSEYNMEEVKRMIGIALLCTQSSYALRPPMSRVVAMLSGDAEVNDATSKPGYLTDCTFDDTTSSSFSNFQTKDTSFSTSFIAPGPEMPLRDGESKPMVGFKIKEGR

SEQ ID NO: 73122 - protein, 846 aa, Arabidopsis thaliana
  peptide (1)..(846): Ceres Seq. ID no. 4958721
  misc_feature: Pfam Name: Pkinase Pfam Description: Protein kinase domain
  misc_feature (1)..(846): Homolog of NCBI NO: 15223460 NR Description: receptor-like protein kinase, putative; protein
  misc_feature (1)..(846): Homolog of NCBI NO: 25404097 NR Description: probable receptor protein kinase F14G9.24 - Arabidopsis thaliana >gi|12321749|gb|AAG50909.1|AC069159_10
  misc_feature (1)..(846): Homolog of NCBI NO: 18405700 NR Description: similar to receptor-like protein kinase,
  misc_feature (242)..(835): Homolog of NCBI NO: 6056375 NR Description: Similar to serine/threonine kinases [Arabidopsis
  misc_feature (1)..(46): Homolog of NCBI NO: 6056375 NR Description: Similar to serine/threonine kinases [Arabidopsis
  misc_feature (1)..(85): Homolog of NCBI NO: 6056375 NR Description: Similar to serine/threonine kinases [Arabidopsis
  misc_feature (1)..(131): Homolog of NCBI NO: 6056375 NR Description: Similar to serine/threonine kinases [Arabidopsis
  misc_feature (1)..(835): Homolog of NCBI NO: 18405703 NR Description: receptor protein kinase, putative; protein id:
  misc_feature (3)..(197): Homolog of NCBI NO: 6056375 NR Description: Similar to serine/threonine kinases [Arabidopsis
  misc_feature (1)..(839): Homolog of NCBI NO: 25404097 NR Description: probable receptor protein kinase F14G9.24 - Arabidopsis thaliana >gi|12321749|gb|AAG50909.1|AC069159_10
MDVELTGRIPDFIGFWTKLTTLRILGTGLSGPIPSSFSNLIALTELRLGDISNGSSSLDFIKDMKSLSVLVLRNNNLTGTIPSTIGGYTSLQQVDLSFNKLHGPIPASLFNLSRLTHLFLGNNTLNGSLPTLKGQSLSNLDVSYNDLSGSLPSWVSLPDLKLNLVANNFTLEGLDNRVLSGLHCLQKNFPCNRGEGICKCNKKIPSQIMFSMLNVQTYGQGSNVLLEKNCFKTFAIDWCLDYNFSINCGGPEIRSVSGALFEKEDADLGPASFVVSAAKRWAASSVGNFAGSSNNIYIATSLAQFINTMDSELFQSARLSASSLRYYGLGLENGGYTVTLQFAEVQIEGSNSWKGIGRRRFNIYVQGRLVEKDFDIRRTAGGSSVRAVQREYKTNVSENHLEVHLFWAGKGTCCIPIQGAYGPLIAAVSATPDFTPTVANRPPSKGKSRTGTIVGVIVGVGLLSIFAGVVILVIRKRRKPYTDDEEILSMDVKPYTFTYSELKNATQDFDLSNKLGEGGFGAVYKGNLNDGREVAVKQLSIGSRQGKGQFVAEIIAISSVLHRNLVKLYGCCFEGDHRLLVYEYLPNGSLDQALFGDKSLHLDWSTRYEICLGVARGLVYLHEEASVRIIHRDVKASNILLDSELVPKVSDFGLAKLYDDKKTHISTRVAGTIGYLAPEYAMRGHLTEKTDVYAFGVVALELVSGRKNSDENLEEGKKYLLEWAWNLHEKNRDVELIDDELSEYNMEEVKRMIGIALLCTQSSYALRPPMSRVVAMLSGDAEVNDATSKPGYLTDCTFDDTTSSSFSNFQTKDTSFSTSFIAPGPEMPLRDGESKPMVGFKIKEGR

SEQ ID NO: 73123 - DNA, 1920 bp, Arabidopsis thaliana
  misc_feature (1)..(1920): Ceres Seq. ID no. 4958734
  misc_feature: MA Experiment ID: 20000227 Result: Down-regulated in Transcription
  misc_feature: MA Experiment 20000227 PARAMETER Experiment Name: At_Root-Tips-vs-Tops_P Parameter: Tissue Value: Root Tips vs. Root Tops
  misc_feature: MA Experiment ID: 20000439 Result: Up-regulated in Transcription
  misc_feature: MA Experiment 20000439 PARAMETER Experiment Name: At_Roots__P Parameter: Age (day) Value: 14 vs. 21
  misc_feature: MA Experiment 20000439 PARAMETER Experiment Name: At_Roots__P Parameter: Organism Value: A. thaliana
  misc_feature: MA Experiment 20000439 PARAMETER Experiment Name: At_Roots__P Parameter: Tissue Value: Roots vs. Whole Plant
  misc_feature: MA Experiment ID: 20000451 Result: Down-regulated in Transcription
  misc_feature: MA Experiment 20000451 PARAMETER Experiment Name: At_CS6879_Shoots-Roots_P Parameter: Age (day) Value: 14
  misc_feature: MA Experiment 20000451 PARAMETER Experiment Name: At_CS6879_Shoots-Roots_P Parameter: Organism Value: A. thaliana
  misc_feature: MA Experiment 20000451 PARAMETER Experiment Name: At_CS6879_Shoots-Roots_P Parameter: Plant Line Value: CS6879 vs. WS
  misc_feature: MA Experiment 20000451 PARAMETER Experiment Name: At_CS6879_Shoots-Roots_P Parameter: Tissue Value: Roots
  misc_feature: MA Experiment ID: 20000460 Result: Down-regulated in Transcription
  misc_feature: MA Experiment 20000460 PARAMETER Experiment Name: At_10percent_PEG_P Parameter: Age (day) Value: 12
  misc_feature: MA Experiment 20000460 PARAMETER Experiment Name: At_10percent_PEG_P Parameter: Organism Value: A. thaliana
  misc_feature: MA Experiment 20000460 PARAMETER Experiment Name: At_10percent_PEG_P Parameter: Plant Line Value: WS
  misc_feature: MA Experiment 20000460 PARAMETER Experiment Name: At_10percent_PEG_P Parameter: Timepoint (day) Value: 12
  misc_feature: MA Experiment 20000460 PARAMETER Experiment Name: At_10percent_PEG_P Parameter: Tissue Value: Whole Plant
  misc_feature: MA Experiment 20000460 PARAMETER Experiment Name: At_10percent_PEG_P Parameter: Treatment Value: 10percent PEG vs. No Treatment
  misc_feature: MA Experiment ID: 20000573 Result: Down-regulated in Transcription
  misc_feature: MA Experiment 20000573 PARAMETER Experiment Name: At_100uM_ABA_Mutants__P Parameter: Organism Value: A. thaliana
  misc_feature: MA Experiment 20000573 PARAMETER Experiment Name: At_100uM_ABA_Mutants__P Parameter: Plant Line Value: CS22 vs. Ler wt
  misc_feature: MA Experiment 20000573 PARAMETER Experiment Name: At_100uM_ABA_Mutants__P Parameter: Timepoint (hr) Value: N/A
  misc_feature: MA Experiment 20000573 PARAMETER Experiment Name: At_100uM_ABA_Mutants__P Parameter: Tissue Value: Whole Plant
  misc_feature: MA Experiment 20000573 PARAMETER Experiment Name: At_100uM_ABA_Mutants__P Parameter: Treatment Value: None
  misc_feature: MA Experiment ID: 20000574 Result: Down-regulated in Transcription
  misc_feature: MA Experiment 20000574 PARAMETER Experiment Name: At_100uM_ABA_Mutants__P Parameter: Organism Value: A. thaliana
  misc_feature: MA Experiment 20000574 PARAMETER Experiment Name: At_100uM_ABA_Mutants__P Parameter: Plant Line Value: CS23 vs. Ler wt
  misc_feature: MA Experiment 20000574 PARAMETER Experiment Name: At_100uM_ABA_Mutants__P Parameter: Timepoint (hr) Value: N/A
  misc_feature: MA Experiment 20000574 PARAMETER Experiment Name: At_100uM_ABA_Mutants__P Parameter: Tissue Value: Whole Plant
  misc_feature: MA Experiment 20000574 PARAMETER Experiment Name: At_100uM_ABA_Mutants__P Parameter: Treatment Value: None
  misc_feature: Pfam Name: p450 Pfam Description: Cytochrome P450
atgccagagcattgggtctttgtcccaaaacctcatgaagtaggttcatggaaaaaggttccatcagacttttgtcctttcataccggtccgacgaggacagtgtatcaatggggttacatattacctagcttggattgacatgtataattctgtgcttgtgagtttcgacataagatcggaagagctcacaatgagccaaatacctcggagggacgacggagatggatccaggaagaatgtgagtcttatagagtatggtggaaaagttactcttcttgactctaaccatcttagagacaaggggatgttggttttaagggttctggaagatgccgggatcaacaaggaatggtccaaaaagactatggttttgcatccttatcagctgcatttagtccaagtagacattatattcaacgtaaacgatattatgaaagaaatgtggggtgttgcactgagttttgttatagctttagtggtcgtcaagatcagtctctggctctatagatgggctaaccctaactgctccggcaaactacctccaggttcaatggggtttccggtgatcggagaaaccgttgagttcttcaaaccttacagtttcaacgaaatccatccatttgtcaagaaaagaatgttcaagcacggtggttcattattccggacgaatatcctcggctctaaaacgattgtttcgacagatccggaagtgaactttgagattctcaaacaagagaacaggtgtttcatcatgagctatccagaagctcttgttagaatctttgggaaagataacttgttcttcaagcaaggcaaggacttccacaggtacatgagacatattgctctgcagcttcttggccctgagtgtttgaagcagagatttatacaacaaatcgacatagcaacaagcgagcatctcaaatctgtctccttccaaggcgttgtagacgtcaaagatactagtggaagattgatattggaacaaatgatcctgatgatcataagtaacatcaaacctgagactaagagcaaactgatagagagttttagagatttcagctttgatttggttaggtccccttttgatccttctttttggaacgctctttacaatggtcttatggcacgcagcaatgtgatgaagatgctaaaaagaatgttcaaagagaggagagaagaagcaacatcggatgactcaaaatatggagacttcatggagacaatgatatatgaggtggagaaagaaggcgatacgatcaacgaggaaagatcagtagagctaatacttagtttactgattgcgtcttatgaaactacttctactatgactgcattaactgtgaaattcatagctgaaaaccccaaagtgcttatggagctgaagagagaacatgagaccatcctccaaaacagagctgataaagaatctggagttacttggaaagaatatagatccatgatgaatttcacccatatggttatcaatgagtctcttcgtttaggaagtttgtcacctgctatgtttagaaaggcggtgaatgatgtggagatcaaagggtatacaattccagcaggatggattgtattggtggttccatctcttcttcattatgaccctcaaatctatgaacaaccatgtgagtttaatccatggagatgggaggggaaagaattgctttctggctctaaaacgttcatggcgtttggtggtggtgcaagactatgtgcaggagcagagtttgctaggcttcagatggctatatttcttcatcatctagtcacaacgtatgacttctctttgatcgataaatcttatatcatccgagcacccttacttcgattctccaagccgatacgcataacgatctccgagaatcctttaagttcatctcatcaaaatgcaaatcttttttag

SEQ ID NO: 73124 - protein, 639 aa, Arabidopsis thaliana
  peptide (1)..(639): Ceres Seq. ID no. 4958735
  misc_feature: Pfam Name: p450 Pfam Description: Cytochrome P450
  misc_feature (145)..(628): Homolog of NCBI NO: 15218388 NR Description: cytochrome P450, putative; protein id: supported by cDNA: gi_17473540 [Arabidopsis thaliana]
  misc_feature (145)..(627): Homolog of NCBI NO: 30695347 NR Description: cytochrome p450 family [Arabidopsis thaliana]
  misc_feature (145)..(627): Homolog of NCBI NO: 30695352 NR Description: cytochrome p450 family [Arabidopsis thaliana]
  misc_feature (145)..(627): Homolog of NCBI NO: 22530982 NR Description: cytochrome P450-like protein [Arabidopsis
  misc_feature (145)..(494): Homolog of NCBI NO: 15230572 NR Description: cytochrome P450 - like protein; protein id:
  misc_feature (493)..(628): Homolog of NCBI NO: 15230572 NR Description: cytochrome P450 - like protein; protein id:
  misc_feature (145)..(521): Homolog of NCBI NO: 25282639 NR Description: hypothetical protein T30F21.17 [imported] - thaliana >gi|4836883|gb|AAD30586.1|AC007260_17 Similar to
  misc_feature (553)..(628): Homolog of NCBI NO: 25282639 NR Description: hypothetical protein T30F21.17 [imported] - thaliana >gi|4836883|gb|AAD30586.1|AC007260_17 Similar to
  misc_feature (148)..(616): Homolog of NCBI NO: 30682922 NR Description: cytochrome P450, putative [Arabidopsis thaliana]
  misc_feature (148)..(616): Homolog of NCBI NO: 9502380 NR Description: T12C24.27 [Arabidopsis thaliana]
MPEHWVFVPKPHEVGSWKKVPSDFCPFIPVRRGQCINGVTYYLAWIDMYNSVLVSFDIRSEELTMSQIPRRDDGDGSRKNVSLIEYGGKVTLLDSNHLRDKGMLVLRVLEDAGINKEWSKKTMVLHPYQLHLVQVDIIFNVNDIMKEMWGVALSFVIALVVVKISLWLYRWANPNCSGKLPPGSMGFPVIGETVEFFKPYSFNEIHPFVKKRMFKHGGSLFRTNILGSKTIVSTDPEVNFEILKQENRCFIMSYPEALVRIFGKDNLFFKQGKDFHRYMRHIALQLLGPECLKQRFIQQIDIATSEHLKSVSFQGVVDVKDTSGRLILEQMILMIISNIKPETKSKLIESFRDFSFDLVRSPFDPSFWNALYNGLMARSNVMKMLKRMFKERREEATSDDSKYGDFMETMIYEVEKEGDTINEERSVELILSLLIASYETTSTMTALTVKFIAENPKVLMELKREHETILQNRADKESGVTWKEYRSMMNFTHMVINESLRLGSLSPAMFRKAVNDVEIKGYTIPAGWIVLVVPSLLHYDPQIYEQPCEFNPWRWEGKELLSGSKTFMAFGGGARLCAGAEFARLQMAIFLHHLVTTYDFSLIDKSYIIRAPLLRFSKPIRITISENPLSSSHQNANLF

SEQ ID NO: 73125 - protein, 592 aa, Arabidopsis thaliana
  peptide (1)..(592): Ceres Seq. ID no. 4958736
  misc_feature: Pfam Name: p450 Pfam Description: Cytochrome P450
  misc_feature (98)..(581): Homolog of NCBI NO: 15218388 NR Description: cytochrome P450, putative; protein id: supported by cDNA: gi_17473540 [Arabidopsis thaliana]
  misc_feature (98)..(580): Homolog of NCBI NO: 30695347 NR Description: cytochrome p450 family [Arabidopsis thaliana]
  misc_feature (98)..(580): Homolog of NCBI NO: 30695352 NR Description: cytochrome p450 family [Arabidopsis thaliana]
  misc_feature (98)..(580): Homolog of NCBI NO: 22530982 NR Description: cytochrome P450-like protein [Arabidopsis
  misc_feature (98)..(447): Homolog of NCBI NO: 15230572 NR Description: cytochrome P450 - like protein; protein id:
  misc_feature (446)..(581): Homolog of NCBI NO: 15230572 NR Description: cytochrome P450 - like protein; protein id:
  misc_feature (98)..(474): Homolog of NCBI NO: 25282639 NR Description: hypothetical protein T30F21.17 [imported] - thaliana >gi|4836883|gb|AAD30586.1|AC007260_17 Similar to
  misc_feature (506)..(581): Homolog of NCBI NO: 25282639 NR Description: hypothetical protein T30F21.17 [imported] - thaliana >gi|4836883|gb|AAD30586.1|AC007260_17 Similar to
  misc_feature (101)..(569): Homolog of NCBI NO: 30682922 NR Description: cytochrome P450, putative [Arabidopsis thaliana]
  misc_feature (101)..(569): Homolog of NCBI NO: 9502380 NR Description: T12C24.27 [Arabidopsis thaliana]
MYNSVLVSFDIRSEELTMSQIPRRDDGDGSRKNVSLIEYGGKVTLLDSNHLRDKGMLVLRVLEDAGINKEWSKKTMVLHPYQLHLVQVDIIFNVNDIMKEMWGVALSFVIALVVVKISLWLYRWANPNCSGKLPPGSMGFPVIGETVEFFKPYSFNEIHPFVKKRMFKHGGSLFRTNILGSKTIVSTDPEVNFEILKQENRCFIMSYPEALVRIFGKDNLFFKQGKDFHRYMRHIALQLLGPECLKQRFIQQIDIATSEHLKSVSFQGVVDVKDTSGRLILEQMILMIISNIKPETKSKLIESFRDFSFDLVRSPFDPSFWNALYNGLMARSNVMKMLKRMFKERREEATSDDSKYGDFMETMIYEVEKEGDTINEERSVELILSLLIASYETTSTMTALTVKFIAENPKVLMELKREHETILQNRADKESGVTWKEYRSMMNFTHMVINESLRLGSLSPAMFRKAVNDVEIKGYTIPAGWIVLVVPSLLHYDPQIYEQPCEFNPWRWEGKELLSGSKTFMAFGGGARLCAGAEFARLQMAIFLHHLVTTYDFSLIDKSYIIRAPLLRFSKPIRITISENPLSSSHQNANLF

SEQ ID NO: 73126 - protein, 575 aa, Arabidopsis thaliana
  peptide (1)..(575): Ceres Seq. ID no. 4958737
  misc_feature: Pfam Name: p450 Pfam Description: Cytochrome P450
  misc_feature (81)..(564): Homolog of NCBI NO: 15218388 NR Description: cytochrome P450, putative; protein id: supported by cDNA: gi_17473540 [Arabidopsis thaliana]
  misc_feature (81)..(563): Homolog of NCBI NO: 30695347 NR Description: cytochrome p450 family [Arabidopsis thaliana]
  misc_feature (81)..(563): Homolog of NCBI NO: 30695352 NR Description: cytochrome p450 family [Arabidopsis thaliana]
  misc_feature (81)..(563): Homolog of NCBI NO: 22530982 NR Description: cytochrome P450-like protein [Arabidopsis
  misc_feature (81)..(430): Homolog of NCBI NO: 15230572 NR Description: cytochrome P450 - like protein; protein id:
  misc_feature (429)..(564): Homolog of NCBI NO: 15230572 NR Description: cytochrome P450 - like protein; protein id:
  misc_feature (81)..(457): Homolog of NCBI NO: 25282639 NR Description: hypothetical protein T30F21.17 [imported] - thaliana >gi|4836883|gb|AAD30586.1|AC007260_17 Similar to
  misc_feature (489)..(564): Homolog of NCBI NO: 25282639 NR Description: hypothetical protein T30F21.17 [imported] - thaliana >gi|4836883|gb|AAD30586.1|AC007260_17 Similar to
  misc_feature (84)..(552): Homolog of NCBI NO: 30682922 NR Description: cytochrome P450, putative [Arabidopsis thaliana]
  misc_feature (84)..(552): Homolog of NCBI NO: 9502380 NR Description: T12C24.27 [Arabidopsis thaliana]
MSQIPRRDDGDGSRKNVSLIEYGGKVTLLDSNHLRDKGMLVLRVLEDAGINKEWSKKTMVLHPYQLHLVQVDIIFNVNDIMKEMWGVALSFVIALVVVKISLWLYRWANPNCSGKLPPGSMGFPVIGETVEFFKPYSFNEIHPFVKKRMFKHGGSLFRTNILGSKTIVSTDPEVNFEILKQENRCFIMSYPEALVRIFGKDNLFFKQGKDFHRYMRHIALQLLGPECLKQRFIQQIDIATSEHLKSVSFQGVVDVKDTSGRLILEQMILMIISNIKPETKSKLIESFRDFSFDLVRSPFDPSFWNALYNGLMARSNVMKMLKRMFKERREEATSDDSKYGDFMETMIYEVEKEGDTINEERSVELILSLLIASYETTSTMTALTVKFIAENPKVLMELKREHETILQNRADKESGVTWKEYRSMMNFTHMVINESLRLGSLSPAMFRKAVNDVEIKGYTIPAGWIVLVVPSLLHYDPQIYEQPCEFNPWRWEGKELLSGSKTFMAFGGGARLCAGAEFARLQMAIFLHHLVTTYDFSLIDKSYIIRAPLLRFSKPIRITISENPLSSSHQNANLF

SEQ ID NO: 73127 - DNA, 2019 bp, Arabidopsis thaliana
  misc_feature (1)..(2019): Ceres Seq. ID no. 4958757
  misc_feature: MA Experiment ID: 20000179 Result: Down-regulated in Transcription
  misc_feature: MA Experiment 20000179 PARAMETER Experiment Name: At_Germinating_Seeds_P Parameter: Age (hr) Value: 6 vs. 0
  misc_feature: MA Experiment 20000179 PARAMETER Experiment Name: At_Germinating_Seeds_P Parameter: Tissue Value: Germinating Seeds
  misc_feature: MA Experiment ID: 20000234 Result: Up-regulated in Transcription
  misc_feature: MA Experiment 20000234 PARAMETER Experiment Name: At_Siliques_P Parameter: Age (day) Value: 21
  misc_feature: MA Experiment 20000234 PARAMETER Experiment Name: At_Siliques_P Parameter: Organism Value: A. thaliana
  misc_feature: MA Experiment 20000234 PARAMETER Experiment Name: At_Siliques_P Parameter: Plant Line Value: WS
  misc_feature: MA Experiment 20000234 PARAMETER Experiment Name: At_Siliques_P Parameter: Tissue Value: Less Than 5mm Siliques vs. Whole Plant
  misc_feature: MA Experiment ID: 20000495 Result: Up-regulated in Transcription
  misc_feature: MA Experiment 20000495 PARAMETER Experiment Name: At_Guard_Cells_P Parameter: Harvest Date Value: 8/2/2002
  misc_feature: MA Experiment 20000495 PARAMETER Experiment Name: At_Guard_Cells_P Parameter: Organism Value: A. thaliana
  misc_feature: MA Experiment 20000495 PARAMETER Experiment Name: At_Guard_Cells_P Parameter: Tissue Value: Guard Cells vs. Leaves
atgcgccggcacaagcgatggcctttgaggtctcttgtctgcagcttcagctcctctgcggcggagacagttactacttcaacggcagcttcagcgacggcggcttttccgttgaagcatgtgacaaggtcgaacttcgagacgacgctgaatgatctacgctcactcgtaaaggctgcagatttcgtggcgattgaccttgagatgactggcgtgacaagcgctccgtggcgagactccttagagttcgaccgctacgacgtcagatacctcaaagtcaaagactccgccgagaaattcgccgtcgttcagtttggtgtctgtccctttcgttgggattctcgtactcagtcattcgtgtcctacccgcacaatttctttgtatttcctcgtcaagaactcacatttgatccaccagctcatgaatttctctgtcagactacatcaatggattttcttgccaagtatcagtttgatttcaacacctgcatacatgaaggaatatcttatttgtccagacgagaagaggaagaggcaagtaagcgtttgaaaatgctacacggcgaggacggaattgattcatcgggtgaaactgaagagttaaagttggtgcgattggcagatgttcttttcgctgcaaggatggagaaattgctgaatgaatggcggtctggcctgttacatggtgggaatgcgtcctctgagtttccgaggatttcaaatggttcaaaccagagtatggaaactgtgtttcaccatatgcgtcctgctctcagtctgaagggtttcacttctcatcagctcagagttcttaactcggttttaagaaagcattttggagatcttgtgtacatacattcaaatgataaaagttcttcttcacgagacattgttgtgtatactgattcagattccgacaaggaaaacctcatgaaggaggcaaaggacgaacgcaagagattggcagaaagaaaaatacaatctgcaatcgggttccgtcaagtgattgatctgcttgcttcagagaaaaagctgatcgttggtcacaattgtttcctcgatattgcacatgtatacagcaaatttgtgggtcctcttccttcaacagctgagaaattcgtggcctccattaacagtcactttccttatattgttgacaccaaaatactcttaaacgtgaatccaatgttgcatcagcggatgaaaaagtccagtacatcactgtcttccgcgttttcctcgttatgtccgcaaatcgagttttcttcaagaagctctgactcgtttcttcagcagcgtgtcaatattgacgttgaaatagacaacgttaggtgttctaactggaatgcaggaggaaaacacgaagccggttatgatgctttcatgacaggttgcatctttgcgcaggcatgcaatcatctcggttttgacttcaaacagcattcgcagttagatgactttgcccagaacgagaaacttgaaaagtacatcaaccgtctttatctcagctggacaagaggtgatatcatcgaccttcgaacaggccatagtaatgcagataactggcgagtctcaaagttcaaatacgagaacattgtcctcatctggaacttcccacgaaaacttaaggcgagagggatcaaagaatgcatatgcaaagcctttggctctgcttctaactcagaacttgtctgggacttcttagcactcaagcggcagctggagtcaagcgacggtccagtctcagttcttcaccctttatccaagatccttgaaggaggaaacactggagctgcagactacgaagcatacaaagagatttgcagctcacacgtctcagaggtcatgttctctgaccaagctgaaacagttggtgtcaaatcaagaacaagacccaacgcacaatgcgagactgagacaagagaggagaacacagtcactgtgactcacaaagcatcggatttgattgatgcgtttttggccaatagagttgaagtcgaaactgctacgagtaattaa

SEQ ID NO: 73128 - protein, 672 aa, Arabidopsis thaliana
  peptide (1)..(672): Ceres Seq. ID no. 4958758
  misc_feature (39)..(202): Pfam Name: CAF1 family ribonuclease Pfam Description: CAF1 family ribonuclease
  misc_feature (1)..(506): Homolog of NCBI NO: 8778305 NR Description: F14J16.11 [Arabidopsis thaliana]
  misc_feature (562)..(672): Homolog of NCBI NO: 8778305 NR Description: F14J16.11 [Arabidopsis thaliana]
  misc_feature (175)..(451): Homolog of NCBI NO: 38606521 NR Description: OSJNBa0016O02.8 [Oryza sativa (japonica
  misc_feature (5)..(123): Homolog of NCBI NO: 38606521 NR Description: OSJNBa0016O02.8 [Oryza sativa (japonica
  misc_feature (559)..(624): Homolog of NCBI NO: 38606521 NR Description: OSJNBa0016O02.8 [Oryza sativa (japonica
  misc_feature (469)..(559): Homolog of NCBI NO: 38606521 NR Description: OSJNBa0016O02.8 [Oryza sativa (japonica
  misc_feature (10)..(413): Homolog of NCBI NO: 15230837 NR Description: hypothetical protein; protein id: At3g25430.1, by cDNA: gi_17065175 [Arabidopsis thaliana]
  misc_feature (10)..(413): Homolog of NCBI NO: 9279724 NR Description: gb|AAD21483.1~gene_id:MWL2.4~similar to unknown
  misc_feature (245)..(502): Homolog of NCBI NO: 29791562 NR Description: Similar to poly(A)-specific ribonuclease
  misc_feature (41)..(189): Homolog of NCBI NO: 29791562 NR Description: Similar to poly(A)-specific ribonuclease
MRRHKRWPLRSLVCSFSSSAAETVTTSTAASATAAFPLKHVTRSNFETTLNDLRSLVKAADFVAIDLEMTGVTSAPWRDSLEFDRYDVRYLKVKDSAEKFAVVQFGVCPFRWDSRTQSFVSYPHNFFVFPRQELTFDPPAHEFLCQTTSMDFLAKYQFDFNTCIHEGISYLSRREEEEASKRLKMLHGEDGIDSSGETEELKLVRLADVLFAARMEKLLNEWRSGLLHGGNASSEFPRISNGSNQSMETVFHHMRPALSLKGFTSHQLRVLNSVLRKHFGDLVYIHSNDKSSSSRDIVVYTDSDSDKENLMKEAKDERKRLAERKIQSAIGFRQVIDLLASEKKLIVGHNCFLDIAHVYSKFVGPLPSTAEKFVASINSHFPYIVDTKILLNVNPMLHQRMKKSSTSLSSAFSSLCPQIEFSSRSSDSFLQQRVNIDVEIDNVRCSNWNAGGKHEAGYDAFMTGCIFAQACNHLGFDFKQHSQLDDFAQNEKLEKYINRLYLSWTRGDIIDLRTGHSNADNWRVSKFKYENIVLIWNFPRKLKARGIKECICKAFGSASNSELVWDFLALKRQLESSDGPVSVLHPLSKILEGGNTGAADYEAYKEICSSHVSEVMFSDQAETVGVKSRTRPNAQCETETREENTVTVTHKASDLIDAFLANRVEVETATSN

SEQ ID NO: 73129 - protein, 604 aa, Arabidopsis thaliana
  peptide (1)..(604): Ceres Seq. ID no. 4958759
  misc_feature (1)..(134): Pfam Name: CAF1 family ribonuclease Pfam Description: CAF1 family ribonuclease
  misc_feature (1)..(438): Homolog of NCBI NO: 8778305 NR Description: F14J16.11 [Arabidopsis thaliana]
  misc_feature (494)..(604): Homolog of NCBI NO: 8778305 NR Description: F14J16.11 [Arabidopsis thaliana]
  misc_feature (107)..(383): Homolog of NCBI NO: 38606521 NR Description: OSJNBa0016O02.8 [Oryza sativa (japonica
  misc_feature (1)..(55): Homolog of NCBI NO: 38606521 NR Description: OSJNBa0016O02.8 [Oryza sativa (japonica
  misc_feature (491)..(556): Homolog of NCBI NO: 38606521 NR Description: OSJNBa0016O02.8 [Oryza sativa (japonica
  misc_feature (401)..(491): Homolog of NCBI NO: 38606521 NR Description: OSJNBa0016O02.8 [Oryza sativa (japonica
  misc_feature (1)..(345): Homolog of NCBI NO: 15230837 NR Description: hypothetical protein; protein id: At3g25430.1, by cDNA: gi_17065175 [Arabidopsis thaliana]
  misc_feature (1)..(345): Homolog of NCBI NO: 9279724 NR Description: gb|AAD21483.1~gene_id:MWL2.4~similar to unknown
  misc_feature (177)..(434): Homolog of NCBI NO: 29791562 NR Description: Similar to poly(A)-specific ribonuclease
  misc_feature (1)..(121): Homolog of NCBI NO: 29791562 NR Description: Similar to poly(A)-specific ribonuclease
MTGVTSAPWRDSLEFDRYDVRYLKVKDSAEKFAVVQFGVCPFRWDSRTQSFVSYPHNFFVFPRQELTFDPPAHEFLCQTTSMDFLAKYQFDFNTCIHEGISYLSRREEEEASKRLKMLHGEDGIDSSGETEELKLVRLADVLFAARMEKLLNEWRSGLLHGGNASSEFPRISNGSNQSMETVFHHMRPALSLKGFTSHQLRVLNSVLRKHFGDLVYIHSNDKSSSSRDIVVYTDSDSDKENLMKEAKDERKRLAERKIQSAIGFRQVIDLLASEKKLIVGHNCFLDIAHVYSKFVGPLPSTAEKFVASINSHFPYIVDTKILLNVNPMLHQRMKKSSTSLSSAFSSLCPQIEFSSRSSDSFLQQRVNIDVEIDNVRCSNWNAGGKHEAGYDAFMTGCIFAQACNHLGFDFKQHSQLDDFAQNEKLEKYINRLYLSWTRGDIIDLRTGHSNADNWRVSKFKYENIVLIWNFPRKLKARGIKECICKAFGSASNSELVWDFLALKRQLESSDGPVSVLHPLSKILEGGNTGAADYEAYKEICSSHVSEVMFSDQAETVGVKSRTRPNAQCETETREENTVTVTHKASDLIDAFLANRVEVETATSN

SEQ ID NO: 73130 - protein, 523 aa, Arabidopsis thaliana
  peptide (1)..(523): Ceres Seq. ID no. 4958760
  misc_feature (1)..(53): Pfam Name: CAF1 family ribonuclease Pfam Description: CAF1 family ribonuclease
  misc_feature (1)..(357): Homolog of NCBI NO: 8778305 NR Description: F14J16.11 [Arabidopsis thaliana]
  misc_feature (413)..(523): Homolog of NCBI NO: 8778305 NR Description: F14J16.11 [Arabidopsis thaliana]
  misc_feature (26)..(302): Homolog of NCBI NO: 38606521 NR Description: OSJNBa0016O02.8 [Oryza sativa (japonica
  misc_feature (410)..(475): Homolog of NCBI NO: 38606521 NR Description: OSJNBa0016O02.8 [Oryza sativa (japonica
  misc_feature (320)..(410): Homolog of NCBI NO: 38606521 NR Description: OSJNBa0016O02.8 [Oryza sativa (japonica
  misc_feature (1)..(264): Homolog of NCBI NO: 15230837 NR Description: hypothetical protein; protein id: At3g25430.1, by cDNA: gi_17065175 [Arabidopsis thaliana]
  misc_feature (1)..(264): Homolog of NCBI NO: 9279724 NR Description: gb|AAD21483.1~gene_id:MWL2.4~similar to unknown
  misc_feature (96)..(353): Homolog of NCBI NO: 29791562 NR Description: Similar to poly(A)-specific ribonuclease
  misc_feature (1)..(40): Homolog of NCBI NO: 29791562 NR Description: Similar to poly(A)-specific ribonuclease
  misc_feature (96)..(353): Homolog of NCBI NO: 14495249 NR Description: poly(A)-specific ribonuclease [Xenopus laevis]
MDFLAKYQFDFNTCIHEGISYLSRREEEEASKRLKMLHGEDGIDSSGETEELKLVRLADVLFAARMEKLLNEWRSGLLHGGNASSEFPRISNGSNQSMETVFHHMRPALSLKGFTSHQLRVLNSVLRKHFGDLVYIHSNDKSSSSRDIVVYTDSDSDKENLMKEAKDERKRLAERKIQSAIGFRQVIDLLASEKKLIVGHNCFLDIAHVYSKFVGPLPSTAEKFVASINSHFPYIVDTKILLNVNPMLHQRMKKSSTSLSSAFSSLCPQIEFSSRSSDSFLQQRVNIDVEIDNVRCSNWNAGGKHEAGYDAFMTGCIFAQACNHLGFDFKQHSQLDDFAQNEKLEKYINRLYLSWTRGDIIDLRTGHSNADNWRVSKFKYENIVLIWNFPRKLKARGIKECICKAFGSASNSELVWDFLALKRQLESSDGPVSVLHPLSKILEGGNTGAADYEAYKEICSSHVSEVMFSDQAETVGVKSRTRPNAQCETETREENTVTVTHKASDLIDAFLANRVEVETATSN

SEQ ID NO: 73131 - DNA, 2484 bp, Arabidopsis thaliana
  misc_feature (1)..(2484): Ceres Seq. ID no. 4958915
  misc_feature: MA Experiment ID: 20000179 Result: Up-regulated in Transcription
  misc_feature: MA Experiment 20000179 PARAMETER Experiment Name: At_Germinating_Seeds_P Parameter: Age (hr) Value: 6 vs. 0
  misc_feature: MA Experiment 20000179 PARAMETER Experiment Name: At_Germinating_Seeds_P Parameter: Tissue Value: Germinating Seeds
  misc_feature: MA Experiment ID: 20000185 Result: Down-regulated in Transcription
  misc_feature: MA Experiment 20000185 PARAMETER Experiment Name: At_Roots__P Parameter: Age (day) Value: 7 vs. 21
  misc_feature: MA Experiment 20000185 PARAMETER Experiment Name: At_Roots__P Parameter: Organism Value: A. thaliana
  misc_feature: MA Experiment 20000185 PARAMETER Experiment Name: At_Roots__P Parameter: Tissue Value: Roots vs. Whole Plant
  misc_feature: MA Experiment ID: 20000227 Result: Down-regulated in Transcription
  misc_feature: MA Experiment 20000227 PARAMETER Experiment Name: At_Root-Tips-vs-Tops_P Parameter: Tissue Value: Root Tips vs. Root Tops
  misc_feature: MA Experiment ID: 20000439 Result: Down-regulated in Transcription
  misc_feature: MA Experiment 20000439 PARAMETER Experiment Name: At_Roots__P Parameter: Age (day) Value: 14 vs. 21
  misc_feature: MA Experiment 20000439 PARAMETER Experiment Name: At_Roots__P Parameter: Organism Value: A. thaliana
  misc_feature: MA Experiment 20000439 PARAMETER Experiment Name: At_Roots__P Parameter: Tissue Value: Roots vs. Whole Plant
  misc_feature: MA Experiment ID: 20001450 Result: Up-regulated in Transcription
  misc_feature: MA Experiment 20001450 PARAMETER Experiment Name: At_Far-red-induction_P Parameter: Age (day) Value: 7
  misc_feature: MA Experiment 20001450 PARAMETER Experiment Name: At_Far-red-induction_P Parameter: Light Value: Far-red vs. White
  misc_feature: MA Experiment 20001450 PARAMETER Experiment Name: At_Far-red-induction_P Parameter: Organism Value: A. thaliana
  misc_feature: MA Experiment 20001450 PARAMETER Experiment Name: At_Far-red-induction_P Parameter: Plant Line Value: Columbia
  misc_feature: MA Experiment 20001450 PARAMETER Experiment Name: At_Far-red-induction_P Parameter: Timepoint (hr) Value: 8
  misc_feature: MA Experiment 20001450 PARAMETER Experiment Name: At_Far-red-induction_P Parameter: Tissue Value: Whole Plant
atggaggaaattgaagaaggaagcagcaacaacagcataagacgtgttggtaccggaagtagtgaccggagatgggttgatggaagcgaggtagactctgaaacgccgctgttttcagaaatcagagatagagactatagttttgggaatttgaggagaagattaatgaaaaaacccaaaagagctgattctcttgatgttgaagctatggaaattgcaggttctcatggtcacaatctcaaggatttgtcacttttgactacacttggaatagcgtttcagacgttaggtgttgtgtatggtgatatgggaacaagtcctttgtatgtgttcagtgatgtgtttagtaaagttcctataagatcagaagttgatgttcttggagctttgtctctcgttatctacactattgctgtgattcctttggcaaagtatgtatttgtagtccttaaagctaacgacaatggcgaaggagggacatttgcgttgtattcacttatttgtaggtatgcaaaggtgaataagctgccaaatcaacaacctgcggatgagcagatctcgagttttaggcttaaactcccaactcctgagctggaaagagctctggggattaaagaagctttggagacaaaagggtatttgaaaactcttcttttgcttttagtcctaatgggaacttccatgattattggcgatggaattctaacaccagctatgtcagtgatgtctgcaatgagtggtctacaaggtgaagttaaaggatttggaacaaatgcattggttatgtcttcgattgtgattctcgtggctttgttcagcatacaacggtttgggacgggtaaagttggttttctatttgctccagttctggcgctctggttcttctctcttggtgctattggaatctataatctgttgaagtatgacttcactgtcataagagcactaaacccgttttatatcgttttgttcttcaacaagaatagcaaacaggcttggtctgctcttggtggatgtgtcttatgcataacaggagctgaagcaatgtttgcagatttaggacatttctcagttcgttctatacagatggcatttacttgcgtggtgttcccatgccttctcttagcttacatgggtcaagctgcttatctaacaaagcatcccgaggcctcagctcgcatattctatgattcagttccaaagagtttgttctggccggtgtttgtgattgcaacattagctgctatgatagctagccaagccatgatctccgcgactttctcatgcgtcaaacaagccatggctctcggttgctttccaaggctgaagataatccacacttctaagaaacggataggtcaaatctatataccagttatcaactggttcttgatgatcatgtgcattcttgtcgtctccatcttcagaagcacaacccacattgccaatgcttacggcatagcagaggtaggtgtaatgatggttagcacagttttggtaactctagtgatgcttcttatttggcaaaccaatatatttctcgccctttgctttccccttatatttggatcagtggagaccatttacttgctagctgttctcaccaagatattggaaggcggttgggttccgctagtattcgccactttcttcctcactgtaatgtacatttggaactacggaagtgtactcaagtaccaaagcgaggtcagggaaagaatctccatggattttatgcgtgagctcggttcaactcttgggaccattcgaatccctgggattggactcctttataacgagcttgtccaaggtataccttccatttttggacagttcttgctcactcttcctgcgattcactcaacaatcatctttgtctgcatcaaatatgttcctgtcccggttgttcctcaagaagagaggttcctcttcagacgggtttgtcctaaggactaccatatgttcaggtgcattgcgaggtatggttacaaagatgtcagaaaagaagattctagagtctttgaacagcttcttattgaaagtctagagaagttcttgagatgtgaagcattagaggatgctctagagagcactctgaatgattttgatcccgatagagtttccgttgcaagtgatacttacacggacgacctcatggctcctctcatccaccgtgcaaagcgttctgagccagagcaagagttggattcagaggttttgccatcttcaagcgtagggtcgtctatggaggaagatccagctctggaatatgaacttgcggctttgagagaagccacagactcggggctaacgtatttactggctcatggagatgtaagggcgaagaagaattcgattttcgtgaagaagcttgtgattaattacttctatgcgtttctaaggagaaattgcagagctggagctgcgaatctcactgttcctcatatgaacatcttgcaagctgggatgacttatatggtctag

SEQ ID NO: 73132 - protein, 827 aa, Arabidopsis thaliana
  peptide (1)..(827): Ceres Seq. ID no. 4958916
  misc_feature (2)..(827): Homolog of NCBI NO: 22326688 NR Description: potassium transport protein-like; protein id:
  misc_feature (43)..(827): Homolog of NCBI NO: 22329125 NR Description: putative potassium transporter AtKT5p (AtKT5); id: At4g33530.1, supported by cDNA: gi_20466180 [Arabidopsis >gi|20466181|gb|AAM20408.1| putative potassium transporter AtKT5p
  misc_feature (239)..(827): Homolog of NCBI NO: 9955527 NR Description: potassium transport protein-like [Arabidopsis
  misc_feature (2)..(240): Homolog of NCBI NO: 9955527 NR Description: potassium transport protein-like [Arabidopsis
  misc_feature (43)..(827): Homolog of NCBI NO: 7488157 NR Description: probable potassium transport protein KT5 - thaliana >gi|3859659|emb|CAA20566.1| putative potassium
  misc_feature (43)..(827): Homolog of NCBI NO: 25345483 NR Description: probable potassium transporter AtKT5p (AtKT5) - Arabidopsis thaliana >gi|7270301|emb|CAB80070.1| putative
  misc_feature (88)..(827): Homolog of NCBI NO: 18250714 NR Description: putative potasium transporter [Oryza sativa
  misc_feature (91)..(730): Homolog of NCBI NO: 18250688 NR Description: putative potasium transporter [Oryza sativa
  misc_feature (752)..(827): Homolog of NCBI NO: 18250688 NR Description: putative potasium transporter [Oryza sativa
  misc_feature (28)..(827): Homolog of NCBI NO: 30017546 NR Description: putative potassium transporter [Oryza sativa
MEEIEEGSSNNSIRRVGTGSSDRRWVDGSEVDSETPLFSEIRDRDYSFGNLRRRLMKKPKRADSLDVEAMEIAGSHGHNLKDLSLLTTLGIAFQTLGVVYGDMGTSPLYVFSDVFSKVPIRSEVDVLGALSLVIYTIAVIPLAKYVFVVLKANDNGEGGTFALYSLICRYAKVNKLPNQQPADEQISSFRLKLPTPELERALGIKEALETKGYLKTLLLLLVLMGTSMIIGDGILTPAMSVMSAMSGLQGEVKGFGTNALVMSSIVILVALFSIQRFGTGKVGFLFAPVLALWFFSLGAIGIYNLLKYDFTVIRALNPFYIVLFFNKNSKQAWSALGGCVLCITGAEAMFADLGHFSVRSIQMAFTCVVFPCLLLAYMGQAAYLTKHPEASARIFYDSVPKSLFWPVFVIATLAAMIASQAMISATFSCVKQAMALGCFPRLKIIHTSKKRIGQIYIPVINWFLMIMCILVVSIFRSTTHIANAYGIAEVGVMMVSTVLVTLVMLLIWQTNIFLALCFPLIFGSVETIYLLAVLTKILEGGWVPLVFATFFLTVMYIWNYGSVLKYQSEVRERISMDFMRELGSTLGTIRIPGIGLLYNELVQGIPSIFGQFLLTLPAIHSTIIFVCIKYVPVPVVPQEERFLFRRVCPKDYHMFRCIARYGYKDVRKEDSRVFEQLLIESLEKFLRCEALEDALESTLNDFDPDRVSVASDTYTDDLMAPLIHRAKRSEPEQELDSEVLPSSSVGSSMEEDPALEYELAALREATDSGLTYLLAHGDVRAKKNSIFVKKLVINYFYAFLRRNCRAGAANLTVPHMNILQAGMTYMV

SEQ ID NO: 73133 - protein, 772 aa, Arabidopsis thaliana
  peptide (1)..(772): Ceres Seq. ID no. 4958917
  misc_feature (1)..(772): Homolog of NCBI NO: 22326688 NR Description: potassium transport protein-like; protein id:
  misc_feature (1)..(772): Homolog of NCBI NO: 22329125 NR Description: putative potassium transporter AtKT5p (AtKT5); id: At4g33530.1, supported by cDNA: gi_20466180 [Arabidopsis >gi|20466181|gb|AAM20408.1| putative potassium transporter AtKT5p
  misc_feature (184)..(772): Homolog of NCBI NO: 9955527 NR Description: potassium transport protein-like [Arabidopsis
  misc_feature (1)..(185): Homolog of NCBI NO: 9955527 NR Description: potassium transport protein-like [Arabidopsis
  misc_feature (1)..(772): Homolog of NCBI NO: 7488157 NR Description: probable potassium transport protein KT5 - thaliana >gi|3859659|emb|CAA20566.1| putative potassium
  misc_feature (1)..(772): Homolog of NCBI NO: 25345483 NR Description: probable potassium transporter AtKT5p (AtKT5) - Arabidopsis thaliana >gi|7270301|emb|CAB80070.1| putative
  misc_feature (33)..(772): Homolog of NCBI NO: 18250714 NR Description: putative potasium transporter [Oryza sativa
  misc_feature (36)..(675): Homolog of NCBI NO: 18250688 NR Description: putative potasium transporter [Oryza sativa
  misc_feature (697)..(772): Homolog of NCBI NO: 18250688 NR Description: putative potasium transporter [Oryza sativa
  misc_feature (1)..(772): Homolog of NCBI NO: 30017546 NR Description: putative potassium transporter [Oryza sativa
MKKPKRADSLDVEAMEIAGSHGHNLKDLSLLTTLGIAFQTLGVVYGDMGTSPLYVFSDVFSKVPIRSEVDVLGALSLVIYTIAVIPLAKYVFVVLKANDNGEGGTFALYSLICRYAKVNKLPNQQPADEQISSFRLKLPTPELERALGIKEALETKGYLKTLLLLLVLMGTSMIIGDGILTPAMSVMSAMSGLQGEVKGFGTNALVMSSIVILVALFSIQRFGTGKVGFLFAPVLALWFFSLGAIGIYNLLKYDFTVIRALNPFYIVLFFNKNSKQAWSALGGCVLCITGAEAMFADLGHFSVRSIQMAFTCVVFPCLLLAYMGQAAYLTKHPEASARIFYDSVPKSLFWPVFVIATLAAMIASQAMISATFSCVKQAMALGCFPRLKIIHTSKKRIGQIYIPVINWFLMIMCILVVSIFRSTTHIANAYGIAEVGVMMVSTVLVTLVMLLIWQTNIFLALCFPLIFGSVETIYLLAVLTKILEGGWVPLVFATFFLTVMYIWNYGSVLKYQSEVRERISMDFMRELGSTLGTIRIPGIGLLYNELVQGIPSIFGQFLLTLPAIHSTIIFVCIKYVPVPVVPQEERFLFRRVCPKDYHMFRCIARYGYKDVRKEDSRVFEQLLIESLEKFLRCEALEDALESTLNDFDPDRVSVASDTYTDDLMAPLIHRAKRSEPEQELDSEVLPSSSVGSSMEEDPALEYELAALREATDSGLTYLLAHGDVRAKKNSIFVKKLVINYFYAFLRRNCRAGAANLTVPHMNILQAGMTYMV

SEQ ID NO: 73134 - protein, 758 aa, Arabidopsis thaliana
  peptide (1)..(758): Ceres Seq. ID no. 4958918
  misc_feature (1)..(758): Homolog of NCBI NO: 22326688 NR Description: potassium transport protein-like; protein id:
  misc_feature (1)..(758): Homolog of NCBI NO: 22329125 NR Description: putative potassium transporter AtKT5p (AtKT5); id: At4g33530.1, supported by cDNA: gi_20466180 [Arabidopsis >gi|20466181|gb|AAM20408.1| putative potassium transporter AtKT5p
  misc_feature (170)..(758): Homolog of NCBI NO: 9955527 NR Description: potassium transport protein-like [Arabidopsis
  misc_feature (1)..(171): Homolog of NCBI NO: 9955527 NR Description: potassium transport protein-like [Arabidopsis
  misc_feature (1)..(758): Homolog of NCBI NO: 7488157 NR Description: probable potassium transport protein KT5 - thaliana >gi|3859659|emb|CAA20566.1| putative potassium
  misc_feature (1)..(758): Homolog of NCBI NO: 25345483 NR Description: probable potassium transporter AtKT5p (AtKT5) - Arabidopsis thaliana >gi|7270301|emb|CAB80070.1| putative
  misc_feature (19)..(758): Homolog of NCBI NO: 18250714 NR Description: putative potasium transporter [Oryza sativa
  misc_feature (22)..(661): Homolog of NCBI NO: 18250688 NR Description: putative potasium transporter [Oryza sativa
  misc_feature (683)..(758): Homolog of NCBI NO: 18250688 NR Description: putative potasium transporter [Oryza sativa
  misc_feature (1)..(758): Homolog of NCBI NO: 30017546 NR Description: putative potassium transporter [Oryza sativa
MEIAGSHGHNLKDLSLLTTLGIAFQTLGVVYGDMGTSPLYVFSDVFSKVPIRSEVDVLGALSLVIYTIAVIPLAKYVFVVLKANDNGEGGTFALYSLICRYAKVNKLPNQQPADEQISSFRLKLPTPELERALGIKEALETKGYLKTLLLLLVLMGTSMIIGDGILTPAMSVMSAMSGLQGEVKGFGTNALVMSSIVILVALFSIQRFGTGKVGFLFAPVLALWFFSLGAIGIYNLLKYDFTVIRALNPFYIVLFFNKNSKQAWSALGGCVLCITGAEAMFADLGHFSVRSIQMAFTCVVFPCLLLAYMGQAAYLTKHPEASARIFYDSVPKSLFWPVFVIATLAAMIASQAMISATFSCVKQAMALGCFPRLKIIHTSKKRIGQIYIPVINWFLMIMCILVVSIFRSTTHIANAYGIAEVGVMMVSTVLVTLVMLLIWQTNIFLALCFPLIFGSVETIYLLAVLTKILEGGWVPLVFATFFLTVMYIWNYGSVLKYQSEVRERISMDFMRELGSTLGTIRIPGIGLLYNELVQGIPSIFGQFLLTLPAIHSTIIFVCIKYVPVPVVPQEERFLFRRVCPKDYHMFRCIARYGYKDVRKEDSRVFEQLLIESLEKFLRCEALEDALESTLNDFDPDRVSVASDTYTDDLMAPLIHRAKRSEPEQELDSEVLPSSSVGSSMEEDPALEYELAALREATDSGLTYLLAHGDVRAKKNSIFVKKLVINYFYAFLRRNCRAGAANLTVPHMNILQAGMTYMV

SEQ ID NO: 73135 - DNA, 1434 bp, Arabidopsis thaliana
  misc_feature (1)..(1434): Ceres Seq. ID no. 4958938
  misc_feature: MA Experiment ID: 20000179 Result: Up-regulated in Transcription
  misc_feature: MA Experiment 20000179 PARAMETER Experiment Name: At_Germinating_Seeds_P Parameter: Age (hr) Value: 6 vs. 0
  misc_feature: MA Experiment 20000179 PARAMETER Experiment Name: At_Germinating_Seeds_P Parameter: Tissue Value: Germinating Seeds
  misc_feature: MA Experiment ID: 20000180 Result: Up-regulated in Transcription
  misc_feature: MA Experiment 20000180 PARAMETER Experiment Name: At_Germinating_Seeds_P Parameter: Age (hr) Value: 24 vs. 0
  misc_feature: MA Experiment 20000180 PARAMETER Experiment Name: At_Germinating_Seeds_P Parameter: Tissue Value: Germinating Seeds
  misc_feature: MA Experiment ID: 20000185 Result: Up-regulated in Transcription
  misc_feature: MA Experiment 20000185 PARAMETER Experiment Name: At_Roots__P Parameter: Age (day) Value: 7 vs. 21
  misc_feature: MA Experiment 20000185 PARAMETER Experiment Name: At_Roots__P Parameter: Organism Value: A. thaliana
  misc_feature: MA Experiment 20000185 PARAMETER Experiment Name: At_Roots__P Parameter: Tissue Value: Roots vs. Whole Plant
  misc_feature: MA Experiment ID: 20000211 Result: Up-regulated in Transcription
  misc_feature: MA Experiment 20000211 PARAMETER Experiment Name: At_0.001percent_MeJA__P Parameter: Age (day) Value: 14
  misc_feature: MA Experiment 20000211 PARAMETER Experiment Name: At_0.001percent_MeJA__P Parameter: Organism Value: A. thaliana
  misc_feature: MA Experiment 20000211 PARAMETER Experiment Name: At_0.001percent_MeJA__P Parameter: Plant Line Value: WS
  misc_feature: MA Experiment 20000211 PARAMETER Experiment Name: At_0.001percent_MeJA__P Parameter: Timepoint (hr) Value: 1
  misc_feature: MA Experiment 20000211 PARAMETER Experiment Name: At_0.001percent_MeJA__P Parameter: Tissue Value: Aerial
  misc_feature: MA Experiment 20000211 PARAMETER Experiment Name: At_0.001percent_MeJA__P Parameter: Treatment Value: 0.001percent MeJA vs. No Treatment
  misc_feature: MA Experiment ID: 20000227 Result: Down-regulated in Transcription
  misc_feature: MA Experiment 20000227 PARAMETER Experiment Name: At_Root-Tips-vs-Tops_P Parameter: Tissue Value: Root Tips vs. Root Tops
  misc_feature: MA Experiment ID: 20000438 Result: Up-regulated in Transcription
  misc_feature: MA Experiment 20000438 PARAMETER Experiment Name: At_Shoots__P Parameter: Age (day) Value: 14
  misc_feature: MA Experiment 20000438 PARAMETER Experiment Name: At_Shoots__P Parameter: Tissue Value: Shoots vs. Whole Plant
  misc_feature: MA Experiment ID: 20000439 Result: Up-regulated in Transcription
  misc_feature: MA Experiment 20000439 PARAMETER Experiment Name: At_Roots__P Parameter: Age (day) Value: 14 vs. 21
  misc_feature: MA Experiment 20000439 PARAMETER Experiment Name: At_Roots__P Parameter: Organism Value: A. thaliana
  misc_feature: MA Experiment 20000439 PARAMETER Experiment Name: At_Roots__P Parameter: Tissue Value: Roots vs. Whole Plant
  misc_feature: MA Experiment ID: 20000452 Result: Down-regulated in Transcription
  misc_feature: MA Experiment 20000452 PARAMETER Experiment Name: At_CS6879_Shoots-Roots_P Parameter: Age (day) Value: 14
  misc_feature: MA Experiment 20000452 PARAMETER Experiment Name: At_CS6879_Shoots-Roots_P Parameter: Organism Value: A. thaliana
  misc_feature: MA Experiment 20000452 PARAMETER Experiment Name: At_CS6879_Shoots-Roots_P Parameter: Plant Line Value: CS6879 vs. WS
  misc_feature: MA Experiment 20000452 PARAMETER Experiment Name: At_CS6879_Shoots-Roots_P Parameter: Tissue Value: Shoots
  misc_feature: MA Experiment ID: 20001248 Result: Down-regulated in Transcription
  misc_feature: MA Experiment 20001248 PARAMETER Experiment Name: At_Far-red-induction_P Parameter: Age (day) Value: 7
  misc_feature: MA Experiment 20001248 PARAMETER Experiment Name: At_Far-red-induction_P Parameter: Light Value: Far-red vs. White
  misc_feature: MA Experiment 20001248 PARAMETER Experiment Name: At_Far-red-induction_P Parameter: Organism Value: A. thaliana
  misc_feature: MA Experiment 20001248 PARAMETER Experiment Name: At_Far-red-induction_P Parameter: Plant Line Value: Columbia
  misc_feature: MA Experiment 20001248 PARAMETER Experiment Name: At_Far-red-induction_P Parameter: Timepoint (hr) Value: 4
  misc_feature: MA Experiment 20001248 PARAMETER Experiment Name: At_Far-red-induction_P Parameter: Tissue Value: Whole Plant
  misc_feature: MA Experiment ID: 20001450 Result: Down-regulated in Transcription
  misc_feature: MA Experiment 20001450 PARAMETER Experiment Name: At_Far-red-induction_P Parameter: Age (day) Value: 7
  misc_feature: MA Experiment 20001450 PARAMETER Experiment Name: At_Far-red-induction_P Parameter: Light Value: Far-red vs. White
  misc_feature: MA Experiment 20001450 PARAMETER Experiment Name: At_Far-red-induction_P Parameter: Organism Value: A. thaliana
  misc_feature: MA Experiment 20001450 PARAMETER Experiment Name: At_Far-red-induction_P Parameter: Plant Line Value: Columbia
  misc_feature: MA Experiment 20001450 PARAMETER Experiment Name: At_Far-red-induction_P Parameter: Timepoint (hr) Value: 8
  misc_feature: MA Experiment 20001450 PARAMETER Experiment Name: At_Far-red-induction_P Parameter: Tissue Value: Whole Plant
  misc_feature: Pfam Name: Glyco_hydro_1 Pfam Description: Glycosyl hydrolase family 1
atggaaaagacttttgctctgattaccatttttcttgcttttgctttctccgggaaatgcagcgacgttttcagcagatgtgattttcctgagggattcgtctttggatcttccacttctgcttatcagtgggaaggagctgttgcggaagacggaaggaaacctagtgtctgggacagattttgtcactcacataataaccaaggtaacggagatataacatgtgatgggtatcacaaatacaaggaagatgtgaagttgatggtggacactaacttagatgctttcagattctccatctcttggtctaggctaatacctaatagaagaggccctgttaaccaaaagggtcttcagttctacaagaatcttatccaagaattagtaaaccatggaattgaaccatatgttacactgcaccactttgatcatcctcaatatcttgaggacgaatatgaaggatggctcaaccacatgatcgtcgaagactttactgcttatgcagatgtttgcttcagagagtttggaaaccatgtcaaattctggaccacgatcaacgagggcaatatattctctattggaggttacaacgatggggattcaccgcctggtcgttgttccataccaggccaaaactgcttattagggaactcttccactgaaccatatattgtaggccataatttgttgcttgcgcacgcctctgtttcaagactatataagcaaaattacaaggataagcagggaggttccataggctttagcatattgacgatagggtttagtccttccacaagctccaaagatgatgccattgcaactcaaagagccaacgatttcttcaacggctggatgcttgggcctcttatatatggagactatccggatacaatgaaaagaatcgtcggatcaagaatgcccgttttctcggaggaagaatcagaacaagtgaaaggctcatctgactatataggaatcaatcactatcttgcagcttctatcacaaacagcaaactgaaaccttctatttcaggaaaccctgatttctactcagacatgaaccagagctatggcaatcctcctgtctacgttcttgagaatggtcgaccgataaatcgagattcgcagttgaaagaaaaggacacaccaaggattgagttcttacaagcttacattggtggtgtgctgaaatccattaggaatggatcagatacgagaggctactttgtatggtcacttatggatttatacgagattaaggggggatacgatgttggttatggattgtactctgtcaatttcagtgatcctcatcgcaaaagatctcccaaactctctgctcattggtattctgattttctcaagggcaaaaccgcttttcttggttctcaaggcatcacggaattgcagagcaacctctctccttactcctag

SEQ ID NO: 73136 - protein, 477 aa, Arabidopsis thaliana
  peptide (1)..(477): Ceres Seq. ID no. 4958939
  misc_feature: Pfam Name: Glyco_hydro_1 Pfam Description: Glycosyl hydrolase family 1
  misc_feature (1)..(477): Homolog of NCBI NO: 15219037 NR Description: glycosyl hydrolase family 1; protein id:
  misc_feature (127)..(368): Homolog of NCBI NO: 7435448 NR Description: hypothetical protein T13D8.16 - Arabidopsis >gi|3249076|gb|AAC24060.1| Similar to beta glucosidase (bg1A)
  misc_feature (369)..(477): Homolog of NCBI NO: 7435448 NR Description: hypothetical protein T13D8.16 - Arabidopsis >gi|3249076|gb|AAC24060.1| Similar to beta glucosidase (bg1A)
  misc_feature (1)..(109): Homolog of NCBI NO: 7435448 NR Description: hypothetical protein T13D8.16 - Arabidopsis >gi|3249076|gb|AAC24060.1| Similar to beta glucosidase (bg1A)
  misc_feature (1)..(358): Homolog of NCBI NO: 22330338 NR Description: glycosyl hydrolase family 1; protein id:
  misc_feature (353)..(474): Homolog of NCBI NO: 22330338 NR Description: glycosyl hydrolase family 1; protein id:
  misc_feature (82)..(132): Homolog of NCBI NO: 7435448 NR Description: hypothetical protein T13D8.16 - Arabidopsis >gi|3249076|gb|AAC24060.1| Similar to beta glucosidase (bg1A)
  misc_feature (1)..(356): Homolog of NCBI NO: 25289447 NR Description: hypothetical protein T2K10.15 [imported] - thaliana >gi|4249391|gb|AAD14488.1|AAD14488 Similar to gi|3249076
  misc_feature (353)..(474): Homolog of NCBI NO: 25289447 NR Description: hypothetical protein T2K10.15 [imported] - thaliana >gi|4249391|gb|AAD14488.1|AAD14488 Similar to gi|3249076
  misc_feature (1)..(356): Homolog of NCBI NO: 22328869 NR Description: glycosyl hydrolase family 1; protein id:
MEKTFALITIFLAFAFSGKCSDVFSRCDFPEGFVFGSSTSAYQWEGAVAEDGRKPSVWDRFCHSHNNQGNGDITCDGYHKYKEDVKLMVDTNLDAFRFSISWSRLIPNRRGPVNQKGLQFYKNLIQELVNHGIEPYVTLHHFDHPQYLEDEYEGWLNHMIVEDFTAYADVCFREFGNHVKFWTTINEGNIFSIGGYNDGDSPPGRCSIPGQNCLLGNSSTEPYIVGHNLLLAHASVSRLYKQNYKDKQGGSIGFSILTIGFSPSTSSKDDAIATQRANDFFNGWMLGPLIYGDYPDTMKRIVGSRMPVFSEEESEQVKGSSDYIGINHYLAASITNSKLKPSISGNPDFYSDMNQSYGNPPVYVLENGRPINRDSQLKEKDTPRIEFLQAYIGGVLKSIRNGSDTRGYFVWSLMDLYEIKGGYDVGYGLYSVNFSDPHRKRSPKLSAHWYSDFLKGKTAFLGSQGITELQSNLSPYS

SEQ ID NO: 73137 - protein, 390 aa, Arabidopsis thaliana
  peptide (1)..(390): Ceres Seq. ID no. 4958940
  misc_feature: Pfam Name: Glyco_hydro_1 Pfam Description: Glycosyl hydrolase family 1
  misc_feature (1)..(390): Homolog of NCBI NO: 15219037 NR Description: glycosyl hydrolase family 1; protein id:
  misc_feature (40)..(281): Homolog of NCBI NO: 7435448 NR Description: hypothetical protein T13D8.16 - Arabidopsis >gi|3249076|gb|AAC24060.1| Similar to beta glucosidase (bg1A)
  misc_feature (282)..(390): Homolog of NCBI NO: 7435448 NR Description: hypothetical protein T13D8.16 - Arabidopsis >gi|3249076|gb|AAC24060.1| Similar to beta glucosidase (bg1A)
  misc_feature (1)..(22): Homolog of NCBI NO: 7435448 NR Description: hypothetical protein T13D8.16 - Arabidopsis >gi|3249076|gb|AAC24060.1| Similar to beta glucosidase (bg1A)
  misc_feature (1)..(271): Homolog of NCBI NO: 22330338 NR Description: glycosyl hydrolase family 1; protein id:
  misc_feature (266)..(387): Homolog of NCBI NO: 22330338 NR Description: glycosyl hydrolase family 1; protein id:
  misc_feature (1)..(45): Homolog of NCBI NO: 7435448 NR Description: hypothetical protein T13D8.16 - Arabidopsis >gi|3249076|gb|AAC24060.1| Similar to beta glucosidase (bg1A)
  misc_feature (1)..(269): Homolog of NCBI NO: 25289447 NR Description: hypothetical protein T2K10.15 [imported] - thaliana >gi|4249391|gb|AAD14488.1|AAD14488 Similar to gi|3249076
  misc_feature (266)..(387): Homolog of NCBI NO: 25289447 NR Description: hypothetical protein T2K10.15 [imported] - thaliana >gi|4249391|gb|AAD14488.1|AAD14488 Similar to gi|3249076
  misc_feature (1)..(269): Homolog of NCBI NO: 22328869 NR Description: glycosyl hydrolase family 1; protein id:
MVDTNLDAFRFSISWSRLIPNRRGPVNQKGLQFYKNLIQELVNHGIEPYVTLHHFDHPQYLEDEYEGWLNHMIVEDFTAYADVCFREFGNHVKFWTTINEGNIFSIGGYNDGDSPPGRCSIPGQNCLLGNSSTEPYIVGHNLLLAHASVSRLYKQNYKDKQGGSIGFSILTIGFSPSTSSKDDAIATQRANDFFNGWMLGPLIYGDYPDTMKRIVGSRMPVFSEEESEQVKGSSDYIGINHYLAASITNSKLKPSISGNPDFYSDMNQSYGNPPVYVLENGRPINRDSQLKEKDTPRIEFLQAYIGGVLKSIRNGSDTRGYFVWSLMDLYEIKGGYDVGYGLYSVNFSDPHRKRSPKLSAHWYSDFLKGKTAFLGSQGITELQSNLSPYS

SEQ ID NO: 73138 - protein, 319 aa, Arabidopsis thaliana
  peptide (1)..(319): Ceres Seq. ID no. 4958941
  misc_feature: Pfam Name: Glyco_hydro_1 Pfam Description: Glycosyl hydrolase family 1
  misc_feature (1)..(319): Homolog of NCBI NO: 15219037 NR Description: glycosyl hydrolase family 1; protein id:
  misc_feature (1)..(210): Homolog of NCBI NO: 7435448 NR Description: hypothetical protein T13D8.16 - Arabidopsis >gi|3249076|gb|AAC24060.1| Similar to beta glucosidase (bg1A)
  misc_feature (211)..(319): Homolog of NCBI NO: 7435448 NR Description: hypothetical protein T13D8.16 - Arabidopsis >gi|3249076|gb|AAC24060.1| Similar to beta glucosidase (bg1A)
  misc_feature (1)..(200): Homolog of NCBI NO: 22330338 NR Description: glycosyl hydrolase family 1; protein id:
  misc_feature (195)..(316): Homolog of NCBI NO: 22330338 NR Description: glycosyl hydrolase family 1; protein id:
  misc_feature (1)..(198): Homolog of NCBI NO: 25289447 NR Description: hypothetical protein T2K10.15 [imported] - thaliana >gi|4249391|gb|AAD14488.1|AAD14488 Similar to gi|3249076
  misc_feature (195)..(316): Homolog of NCBI NO: 25289447 NR Description: hypothetical protein T2K10.15 [imported] - thaliana >gi|4249391|gb|AAD14488.1|AAD14488 Similar to gi|3249076
  misc_feature (1)..(198): Homolog of NCBI NO: 22328869 NR Description: glycosyl hydrolase family 1; protein id:
  misc_feature (195)..(316): Homolog of NCBI NO: 22328869 NR Description: glycosyl hydrolase family 1; protein id:
  misc_feature (1)..(158): Homolog of NCBI NO: 15219036 NR Description: glycosyl hydrolase family 1; protein id:
MIVEDFTAYADVCFREFGNHVKFWTTINEGNIFSIGGYNDGDSPPGRCSIPGQNCLLGNSSTEPYIVGHNLLLAHASVSRLYKQNYKDKQGGSIGFSILTIGFSPSTSSKDDAIATQRANDFFNGWMLGPLIYGDYPDTMKRIVGSRMPVFSEEESEQVKGSSDYIGINHYLAASITNSKLKPSISGNPDFYSDMNQSYGNPPVYVLENGRPINRDSQLKEKDTPRIEFLQAYIGGVLKSIRNGSDTRGYFVWSLMDLYEIKGGYDVGYGLYSVNFSDPHRKRSPKLSAHWYSDFLKGKTAFLGSQGITELQSNLSPYS

SEQ ID NO: 73139 - DNA, 2445 bp, Arabidopsis thaliana
  misc_feature (1)..(2445): Ceres Seq. ID no. 4959201
  misc_feature: MA Experiment ID: 20000182 Result: Up-regulated in Transcription
  misc_feature: MA Experiment 20000182 PARAMETER Experiment Name: At_2mM_SA_P Parameter: Age (day) Value: 14
  misc_feature: MA Experiment 20000182 PARAMETER Experiment Name: At_2mM_SA_P Parameter: Organism Value: A. thaliana
  misc_feature: MA Experiment 20000182 PARAMETER Experiment Name: At_2mM_SA_P Parameter: Plant Line Value: WS
  misc_feature: MA Experiment 20000182 PARAMETER Experiment Name: At_2mM_SA_P Parameter: Timepoint (hr) Value: 6
  misc_feature: MA Experiment 20000182 PARAMETER Experiment Name: At_2mM_SA_P Parameter: Tissue Value: Aerial
  misc_feature: MA Experiment 20000182 PARAMETER Experiment Name: At_2mM_SA_P Parameter: Treatment Value: 2mM SA vs. No Treatment
  misc_feature: MA Experiment ID: 20000185 Result: Up-regulated in Transcription
  misc_feature: MA Experiment 20000185 PARAMETER Experiment Name: At_Roots__P Parameter: Age (day) Value: 7 vs. 21
  misc_feature: MA Experiment 20000185 PARAMETER Experiment Name: At_Roots__P Parameter: Organism Value: A. thaliana
  misc_feature: MA Experiment 20000185 PARAMETER Experiment Name: At_Roots__P Parameter: Tissue Value: Roots vs. Whole Plant
  misc_feature: MA Experiment ID: 20000234 Result: Up-regulated in Transcription
  misc_feature: MA Experiment 20000234 PARAMETER Experiment Name: At_Siliques_P Parameter: Age (day) Value: 21
  misc_feature: MA Experiment 20000234 PARAMETER Experiment Name: At_Siliques_P Parameter: Organism Value: A. thaliana
  misc_feature: MA Experiment 20000234 PARAMETER Experiment Name: At_Siliques_P Parameter: Plant Line Value: WS
  misc_feature: MA Experiment 20000234 PARAMETER Experiment Name: At_Siliques_P Parameter: Tissue Value: Less Than 5mm Siliques vs. Whole Plant
  misc_feature: MA Experiment ID: 20000235 Result: Up-regulated in Transcription
  misc_feature: MA Experiment 20000235 PARAMETER Experiment Name: At_Siliques_P Parameter: Age (day) Value: 21
  misc_feature: MA Experiment 20000235 PARAMETER Experiment Name: At_Siliques_P Parameter: Organism Value: A. thaliana
  misc_feature: MA Experiment 20000235 PARAMETER Experiment Name: At_Siliques_P Parameter: Plant Line Value: WS
  misc_feature: MA Experiment 20000235 PARAMETER Experiment Name: At_Siliques_P Parameter: Tissue Value: 5-10mm Siliques vs. Whole Plant
  misc_feature: MA Experiment ID: 20000265 Result: Up-regulated in Transcription
  misc_feature: MA Experiment 20000265 PARAMETER Experiment Name: At_Open_Flower_P Parameter: Age (day) Value: 21
  misc_feature: MA Experiment 20000265 PARAMETER Experiment Name: At_Open_Flower_P Parameter: Plant Line Value: WS
  misc_feature: MA Experiment 20000265 PARAMETER Experiment Name: At_Open_Flower_P Parameter: Tissue Value: Closed Flower vs. Whole Plant
  misc_feature: MA Experiment ID: 20000439 Result: Up-regulated in Transcription
  misc_feature: MA Experiment 20000439 PARAMETER Experiment Name: At_Roots__P Parameter: Age (day) Value: 14 vs. 21
  misc_feature: MA Experiment 20000439 PARAMETER Experiment Name: At_Roots__P Parameter: Organism Value: A. thaliana
  misc_feature: MA Experiment 20000439 PARAMETER Experiment Name: At_Roots__P Parameter: Tissue Value: Roots vs. Whole Plant
  misc_feature: MA Experiment ID: 20000451 Result: Down-regulated in Transcription
  misc_feature: MA Experiment 20000451 PARAMETER Experiment Name: At_CS6879_Shoots-Roots_P Parameter: Age (day) Value: 14
  misc_feature: MA Experiment 20000451 PARAMETER Experiment Name: At_CS6879_Shoots-Roots_P Parameter: Organism Value: A. thaliana
  misc_feature: MA Experiment 20000451 PARAMETER Experiment Name: At_CS6879_Shoots-Roots_P Parameter: Plant Line Value: CS6879 vs. WS
  misc_feature: MA Experiment 20000451 PARAMETER Experiment Name: At_CS6879_Shoots-Roots_P Parameter: Tissue Value: Roots
  misc_feature: MA Experiment ID: 20000794 Result: Up-regulated in Transcription
  misc_feature: MA Experiment 20000794 PARAMETER Experiment Name: At_Petals_P Parameter: Age (day) Value: 23-25 days
  misc_feature: MA Experiment 20000794 PARAMETER Experiment Name: At_Petals_P Parameter: Plant Line Value: WS
  misc_feature: MA Experiment 20000794 PARAMETER Experiment Name: At_Petals_P Parameter: Tissue Value: Petals vs. Whole plant
atgggaaagattggtattgttttctttgcttcgttgctcttcttgctaattatattcccaagttgtgcctttgcagctataaccagagcaagtcctttgtcaataggacaaactctgagctcccctaatggaacttatgagttagggttcttcagtccaaacaactctcggaatcagtatgttgggatctggttcaagaacatcacccctcgggttgttgtctgggtggctaacagagataagccagttacaaacaacgcagcgaatctcactatcaacagcaatgggagccttatcttggttgagagagaacaaaatgttgtttggtcaataggagaaactttctcttctaacgagcttcgtgctgagctattagaaaacggaaatcttgtactcattgatggagtttcagaaagaaacttatgggaaagtttcgagcatcttggtgatactatgttacttgaatcatctgtgatgtatgatgttccgaataacaagaaacgtgttttatcttcttggaaaaatcccaccgatccttcacctggagaattcgtagctgagcttacgacacaagtacctccgcaaggctttataatgagaggatccaggccttactggagaggtggtccatgggcaagggtaaggttcaccggcataccagaaatggatggatcacatgtaagcaaattcgacatttcccaagatgttgcagccggcacaggatctttgacttattcattagaacgaagaaattcgaacctgtcgtacactacgctcacatcagcgggatcgttaaagatcatttggaataatggctctggttgggttactgacttggaggcccctgtaagctcatgtgatgtttataatacatgtggaccttttggcttgtgtataagatctaatcccccaaagtgtgaatgcttgaaaggctttgtaccaaaatcagatgaggagtggaataaaaggaattggactggtggttgtatgagaagaacaaatttatcttgtgatgtgaactcttctgcaacagcacaagccaataatggagacatcttcgacatagttgcaaatgtgaagcctccagacttttatgaatatctaagtttgatcaatgaagaggattgccaacaacgttgtcttggaaactgttcttgcacggcattttcctatattgaacaaattggatgtttggtatggaatcgagagcttgtggatgtaatgcagtttgttgctggaggagaaactctttccattcgtcttgcaagttctgagttagctggaagcaatcgagtgaagattattgttgctagcattgtcagcatttctgttttcatgatcttggtttttgcctcttattggtactggagatacaaagccaaacaaaatgattcaaatcctataccattggagacatcacaagatgcatggagggaacaactgaaaccacaagatgtaaatttctttgatatgcaaaccatattaactatcaccaataactttagcatggaaaataagcttggtcaaggtggattcggtccagtgtataagggaaatctacaagatgggaaagaaatagccataaaacgcctttcgagcacctctggacagggtctagaggagttcatgaatgaaataatactcatctcgaaactccaacacagaaacttggtccgccttttgggatgttgcattgaaggagaagaaaagctattgatttatgagtttatggcgaacaaaagcctcaatacctttatctttgattcgacgaaaaagcttgagcttgattggcccaagcggtttgaaatcattcaaggtattgcttgcggacttctttatcttcaccgcgactcatgtcttagggttgtacaccgagatatgaaggtcagcaacatccttttagacgaggaaatgaacccaaaaatatcagattttggattggctcggatgtttcaaggaacccaacatcaagccaacactcgcagggttgttggaacgctcggatacatgtctccagagtatgcttggacaggcatgttctctgagaaatccgacatctacgcatttggagttctgctattggaaatcataaccggcaagaggatttcaagtttcaccattggagaggaaggcaaaactcttcttgaatttgcatgggattcttggtgcgaaagcggtggatcggatctactggaccaagatatctctagctcgggttctgaatccgaagtagcgagatgtgttcagattggtttgctctgtattcaacaacaagccggggatagacccaacattgcacaagtaatgtcaatgcttacaaccacaatggatcttccgaaaccaaaacaacccgtattcgcaatgcaagtccaagagagtgattcagagtctaagactatgtactctgtcaataatataacacaaactgctatagttggtcgataa

SEQ ID NO: 73140 - protein, 814 aa, Arabidopsis thaliana
  peptide (1)..(814): Ceres Seq. ID no. 4959202
  misc_feature (70)..(180): Pfam Name: D-mannose binding lectin Pfam Description: D-mannose binding lectin
  misc_feature (1)..(814): Homolog of NCBI NO: 15219917 NR Description: receptor kinase, putative; protein id: At1g61390.1
  misc_feature (4)..(814): Homolog of NCBI NO: 18407151 NR Description: expressed protein; protein id: At1g61380.1, by cDNA: 13461., supported by cDNA: gi_19699074 [Arabidopsis >gi|3056592|gb|AAC13903.1|AAC13903 T1F9.13 [Arabidopsis thaliana]
  misc_feature (4)..(814): Homolog of NCBI NO: 21537374 NR Description: receptor kinase, putative [Arabidopsis thaliana]
  misc_feature (1)..(814): Homolog of NCBI NO: 18391259 NR Description: serine/threonine kinase, putative; protein id:
  misc_feature (1)..(814): Homolog of NCBI NO: 30682149 NR Description: S-locus protein kinase, putative [Arabidopsis
  misc_feature (1)..(814): Homolog of NCBI NO: 15810423 NR Description: putative serine/threonine kinase [Arabidopsis
  misc_feature (1)..(814): Homolog of NCBI NO: 30682152 NR Description: S-locus protein kinase, putative [Arabidopsis
  misc_feature (1)..(814): Homolog of NCBI NO: 24417324 NR Description: unknown [Arabidopsis thaliana]
  misc_feature (1)..(814): Homolog of NCBI NO: 15219933 NR Description: receptor protein kinase (IRK1), putative; protein
  misc_feature (250)..(690): Homolog of NCBI NO: 30696575 NR Description: S-locus protein kinase, putative [Arabidopsis
MGKIGIVFFASLLFLLIIFPSCAFAAITRASPLSIGQTLSSPNGTYELGFFSPNNSRNQYVGIWFKNITPRVVVWVANRDKPVTNNAANLTINSNGSLILVEREQNVVWSIGETFSSNELRAELLENGNLVLIDGVSERNLWESFEHLGDTMLLESSVMYDVPNNKKRVLSSWKNPTDPSPGEFVAELTTQVPPQGFIMRGSRPYWRGGPWARVRFTGIPEMDGSHVSKFDISQDVAAGTGSLTYSLERRNSNLSYTTLTSAGSLKIIWNNGSGWVTDLEAPVSSCDVYNTCGPFGLCIRSNPPKCECLKGFVPKSDEEWNKRNWTGGCMRRTNLSCDVNSSATAQANNGDIFDIVANVKPPDFYEYLSLINEEDCQQRCLGNCSCTAFSYIEQIGCLVWNRELVDVMQFVAGGETLSIRLASSELAGSNRVKIIVASIVSISVFMILVFASYWYWRYKAKQNDSNPIPLETSQDAWREQLKPQDVNFFDMQTILTITNNFSMENKLGQGGFGPVYKGNLQDGKEIAIKRLSSTSGQGLEEFMNEIILISKLQHRNLVRLLGCCIEGEEKLLIYEFMANKSLNTFIFDSTKKLELDWPKRFEIIQGIACGLLYLHRDSCLRVVHRDMKVSNILLDEEMNPKISDFGLARMFQGTQHQANTRRVVGTLGYMSPEYAWTGMFSEKSDIYAFGVLLLEIITGKRISSFTIGEEGKTLLEFAWDSWCESGGSDLLDQDISSSGSESEVARCVQIGLLCIQQQAGDRPNIAQVMSMLTTTMDLPKPKQPVFAMQVQESDSESKTMYSVNNITQTAIVGR

SEQ ID NO: 73141 - protein, 663 aa, Arabidopsis thaliana
  peptide (1)..(663): Ceres Seq. ID no. 4959203
  misc_feature (1)..(663): Homolog of NCBI NO: 15219917 NR Description: receptor kinase, putative; protein id: At1g61390.1
  misc_feature (1)..(663): Homolog of NCBI NO: 18407151 NR Description: expressed protein; protein id: At1g61380.1, by cDNA: 13461., supported by cDNA: gi_19699074 [Arabidopsis >gi|3056592|gb|AAC13903.1|AAC13903 T1F9.13 [Arabidopsis thaliana]
  misc_feature (1)..(663): Homolog of NCBI NO: 21537374 NR Description: receptor kinase, putative [Arabidopsis thaliana]
  misc_feature (1)..(663): Homolog of NCBI NO: 18391259 NR Description: serine/threonine kinase, putative; protein id:
  misc_feature (1)..(663): Homolog of NCBI NO: 30682149 NR Description: S-locus protein kinase, putative [Arabidopsis
  misc_feature (1)..(663): Homolog of NCBI NO: 15810423 NR Description: putative serine/threonine kinase [Arabidopsis
  misc_feature (1)..(663): Homolog of NCBI NO: 30682152 NR Description: S-locus protein kinase, putative [Arabidopsis
  misc_feature (1)..(663): Homolog of NCBI NO: 24417324 NR Description: unknown [Arabidopsis thaliana]
  misc_feature (1)..(663): Homolog of NCBI NO: 15219933 NR Description: receptor protein kinase (IRK1), putative; protein
  misc_feature (99)..(539): Homolog of NCBI NO: 30696575 NR Description: S-locus protein kinase, putative [Arabidopsis
MLLESSVMYDVPNNKKRVLSSWKNPTDPSPGEFVAELTTQVPPQGFIMRGSRPYWRGGPWARVRFTGIPEMDGSHVSKFDISQDVAAGTGSLTYSLERRNSNLSYTTLTSAGSLKIIWNNGSGWVTDLEAPVSSCDVYNTCGPFGLCIRSNPPKCECLKGFVPKSDEEWNKRNWTGGCMRRTNLSCDVNSSATAQANNGDIFDIVANVKPPDFYEYLSLINEEDCQQRCLGNCSCTAFSYIEQIGCLVWNRELVDVMQFVAGGETLSIRLASSELAGSNRVKIIVASIVSISVFMILVFASYWYWRYKAKQNDSNPIPLETSQDAWREQLKPQDVNFFDMQTILTITNNFSMENKLGQGGFGPVYKGNLQDGKEIAIKRLSSTSGQGLEEFMNEIILISKLQHRNLVRLLGCCIEGEEKLLIYEFMANKSLNTFIFDSTKKLELDWPKRFEIIQGIACGLLYLHRDSCLRVVHRDMKVSNILLDEEMNPKISDFGLARMFQGTQHQANTRRVVGTLGYMSPEYAWTGMFSEKSDIYAFGVLLLEIITGKRISSFTIGEEGKTLLEFAWDSWCESGGSDLLDQDISSSGSESEVARCVQIGLLCIQQQAGDRPNIAQVMSMLTTTMDLPKPKQPVFAMQVQESDSESKTMYSVNNITQTAIVGR

SEQ ID NO: 73142 - protein, 656 aa, Arabidopsis thaliana
  peptide (1)..(656): Ceres Seq. ID no. 4959204
  misc_feature (1)..(656): Homolog of NCBI NO: 15219917 NR Description: receptor kinase, putative; protein id: At1g61390.1
  misc_feature (1)..(656): Homolog of NCBI NO: 18407151 NR Description: expressed protein; protein id: At1g61380.1, by cDNA: 13461., supported by cDNA: gi_19699074 [Arabidopsis >gi|3056592|gb|AAC13903.1|AAC13903 T1F9.13 [Arabidopsis thaliana]
  misc_feature (1)..(656): Homolog of NCBI NO: 21537374 NR Description: receptor kinase, putative [Arabidopsis thaliana]
  misc_feature (1)..(656): Homolog of NCBI NO: 18391259 NR Description: serine/threonine kinase, putative; protein id:
  misc_feature (1)..(656): Homolog of NCBI NO: 30682149 NR Description: S-locus protein kinase, putative [Arabidopsis
  misc_feature (1)..(656): Homolog of NCBI NO: 15810423 NR Description: putative serine/threonine kinase [Arabidopsis
  misc_feature (1)..(656): Homolog of NCBI NO: 30682152 NR Description: S-locus protein kinase, putative [Arabidopsis
  misc_feature (1)..(656): Homolog of NCBI NO: 24417324 NR Description: unknown [Arabidopsis thaliana]
  misc_feature (1)..(656): Homolog of NCBI NO: 15219933 NR Description: receptor protein kinase (IRK1), putative; protein
  misc_feature (92)..(532): Homolog of NCBI NO: 30696575 NR Description: S-locus protein kinase, putative [Arabidopsis
MYDVPNNKKRVLSSWKNPTDPSPGEFVAELTTQVPPQGFIMRGSRPYWRGGPWARVRFTGIPEMDGSHVSKFDISQDVAAGTGSLTYSLERRNSNLSYTTLTSAGSLKIIWNNGSGWVTDLEAPVSSCDVYNTCGPFGLCIRSNPPKCECLKGFVPKSDEEWNKRNWTGGCMRRTNLSCDVNSSATAQANNGDIFDIVANVKPPDFYEYLSLINEEDCQQRCLGNCSCTAFSYIEQIGCLVWNRELVDVMQFVAGGETLSIRLASSELAGSNRVKIIVASIVSISVFMILVFASYWYWRYKAKQNDSNPIPLETSQDAWREQLKPQDVNFFDMQTILTITNNFSMENKLGQGGFGPVYKGNLQDGKEIAIKRLSSTSGQGLEEFMNEIILISKLQHRNLVRLLGCCIEGEEKLLIYEFMANKSLNTFIFDSTKKLELDWPKRFEIIQGIACGLLYLHRDSCLRVVHRDMKVSNILLDEEMNPKISDFGLARMFQGTQHQANTRRVVGTLGYMSPEYAWTGMFSEKSDIYAFGVLLLEIITGKRISSFTIGEEGKTLLEFAWDSWCESGGSDLLDQDISSSGSESEVARCVQIGLLCIQQQAGDRPNIAQVMSMLTTTMDLPKPKQPVFAMQVQESDSESKTMYSVNNITQTAIVGR

SEQ ID NO: 73143 - DNA, 1161 bp, Arabidopsis thaliana
  misc_feature (1)..(1161): Ceres Seq. ID no. 4959236
  misc_feature: MA Experiment ID: 20000113 Result: Down-regulated in Transcription
  misc_feature: MA Experiment 20000113 PARAMETER Experiment Name: At_42deg_Heat_cDNA_P Parameter: Temperature (deg C) Value: 42 vs. 22
  misc_feature: MA Experiment 20000113 PARAMETER Experiment Name: At_42deg_Heat_cDNA_P Parameter: Timepoint (hr) Value: 8
  misc_feature: MA Experiment 20000113 PARAMETER Experiment Name: At_42deg_Heat_cDNA_P Parameter: Tissue Value: Aerial
  misc_feature: MA Experiment ID: 20000495 Result: Down-regulated in Transcription
  misc_feature: MA Experiment 20000495 PARAMETER Experiment Name: At_Guard_Cells_P Parameter: Harvest Date Value: 8/2/2002
  misc_feature: MA Experiment 20000495 PARAMETER Experiment Name: At_Guard_Cells_P Parameter: Organism Value: A. thaliana
  misc_feature: MA Experiment 20000495 PARAMETER Experiment Name: At_Guard_Cells_P Parameter: Tissue Value: Guard Cells vs. Leaves
  misc_feature: Pfam Name: LisH Pfam Description: LisH
aaacctccaacttttttttgttttatcagattgtaaatttagggaagagactttcgcaagcaatctagaagcaaatcgatcgccaaatctccggattatttgcaagaatcgttcccagataatcttccccagattctccacttctccagctctgatcggagtgttgctcgaacagcttgaagaagacgacgaagatatggctacttcgaagaaaatgatcacacgtgaagaatgggagaagaaactaaatgctgtgaagcttaggaaagaagatatgaatactttggtgatgaattttcttgtgactgaaggatatgttgaagctgctgagaaattccaaagggagtctggaaccaaaccagagatagatcttgcgaccattactgatcgaatggctgttaaaaaggctgttcaaaacggaaatgtcgaggatgcgattgaaaaagttaatgatttgaatcctgagatactagacacgaatccggagctcttttttcatcttcagcagcaaaggttgatagaattaattcgacaagggaagacagaagaggccttagagtttgctcaggaggaacttgcaccacgtggcgaagaaaaccaagcgtttctggaagaattggaaaaaactgtagccctacttgtttttgacgatgcctctacctgcccggttaaagagcttcttgatctttcccaccgtcttaagacagcaagtgaagtaaatgcagcgattcttacaagccagagccacgaaaaagatcctaaacttccaagcttgttgaagatgttgatttgggctcaaactcaactggacgagaaagcagtgtatccgcacattaatgatttgtctaccggtaagctcgaagacccgtcagaatgattccgtacttctttcagccattggaaatcagtagcaaaaaggaacaatgaatggtgctctcttctcttcccgtcaatctcaataacttacaattcatatgctttctgcttttccttttcttctgcatcgggatttgttggacccgcaatcgttaggatatggggaggggaacataagcttttgtaggcaatgaattactctagtcaaatgttcttattatcaacatatttgatgactcattgcatacgtgcatttgatttgaatgaagttatcgactttgtttg

SEQ ID NO: 73144 - protein, 291 aa, Arabidopsis thaliana
  peptide (1)..(291): Ceres Seq. ID no. 4959237
  misc_feature: Pfam Name: LisH Pfam Description: LisH
  misc_feature (50)..(291): Homolog of NCBI NO: 15219873 NR Description: hypothetical protein; protein id: At1g61150.1 thaliana] >gi|27808548|gb|AAO24554.1| At1g61150 [Arabidopsis
  misc_feature (50)..(283): Homolog of NCBI NO: 25404311 NR Description: hypothetical protein F11P17.12 [imported] - thaliana >gi|2443886|gb|AAB71479.1| Unknown protein [Arabidopsis
  misc_feature (66)..(290): Homolog of NCBI NO: 31296710 NR Description: PG4 [Hordeum vulgare]
  misc_feature (66)..(286): Homolog of NCBI NO: 30681030 NR Description: expressed protein [Arabidopsis thaliana]
  misc_feature (73)..(289): Homolog of NCBI NO: 20863687 NR Description: RIKEN cDNA 2310003C23 [Mus musculus] RIKEN cDNA 2310003C23 [Mus musculus] similar to RIKEN cDNA 2310003C23 [Mus musculus] [Rattus
  misc_feature (58)..(286): Homolog of NCBI NO: 26451919 NR Description: unknown protein [Arabidopsis thaliana]
  misc_feature (73)..(289): Homolog of NCBI NO: 8923557 NR Description: chromosome 20 open reading frame 11; two hybrid protein 1 [Homo sapiens] >gi|28201788|sp|Q9NWU2|CT11_HUMAN C20orf11 >gi|7020818|dbj|BAA91285.1| unnamed protein product
  misc_feature (66)..(289): Homolog of NCBI NO: 37748055 NR Description: Unknown (protein for MGC:73100) [Danio rerio]
  misc_feature (73)..(289): Homolog of NCBI NO: 21594655 NR Description: chromosome 20 open reading frame 11 [Homo sapiens]
  misc_feature (73)..(287): Homolog of NCBI NO: 31200387 NR Description: ENSANGP00000018568 [Anopheles gambiae]
NLQLFFVLSDCKFREETFASNLEANRSPNLRIICKNRSQIIFPRFSTSPALIGVLLEQLEEDDEDMATSKKMITREEWEKKLNAVKLRKEDMNTLVMNFLVTEGYVEAAEKFQRESGTKPEIDLATITDRMAVKKAVQNGNVEDAIEKVNDLNPEILDTNPELFFHLQQQRLIELIRQGKTEEALEFAQEELAPRGEENQAFLEELEKTVALLVFDDASTCPVKELLDLSHRLKTASEVNAAILTSQSHEKDPKLPSLLKMLIWAQTQLDEKAVYPHINDLSTGKLEDPSE

SEQ ID NO: 73145 - protein, 226 aa, Arabidopsis thaliana
  peptide (1)..(226): Ceres Seq. ID no. 4959238
  misc_feature: Pfam Name: LisH Pfam Description: LisH
  misc_feature (1)..(226): Homolog of NCBI NO: 15219873 NR Description: hypothetical protein; protein id: At1g61150.1 thaliana] >gi|27808548|gb|AAO24554.1| At1g61150 [Arabidopsis
  misc_feature (1)..(218): Homolog of NCBI NO: 25404311 NR Description: hypothetical protein F11P17.12 [imported] - thaliana >gi|2443886|gb|AAB71479.1| Unknown protein [Arabidopsis
  misc_feature (1)..(225): Homolog of NCBI NO: 31296710 NR Description: PG4 [Hordeum vulgare]
  misc_feature (1)..(221): Homolog of NCBI NO: 30681030 NR Description: expressed protein [Arabidopsis thaliana]
  misc_feature (8)..(224): Homolog of NCBI NO: 20863687 NR Description: RIKEN cDNA 2310003C23 [Mus musculus] RIKEN cDNA 2310003C23 [Mus musculus] similar to RIKEN cDNA 2310003C23 [Mus musculus] [Rattus
  misc_feature (1)..(221): Homolog of NCBI NO: 26451919 NR Description: unknown protein [Arabidopsis thaliana]
  misc_feature (8)..(224): Homolog of NCBI NO: 8923557 NR Description: chromosome 20 open reading frame 11; two hybrid protein 1 [Homo sapiens] >gi|28201788|sp|Q9NWU2|CT11_HUMAN C20orf11 >gi|7020818|dbj|BAA91285.1| unnamed protein product
  misc_feature (1)..(224): Homolog of NCBI NO: 37748055 NR Description: Unknown (protein for MGC:73100) [Danio rerio]
  misc_feature (8)..(224): Homolog of NCBI NO: 21594655 NR Description: chromosome 20 open reading frame 11 [Homo sapiens]
  misc_feature (8)..(222): Homolog of NCBI NO: 31200387 NR Description: ENSANGP00000018568 [Anopheles gambiae]
MATSKKMITREEWEKKLNAVKLRKEDMNTLVMNFLVTEGYVEAAEKFQRESGTKPEIDLATITDRMAVKKAVQNGNVEDAIEKVNDLNPEILDTNPELFFHLQQQRLIELIRQGKTEEALEFAQEELAPRGEENQAFLEELEKTVALLVFDDASTCPVKELLDLSHRLKTASEVNAAILTSQSHEKDPKLPSLLKMLIWAQTQLDEKAVYPHINDLSTGKLEDPSE

SEQ ID NO: 73146 - protein, 220 aa, Arabidopsis thaliana
  peptide (1)..(220): Ceres Seq. ID no. 4959239
  misc_feature: Pfam Name: LisH Pfam Description: LisH
  misc_feature (1)..(220): Homolog of NCBI NO: 15219873 NR Description: hypothetical protein; protein id: At1g61150.1 thaliana] >gi|27808548|gb|AAO24554.1| At1g61150 [Arabidopsis
  misc_feature (1)..(212): Homolog of NCBI NO: 25404311 NR Description: hypothetical protein F11P17.12 [imported] - thaliana >gi|2443886|gb|AAB71479.1| Unknown protein [Arabidopsis
  misc_feature (1)..(219): Homolog of NCBI NO: 31296710 NR Description: PG4 [Hordeum vulgare]
  misc_feature (1)..(215): Homolog of NCBI NO: 30681030 NR Description: expressed protein [Arabidopsis thaliana]
  misc_feature (2)..(218): Homolog of NCBI NO: 20863687 NR Description: RIKEN cDNA 2310003C23 [Mus musculus] RIKEN cDNA 2310003C23 [Mus musculus] similar to RIKEN cDNA 2310003C23 [Mus musculus] [Rattus
  misc_feature (1)..(215): Homolog of NCBI NO: 26451919 NR Description: unknown protein [Arabidopsis thaliana]
  misc_feature (2)..(218): Homolog of NCBI NO: 8923557 NR Description: chromosome 20 open reading frame 11; two hybrid protein 1 [Homo sapiens] >gi|28201788|sp|Q9NWU2|CT11_HUMAN C20orf11 >gi|7020818|dbj|BAA91285.1| unnamed protein product
  misc_feature (1)..(218): Homolog of NCBI NO: 37748055 NR Description: Unknown (protein for MGC:73100) [Danio rerio]
  misc_feature (2)..(218): Homolog of NCBI NO: 21594655 NR Description: chromosome 20 open reading frame 11 [Homo sapiens]
  misc_feature (2)..(216): Homolog of NCBI NO: 31200387 NR Description: ENSANGP00000018568 [Anopheles gambiae]
MITREEWEKKLNAVKLRKEDMNTLVMNFLVTEGYVEAAEKFQRESGTKPEIDLATITDRMAVKKAVQNGNVEDAIEKVNDLNPEILDTNPELFFHLQQQRLIELIRQGKTEEALEFAQEELAPRGEENQAFLEELEKTVALLVFDDASTCPVKELLDLSHRLKTASEVNAAILTSQSHEKDPKLPSLLKMLIWAQTQLDEKAVYPHINDLSTGKLEDPSE

SEQ ID NO: 73147 - DNA, 2466 bp, Arabidopsis thaliana
  misc_feature (1)..(2466): Ceres Seq. ID no. 4959248
  misc_feature: MA Experiment ID: 20000307 Result: Down-regulated in Transcription
  misc_feature: MA Experiment 20000307 PARAMETER Experiment Name: At_Germinating_Seeds_Sub_P Parameter: Age (hr) Value: 24 vs. 0
  misc_feature: MA Experiment 20000307 PARAMETER Experiment Name: At_Germinating_Seeds_Sub_P Parameter: Organism Value: A. thaliana
  misc_feature: MA Experiment 20000307 PARAMETER Experiment Name: At_Germinating_Seeds_Sub_P Parameter: Plant Line Value: WS
  misc_feature: MA Experiment 20000307 PARAMETER Experiment Name: At_Germinating_Seeds_Sub_P Parameter: Tissue Value: Germinating Seeds
  misc_feature: MA Experiment ID: 20000315 Result: Down-regulated in Transcription
  misc_feature: MA Experiment 20000315 PARAMETER Experiment Name: At_14day_Shoots-Roots_Sub_P Parameter: Age (day) Value: 14
  misc_feature: MA Experiment 20000315 PARAMETER Experiment Name: At_14day_Shoots-Roots_Sub_P Parameter: Organism Value: A. thaliana
  misc_feature: MA Experiment 20000315 PARAMETER Experiment Name: At_14day_Shoots-Roots_Sub_P Parameter: Plant Line Value: WS
  misc_feature: MA Experiment 20000315 PARAMETER Experiment Name: At_14day_Shoots-Roots_Sub_P Parameter: Tissue Value: Shoots vs. Whole Plant
  misc_feature: MA Experiment ID: 20000328 Result: Down-regulated in Transcription
  misc_feature: MA Experiment 20000328 PARAMETER Experiment Name: At_42deg_Heat_Sub_P Parameter: Age (day) Value: 14
  misc_feature: MA Experiment 20000328 PARAMETER Experiment Name: At_42deg_Heat_Sub_P Parameter: Organism Value: A. thaliana
  misc_feature: MA Experiment 20000328 PARAMETER Experiment Name: At_42deg_Heat_Sub_P Parameter: Plant Line Value: WS
  misc_feature: MA Experiment 20000328 PARAMETER Experiment Name: At_42deg_Heat_Sub_P Parameter: Temperature (deg C) Value: 42 vs. 22
  misc_feature: MA Experiment 20000328 PARAMETER Experiment Name: At_42deg_Heat_Sub_P Parameter: Timepoint (hr) Value: 6
  misc_feature: MA Experiment 20000328 PARAMETER Experiment Name: At_42deg_Heat_Sub_P Parameter: Tissue Value: Aerial
atggatttcttgttcttgttattggagagaaaaaataaacacatggggaagaagagggtcgtgttgctttggcttagcatctttataagttttagctctgcagagataacggaagagagccctttgtcaataggacaaactctcagctcctccaatggagtttatgaactgggcttcttcagttttaataactcccaaaatcagtatgtcggaatctccttcaagggtatcattccccgggtggttgtgtgggtggcaaatagagaaaagcctgttacagactctgcggcaaatctggttatcagcagcaacggaagtcttcagttatttaatggcaaacatggtgttgtgtggtccagtggaaaagctcttgcatctaacgggtctcgtgtagagcttttagacagtggaaatctagttgtcatagaaaaagtttcgggaagaactctatgggaaagttttgagcatcttggtgatactctgctccctcactcaactatcatgtataatgtccacaccggtgagaagcgagggttgacttcttggaaaagttacactgatccatcgcctggtgactttgtcgttctgattacaccgcaagtgccatcacaggggtttcttatgagaggctcgaccccttattttagatctggtccatgggctaaaacaaagttcaccgggttacctcaaatggatgaatcatacacaagtccattcagcttaacacaggatgtaaatgggtcaggatactattcgtattttgatagagacaacaaacgttcacgtattaggttaacaccagatggatcaatgaaggcgttacggtataatggaatggactgggacacaacctacgagggtcctgccaattcatgtgatatttatggcgtatgtggaccttttggtttttgtgttatctcagttcctccaaagtgtaaatgcttcaaaggttttattcctaaatccattgaggagtggaaaacaggaaactggactagtggttgtgtgaggcgtagcgaactacattgtcaaggaaactctactggcaaagatgcaaatgtcttccatactgttcccaacataaagcctccagacttttacgaatacgcagattctgtggatgcggaagaatgccaacaaaattgcctcaacaattgttcttgcttggccttcgcttatattcctggaatagggtgcttaatgtggagcaaggacctaatggacacagttcaatttgctgcaggaggagaacttctttccattcgtcttgcacgttctgagctagacgtaaataagcgcaagaagaccatcattgctattacagtgagccttaccctttttgtgatcttgggctttactgcgtttggtttctggagacgcagagtggaacaaaatgaagatgcatggaggaatgatctgcaaacacaagacgtcccaggtctagaatattttgagatgaataccatacaaactgccaccaataatttcagtctatcaaacaaactcggtcatggtggatttggttcagtttacaaggcgagaaacggaaaactgcaagatggaagggaaattgcggtaaaacgcctttctagcagctctgagcagggcaaacaggagttcatgaatgaaatagtactgatatcaaaactccaacacagaaacttagtccgggttttgggatgctgcgtcgaaggaacagagaagctattgatttatgagtttatgaaaaacaaaagccttgatacttttgtctttgtttttacacggtgtttttgcttagattcaaaaaaaaggcttgagatagattggccaaagagatttgatatcattcaaggtattgcacgtggacttctctatctccatcgtgactcacgcctcagaataattcaccgagacctgaaggtcagcaacattcttctggacgagaaaatgaacccgaaaatatcagattttgggttggctcggatgtttcatggaaccgaatatcaggataaaactcgcagggttgtcggaactctaggttatatgtctcctgagtatgcatgggctggagtattctctgagaaatcagacatctacagcttcggagttctactgctagaaatcatcagcggagagaagatctcgaggttcagctatggcgaagaaggaaaaacacttcttgcatatgcatgggaatgttggtgtggagcccgaggagttaatcttttggaccaagctcttggtgattcttgtcacccatatgaagttggaaggtgtgtccagattggtttgctttgtgttcaataccagcctgcagacagaccaaacacacttgagttgctttctatgcttaccacaacatcagatcttcctctgccaaaacaacctacatttgtagtgcacacgagagatggcaaatctccgtcaaatgattcgatgatcactgtcaatgagatgacagagtctgtgatccatggacgttga

SEQ ID NO: 73148 - protein, 821 aa, Arabidopsis thaliana
  peptide (1)..(821): Ceres Seq. ID no. 4959249
  misc_feature (79)..(189): Pfam Name: D-mannose binding lectin Pfam Description: D-mannose binding lectin
  misc_feature (14)..(821): Homolog of NCBI NO: 30682152 NR Description: S-locus protein kinase, putative [Arabidopsis
  misc_feature (14)..(821): Homolog of NCBI NO: 30682149 NR Description: S-locus protein kinase, putative [Arabidopsis
  misc_feature (256)..(696): Homolog of NCBI NO: 30696575 NR Description: S-locus protein kinase, putative [Arabidopsis
  misc_feature (699)..(821): Homolog of NCBI NO: 30696575 NR Description: S-locus protein kinase, putative [Arabidopsis
  misc_feature (161)..(231): Homolog of NCBI NO: 30696575 NR Description: S-locus protein kinase, putative [Arabidopsis
  misc_feature (12)..(427): Homolog of NCBI NO: 15220351 NR Description: receptor kinase, putative; protein id:
  misc_feature (481)..(821): Homolog of NCBI NO: 15220351 NR Description: receptor kinase, putative; protein id:
  misc_feature (130)..(821): Homolog of NCBI NO: 22208478 NR Description: receptor-like kinase [Sorghum bicolor]
  misc_feature (33)..(811): Homolog of NCBI NO: 25956275 NR Description: unnamed protein product [Lotus japonicus]
  misc_feature (216)..(821): Homolog of NCBI NO: 30314606 NR Description: S receptor kinase [Brassica rapa]
MDFLFLLLERKNKHMGKKRVVLLWLSIFISFSSAEITEESPLSIGQTLSSSNGVYELGFFSFNNSQNQYVGISFKGIIPRVVVWVANREKPVTDSAANLVISSNGSLQLFNGKHGVVWSSGKALASNGSRVELLDSGNLVVIEKVSGRTLWESFEHLGDTLLPHSTIMYNVHTGEKRGLTSWKSYTDPSPGDFVVLITPQVPSQGFLMRGSTPYFRSGPWAKTKFTGLPQMDESYTSPFSLTQDVNGSGYYSYFDRDNKRSRIRLTPDGSMKALRYNGMDWDTTYEGPANSCDIYGVCGPFGFCVISVPPKCKCFKGFIPKSIEEWKTGNWTSGCVRRSELHCQGNSTGKDANVFHTVPNIKPPDFYEYADSVDAEECQQNCLNNCSCLAFAYIPGIGCLMWSKDLMDTVQFAAGGELLSIRLARSELDVNKRKKTIIAITVSLTLFVILGFTAFGFWRRRVEQNEDAWRNDLQTQDVPGLEYFEMNTIQTATNNFSLSNKLGHGGFGSVYKARNGKLQDGREIAVKRLSSSSEQGKQEFMNEIVLISKLQHRNLVRVLGCCVEGTEKLLIYEFMKNKSLDTFVFVFTRCFCLDSKKRLEIDWPKRFDIIQGIARGLLYLHRDSRLRIIHRDLKVSNILLDEKMNPKISDFGLARMFHGTEYQDKTRRVVGTLGYMSPEYAWAGVFSEKSDIYSFGVLLLEIISGEKISRFSYGEEGKTLLAYAWECWCGARGVNLLDQALGDSCHPYEVGRCVQIGLLCVQYQPADRPNTLELLSMLTTTSDLPLPKQPTFVVHTRDGKSPSNDSMITVNEMTESVIHGR

SEQ ID NO: 73149 - protein, 807 aa, Arabidopsis thaliana
  peptide (1)..(807): Ceres Seq. ID no. 4959250
  misc_feature (65)..(175): Pfam Name: D-mannose binding lectin Pfam Description: D-mannose binding lectin
  misc_feature (1)..(807): Homolog of NCBI NO: 30682152 NR Description: S-locus protein kinase, putative [Arabidopsis
  misc_feature (1)..(807): Homolog of NCBI NO: 30682149 NR Description: S-locus protein kinase, putative [Arabidopsis
  misc_feature (242)..(682): Homolog of NCBI NO: 30696575 NR Description: S-locus protein kinase, putative [Arabidopsis
  misc_feature (685)..(807): Homolog of NCBI NO: 30696575 NR Description: S-locus protein kinase, putative [Arabidopsis
  misc_feature (147)..(217): Homolog of NCBI NO: 30696575 NR Description: S-locus protein kinase, putative [Arabidopsis
  misc_feature (1)..(413): Homolog of NCBI NO: 15220351 NR Description: receptor kinase, putative; protein id:
  misc_feature (467)..(807): Homolog of NCBI NO: 15220351 NR Description: receptor kinase, putative; protein id:
  misc_feature (116)..(807): Homolog of NCBI NO: 22208478 NR Description: receptor-like kinase [Sorghum bicolor]
  misc_feature (19)..(797): Homolog of NCBI NO: 25956275 NR Description: unnamed protein product [Lotus japonicus]
  misc_feature (202)..(807): Homolog of NCBI NO: 30314606 NR Description: S receptor kinase [Brassica rapa]
MGKKRVVLLWLSIFISFSSAEITEESPLSIGQTLSSSNGVYELGFFSFNNSQNQYVGISFKGIIPRVVVWVANREKPVTDSAANLVISSNGSLQLFNGKHGVVWSSGKALASNGSRVELLDSGNLVVIEKVSGRTLWESFEHLGDTLLPHSTIMYNVHTGEKRGLTSWKSYTDPSPGDFVVLITPQVPSQGFLMRGSTPYFRSGPWAKTKFTGLPQMDESYTSPFSLTQDVNGSGYYSYFDRDNKRSRIRLTPDGSMKALRYNGMDWDTTYEGPANSCDIYGVCGPFGFCVISVPPKCKCFKGFIPKSIEEWKTGNWTSGCVRRSELHCQGNSTGKDANVFHTVPNIKPPDFYEYADSVDAEECQQNCLNNCSCLAFAYIPGIGCLMWSKDLMDTVQFAAGGELLSIRLARSELDVNKRKKTIIAITVSLTLFVILGFTAFGFWRRRVEQNEDAWRNDLQTQDVPGLEYFEMNTIQTATNNFSLSNKLGHGGFGSVYKARNGKLQDGREIAVKRLSSSSEQGKQEFMNEIVLISKLQHRNLVRVLGCCVEGTEKLLIYEFMKNKSLDTFVFVFTRCFCLDSKKRLEIDWPKRFDIIQGIARGLLYLHRDSRLRIIHRDLKVSNILLDEKMNPKISDFGLARMFHGTEYQDKTRRVVGTLGYMSPEYAWAGVFSEKSDIYSFGVLLLEIISGEKISRFSYGEEGKTLLAYAWECWCGARGVNLLDQALGDSCHPYEVGRCVQIGLLCVQYQPADRPNTLELLSMLTTTSDLPLPKQPTFVVHTRDGKSPSNDSMITVNEMTESVIHGR

SEQ ID NO: 73150 - protein, 654 aa, Arabidopsis thaliana
  peptide (1)..(654): Ceres Seq. ID no. 4959251
  misc_feature (1)..(654): Homolog of NCBI NO: 30682152 NR Description: S-locus protein kinase, putative [Arabidopsis
  misc_feature (1)..(654): Homolog of NCBI NO: 30682149 NR Description: S-locus protein kinase, putative [Arabidopsis
  misc_feature (89)..(529): Homolog of NCBI NO: 30696575 NR Description: S-locus protein kinase, putative [Arabidopsis
  misc_feature (532)..(654): Homolog of NCBI NO: 30696575 NR Description: S-locus protein kinase, putative [Arabidopsis
  misc_feature (1)..(64): Homolog of NCBI NO: 30696575 NR Description: S-locus protein kinase, putative [Arabidopsis
  misc_feature (1)..(260): Homolog of NCBI NO: 15220351 NR Description: receptor kinase, putative; protein id:
  misc_feature (314)..(654): Homolog of NCBI NO: 15220351 NR Description: receptor kinase, putative; protein id:
  misc_feature (1)..(654): Homolog of NCBI NO: 22208478 NR Description: receptor-like kinase [Sorghum bicolor]
  misc_feature (1)..(644): Homolog of NCBI NO: 25956275 NR Description: unnamed protein product [Lotus japonicus]
  misc_feature (49)..(654): Homolog of NCBI NO: 30314606 NR Description: S receptor kinase [Brassica rapa]
MYNVHTGEKRGLTSWKSYTDPSPGDFVVLITPQVPSQGFLMRGSTPYFRSGPWAKTKFTGLPQMDESYTSPFSLTQDVNGSGYYSYFDRDNKRSRIRLTPDGSMKALRYNGMDWDTTYEGPANSCDIYGVCGPFGFCVISVPPKCKCFKGFIPKSIEEWKTGNWTSGCVRRSELHCQGNSTGKDANVFHTVPNIKPPDFYEYADSVDAEECQQNCLNNCSCLAFAYIPGIGCLMWSKDLMDTVQFAAGGELLSIRLARSELDVNKRKKTIIAITVSLTLFVILGFTAFGFWRRRVEQNEDAWRNDLQTQDVPGLEYFEMNTIQTATNNFSLSNKLGHGGFGSVYKARNGKLQDGREIAVKRLSSSSEQGKQEFMNEIVLISKLQHRNLVRVLGCCVEGTEKLLIYEFMKNKSLDTFVFVFTRCFCLDSKKRLEIDWPKRFDIIQGIARGLLYLHRDSRLRIIHRDLKVSNILLDEKMNPKISDFGLARMFHGTEYQDKTRRVVGTLGYMSPEYAWAGVFSEKSDIYSFGVLLLEIISGEKISRFSYGEEGKTLLAYAWECWCGARGVNLLDQALGDSCHPYEVGRCVQIGLLCVQYQPADRPNTLELLSMLTTTSDLPLPKQPTFVVHTRDGKSPSNDSMITVNEMTESVIHGR

SEQ ID NO: 73151 - DNA, 2421 bp, Arabidopsis thaliana
  misc_feature (1)..(2421): Ceres Seq. ID no. 4959259
  misc_feature: MA Experiment ID: 20000307 Result: Down-regulated in Transcription
  misc_feature: MA Experiment 20000307 PARAMETER Experiment Name: At_Germinating_Seeds_Sub_P Parameter: Age (hr) Value: 24 vs. 0
  misc_feature: MA Experiment 20000307 PARAMETER Experiment Name: At_Germinating_Seeds_Sub_P Parameter: Organism Value: A. thaliana
  misc_feature: MA Experiment 20000307 PARAMETER Experiment Name: At_Germinating_Seeds_Sub_P Parameter: Plant Line Value: WS
  misc_feature: MA Experiment 20000307 PARAMETER Experiment Name: At_Germinating_Seeds_Sub_P Parameter: Tissue Value: Germinating Seeds
  misc_feature: MA Experiment ID: 20000315 Result: Down-regulated in Transcription
  misc_feature: MA Experiment 20000315 PARAMETER Experiment Name: At_14day_Shoots-Roots_Sub_P Parameter: Age (day) Value: 14
  misc_feature: MA Experiment 20000315 PARAMETER Experiment Name: At_14day_Shoots-Roots_Sub_P Parameter: Organism Value: A. thaliana
  misc_feature: MA Experiment 20000315 PARAMETER Experiment Name: At_14day_Shoots-Roots_Sub_P Parameter: Plant Line Value: WS
  misc_feature: MA Experiment 20000315 PARAMETER Experiment Name: At_14day_Shoots-Roots_Sub_P Parameter: Tissue Value: Shoots vs. Whole Plant
  misc_feature: MA Experiment ID: 20000328 Result: Down-regulated in Transcription
  misc_feature: MA Experiment 20000328 PARAMETER Experiment Name: At_42deg_Heat_Sub_P Parameter: Age (day) Value: 14
  misc_feature: MA Experiment 20000328 PARAMETER Experiment Name: At_42deg_Heat_Sub_P Parameter: Organism Value: A. thaliana
  misc_feature: MA Experiment 20000328 PARAMETER Experiment Name: At_42deg_Heat_Sub_P Parameter: Plant Line Value: WS
  misc_feature: MA Experiment 20000328 PARAMETER Experiment Name: At_42deg_Heat_Sub_P Parameter: Temperature (deg C) Value: 42 vs. 22
  misc_feature: MA Experiment 20000328 PARAMETER Experiment Name: At_42deg_Heat_Sub_P Parameter: Timepoint (hr) Value: 6
  misc_feature: MA Experiment 20000328 PARAMETER Experiment Name: At_42deg_Heat_Sub_P Parameter: Tissue Value: Aerial
atggggaagaagaggatagtgttctttgcttatttgcccttttttaccatctttatgagttttagctttgcagggataaccaaagagagtcccttttcaattggacaaactctcagctcctctaatggtgtttatgaattgggattcttcagtcttaataactcccaaaatcagtatctcggaatttggttcaagagtatcattccccaggtggttgtgtgggtggctaatagagaaaagcctgttacagactctgcggcaaatctcggtatcagcagcaatggtagtcttctgttatctaatggcaaacatggcgttgtgtggtctaccggagatatttttgcatctaatgggtctcgtgcagagcttacagaccatggaaatcttgttttcatagacaaagtttcgggaaggactctatggcaaagctttgagcatcttggtaatactctgctccctacgtcaattatgatgtataatctcgtcgctggtgagaagcgaggattgactgcttggaaaagttacaccgatccatcgcctggcgaatttgtggctctgattacaccgcaagtgccatcacaggggattattatgagaggctcgacacgttattatagaaccggtccatgggctaaaacaaggttcactggatcaccacaaatggatgaatcatacacaagtccattcatcttaacacaggatgtaaatgggtcaggatacttttcatttgttgaaagaggcaaaccttcacgcatgattttaacatcagagggaacaatgaaggtcttagtgcataatggaatggactgggaatcaacctacgagggtccagccaattcatgtgatatatatggcgtatgtggaccttttgggctttgtgttgtatcaattcctccaaaatgtaaatgcttcaaaggttttgttcctaaattcgctaaggagtggaagaaaggaaactggactagtggttgtgtgaggcgtaccgaactacattgtcaaggaaactccagtggcaaagatgcaaatgtcttctatactgttcccaacataaagcctccagacttttacgagtatgcaaattctcagaatgctgaagaatgccaccaaaattgcctccacaattgttcttgcttggcgttttcttatattcctggaatagggtgcttaatgtggagcaaggatctaatggacacaaggcaattttctgcagcaggagaacttctttccattcgtcttgcacgttctgagctagatgtaaataagcgcaagatgaccattgttgctagtacagtgagcctgaccctattcgtgatctttggatttgctgcatttggtttctggagatgcagagtggaacataatgctcatatatcaaacgatgcatggaggaattttctgcaatcacaagacgtcccaggtttagaattttttgagatgaatgccatacaaactgccaccaataatttcagtctatcaaacaaactcggtcctggtggatttggttctgtttacaaggcgagaaacggaaaactgcaagatggaagagaaattgcggtaaaacgtctttctagcagctctgggcagggcaaacaggagttcatgaatgaaatagtactgatatcaaaactccaacacagaaacttagtccgggttttgggatgctgcgtcgaaggaacagagaagctattgatttatgggttcttgaaaaacaaaagcctggatacttttgtctttgatgcaagaaaaaagctcgaacttgattggccaaagagatttgagatcattgaaggtattgcacgtggacttctctatctccaccgtgactcacgcctcagagtaattcaccgagacctgaaggtcagcaacattcttctggatgagaaaatgaacccgaaaatatcagattttggtttggctcggatgtttcagggaacccaatatcaggaaaaaactcgcagggttgtcggaactctaggatatatgtctcctgagtatgcatggactggcgtattctctgagaaatccgatatctacagtttcggagttctgttgttagaaatcatcagcggaaagaagatctcaagtttcagctatggcgaggagggaaaagcacttcttgcatatgcatgggaatgttggtgtgaaacccgagaagttaattttttggaccaagctcttgctgattctagtcacccatctgaagttggaaggtgtgtacagattggtttgctctgtgttcaacacgagcctgcagacagaccaaacacacttgagttgctgtctatgcttaccacaacatcagatcttcctctgcccaaaaaacccacatttgtagtgcacactagaaaagacgaatcaccgtcaaatgattcgatgatcactgtcaatgagatgacagagtctgtgatccaaggacgttga

SEQ ID NO: 73152 - protein, 806 aa, Arabidopsis thaliana
  peptide (1)..(806): Ceres Seq. ID no. 4959260
  misc_feature (69)..(179): Pfam Name: D-mannose binding lectin Pfam Description: D-mannose binding lectin
  misc_feature (1)..(806): Homolog of NCBI NO: 30682152 NR Description: S-locus protein kinase, putative [Arabidopsis
  misc_feature (1)..(806): Homolog of NCBI NO: 30682149 NR Description: S-locus protein kinase, putative [Arabidopsis
  misc_feature (238)..(681): Homolog of NCBI NO: 30696575 NR Description: S-locus protein kinase, putative [Arabidopsis
  misc_feature (684)..(806): Homolog of NCBI NO: 30696575 NR Description: S-locus protein kinase, putative [Arabidopsis
  misc_feature (151)..(214): Homolog of NCBI NO: 30696575 NR Description: S-locus protein kinase, putative [Arabidopsis
  misc_feature (370)..(806): Homolog of NCBI NO: 15220351 NR Description: receptor kinase, putative; protein id:
  misc_feature (5)..(416): Homolog of NCBI NO: 15220351 NR Description: receptor kinase, putative; protein id:
  misc_feature (58)..(464): Homolog of NCBI NO: 7428022 NR Description: S-receptor kinase (EC 2.7.1.-) KIK1 precursor - >gi|2735017|gb|AAB93834.1| KI domain interacting kinase 1 [Zea
  misc_feature (442)..(806): Homolog of NCBI NO: 7428022 NR Description: S-receptor kinase (EC 2.7.1.-) KIK1 precursor - >gi|2735017|gb|AAB93834.1| KI domain interacting kinase 1 [Zea
  misc_feature (6)..(450): Homolog of NCBI NO: 30314606 NR Description: S receptor kinase [Brassica rapa]
MGKKRIVFFAYLPFFTIFMSFSFAGITKESPFSIGQTLSSSNGVYELGFFSLNNSQNQYLGIWFKSIIPQVVVWVANREKPVTDSAANLGISSNGSLLLSNGKHGVVWSTGDIFASNGSRAELTDHGNLVFIDKVSGRTLWQSFEHLGNTLLPTSIMMYNLVAGEKRGLTAWKSYTDPSPGEFVALITPQVPSQGIIMRGSTRYYRTGPWAKTRFTGSPQMDESYTSPFILTQDVNGSGYFSFVERGKPSRMILTSEGTMKVLVHNGMDWESTYEGPANSCDIYGVCGPFGLCVVSIPPKCKCFKGFVPKFAKEWKKGNWTSGCVRRTELHCQGNSSGKDANVFYTVPNIKPPDFYEYANSQNAEECHQNCLHNCSCLAFSYIPGIGCLMWSKDLMDTRQFSAAGELLSIRLARSELDVNKRKMTIVASTVSLTLFVIFGFAAFGFWRCRVEHNAHISNDAWRNFLQSQDVPGLEFFEMNAIQTATNNFSLSNKLGPGGFGSVYKARNGKLQDGREIAVKRLSSSSGQGKQEFMNEIVLISKLQHRNLVRVLGCCVEGTEKLLIYGFLKNKSLDTFVFDARKKLELDWPKRFEIIEGIARGLLYLHRDSRLRVIHRDLKVSNILLDEKMNPKISDFGLARMFQGTQYQEKTRRVVGTLGYMSPEYAWTGVFSEKSDIYSFGVLLLEIISGKKISSFSYGEEGKALLAYAWECWCETREVNFLDQALADSSHPSEVGRCVQIGLLCVQHEPADRPNTLELLSMLTTTSDLPLPKKPTFVVHTRKDESPSNDSMITVNEMTESVIQGR

SEQ ID NO: 73153 - protein, 788 aa, Arabidopsis thaliana
  peptide (1)..(788): Ceres Seq. ID no. 4959261
  misc_feature (51)..(161): Pfam Name: D-mannose binding lectin Pfam Description: D-mannose binding lectin
  misc_feature (1)..(788): Homolog of NCBI NO: 30682152 NR Description: S-locus protein kinase, putative [Arabidopsis
  misc_feature (1)..(788): Homolog of NCBI NO: 30682149 NR Description: S-locus protein kinase, putative [Arabidopsis
  misc_feature (220)..(663): Homolog of NCBI NO: 30696575 NR Description: S-locus protein kinase, putative [Arabidopsis
  misc_feature (666)..(788): Homolog of NCBI NO: 30696575 NR Description: S-locus protein kinase, putative [Arabidopsis
  misc_feature (133)..(196): Homolog of NCBI NO: 30696575 NR Description: S-locus protein kinase, putative [Arabidopsis
  misc_feature (352)..(788): Homolog of NCBI NO: 15220351 NR Description: receptor kinase, putative; protein id:
  misc_feature (1)..(398): Homolog of NCBI NO: 15220351 NR Description: receptor kinase, putative; protein id:
  misc_feature (40)..(446): Homolog of NCBI NO: 7428022 NR Description: S-receptor kinase (EC 2.7.1.-) KIK1 precursor - >gi|2735017|gb|AAB93834.1| KI domain interacting kinase 1 [Zea
  misc_feature (424)..(788): Homolog of NCBI NO: 7428022 NR Description: S-receptor kinase (EC 2.7.1.-) KIK1 precursor - >gi|2735017|gb|AAB93834.1| KI domain interacting kinase 1 [Zea
  misc_feature (1)..(432): Homolog of NCBI NO: 30314606 NR Description: S receptor kinase [Brassica rapa]
MSFSFAGITKESPFSIGQTLSSSNGVYELGFFSLNNSQNQYLGIWFKSIIPQVVVWVANREKPVTDSAANLGISSNGSLLLSNGKHGVVWSTGDIFASNGSRAELTDHGNLVFIDKVSGRTLWQSFEHLGNTLLPTSIMMYNLVAGEKRGLTAWKSYTDPSPGEFVALITPQVPSQGIIMRGSTRYYRTGPWAKTRFTGSPQMDESYTSPFILTQDVNGSGYFSFVERGKPSRMILTSEGTMKVLVHNGMDWESTYEGPANSCDIYGVCGPFGLCVVSIPPKCKCFKGFVPKFAKEWKKGNWTSGCVRRTELHCQGNSSGKDANVFYTVPNIKPPDFYEYANSQNAEECHQNCLHNCSCLAFSYIPGIGCLMWSKDLMDTRQFSAAGELLSIRLARSELDVNKRKMTIVASTVSLTLFVIFGFAAFGFWRCRVEHNAHISNDAWRNFLQSQDVPGLEFFEMNAIQTATNNFSLSNKLGPGGFGSVYKARNGKLQDGREIAVKRLSSSSGQGKQEFMNEIVLISKLQHRNLVRVLGCCVEGTEKLLIYGFLKNKSLDTFVFDARKKLELDWPKRFEIIEGIARGLLYLHRDSRLRVIHRDLKVSNILLDEKMNPKISDFGLARMFQGTQYQEKTRRVVGTLGYMSPEYAWTGVFSEKSDIYSFGVLLLEIISGKKISSFSYGEEGKALLAYAWECWCETREVNFLDQALADSSHPSEVGRCVQIGLLCVQHEPADRPNTLELLSMLTTTSDLPLPKKPTFVVHTRKDESPSNDSMITVNEMTESVIQGR

SEQ ID NO: 73154 - protein, 650 aa, Arabidopsis thaliana
  peptide (1)..(650): Ceres Seq. ID no. 4959262
  misc_feature (1)..(650): Homolog of NCBI NO: 30682152 NR Description: S-locus protein kinase, putative [Arabidopsis
  misc_feature (1)..(650): Homolog of NCBI NO: 30682149 NR Description: S-locus protein kinase, putative [Arabidopsis
  misc_feature (82)..(525): Homolog of NCBI NO: 30696575 NR Description: S-locus protein kinase, putative [Arabidopsis
  misc_feature (528)..(650): Homolog of NCBI NO: 30696575 NR Description: S-locus protein kinase, putative [Arabidopsis
  misc_feature (1)..(58): Homolog of NCBI NO: 30696575 NR Description: S-locus protein kinase, putative [Arabidopsis
  misc_feature (214)..(650): Homolog of NCBI NO: 15220351 NR Description: receptor kinase, putative; protein id:
  misc_feature (1)..(260): Homolog of NCBI NO: 15220351 NR Description: receptor kinase, putative; protein id:
  misc_feature (1)..(308): Homolog of NCBI NO: 7428022 NR Description: S-receptor kinase (EC 2.7.1.-) KIK1 precursor - >gi|2735017|gb|AAB93834.1| KI domain interacting kinase 1 [Zea
  misc_feature (286)..(650): Homolog of NCBI NO: 7428022 NR Description: S-receptor kinase (EC 2.7.1.-) KIK1 precursor - >gi|2735017|gb|AAB93834.1| KI domain interacting kinase 1 [Zea
  misc_feature (1)..(294): Homolog of NCBI NO: 30314606 NR Description: S receptor kinase [Brassica rapa]
MMYNLVAGEKRGLTAWKSYTDPSPGEFVALITPQVPSQGIIMRGSTRYYRTGPWAKTRFTGSPQMDESYTSPFILTQDVNGSGYFSFVERGKPSRMILTSEGTMKVLVHNGMDWESTYEGPANSCDIYGVCGPFGLCVVSIPPKCKCFKGFVPKFAKEWKKGNWTSGCVRRTELHCQGNSSGKDANVFYTVPNIKPPDFYEYANSQNAEECHQNCLHNCSCLAFSYIPGIGCLMWSKDLMDTRQFSAAGELLSIRLARSELDVNKRKMTIVASTVSLTLFVIFGFAAFGFWRCRVEHNAHISNDAWRNFLQSQDVPGLEFFEMNAIQTATNNFSLSNKLGPGGFGSVYKARNGKLQDGREIAVKRLSSSSGQGKQEFMNEIVLISKLQHRNLVRVLGCCVEGTEKLLIYGFLKNKSLDTFVFDARKKLELDWPKRFEIIEGIARGLLYLHRDSRLRVIHRDLKVSNILLDEKMNPKISDFGLARMFQGTQYQEKTRRVVGTLGYMSPEYAWTGVFSEKSDIYSFGVLLLEIISGKKISSFSYGEEGKALLAYAWECWCETREVNFLDQALADSSHPSEVGRCVQIGLLCVQHEPADRPNTLELLSMLTTTSDLPLPKKPTFVVHTRKDESPSNDSMITVNEMTESVIQGR

SEQ ID NO: 73155 - DNA, 2250 bp, Arabidopsis thaliana
  misc_feature (1)..(2250): Ceres Seq. ID no. 4959270
  misc_feature: MA Experiment ID: 20000171 Result: Down-regulated in Transcription
  misc_feature: MA Experiment 20000171 PARAMETER Experiment Name: At_42deg_Heat_P Parameter: Age (day) Value: 14
  misc_feature: MA Experiment 20000171 PARAMETER Experiment Name: At_42deg_Heat_P Parameter: Organism Value: A. thaliana
  misc_feature: MA Experiment 20000171 PARAMETER Experiment Name: At_42deg_Heat_P Parameter: Plant Line Value: WS
  misc_feature: MA Experiment 20000171 PARAMETER Experiment Name: At_42deg_Heat_P Parameter: Temperature (deg C) Value: 42 vs. 22
  misc_feature: MA Experiment 20000171 PARAMETER Experiment Name: At_42deg_Heat_P Parameter: Timepoint (hr) Value: 1
  misc_feature: MA Experiment 20000171 PARAMETER Experiment Name: At_42deg_Heat_P Parameter: Tissue Value: Aerial
  misc_feature: MA Experiment ID: 20000227 Result: Down-regulated in Transcription
  misc_feature: MA Experiment 20000227 PARAMETER Experiment Name: At_Root-Tips-vs-Tops_P Parameter: Tissue Value: Root Tips vs. Root Tops
  misc_feature: MA Experiment ID: 20000438 Result: Down-regulated in Transcription
  misc_feature: MA Experiment 20000438 PARAMETER Experiment Name: At_Shoots__P Parameter: Age (day) Value: 14
  misc_feature: MA Experiment 20000438 PARAMETER Experiment Name: At_Shoots__P Parameter: Tissue Value: Shoots vs. Whole Plant
  misc_feature: MA Experiment ID: 20000439 Result: Down-regulated in Transcription
  misc_feature: MA Experiment 20000439 PARAMETER Experiment Name: At_Roots__P Parameter: Age (day) Value: 14 vs. 21
  misc_feature: MA Experiment 20000439 PARAMETER Experiment Name: At_Roots__P Parameter: Organism Value: A. thaliana
  misc_feature: MA Experiment 20000439 PARAMETER Experiment Name: At_Roots__P Parameter: Tissue Value: Roots vs. Whole Plant
  misc_feature: MA Experiment ID: 20000496 Result: Down-regulated in Transcription
  misc_feature: MA Experiment 20000496 PARAMETER Experiment Name: At_Guard_Cells_P Parameter: Harvest Date Value: 7/19/2002
  misc_feature: MA Experiment 20000496 PARAMETER Experiment Name: At_Guard_Cells_P Parameter: Organism Value: Canola
  misc_feature: MA Experiment 20000496 PARAMETER Experiment Name: At_Guard_Cells_P Parameter: Tissue Value: Guard Cells vs. Leaves
atgaggatcacgttctttgcttctttgctcttatttaccaataccatctttataagttttagctttgcaattgcagggataaacaaagagagtcctttgtcaataggacaaactctcagctcctctaatggagtttatgaattgggtttcttcagttttaataactcggaaaatcattatcttggaatctggttcaagggaatcattccccgggtggttgtgtgggtggccaatagagaaaatcctgttacagattccacagcaaatctcgctatcagcagcaacgcaagtcttctgttatataatggaaaacatggcgttgcatggtccagtggtgaaactcttgcttctaacgggtctcgtgcagagctttcagacaccggaaatcttattgtcatagacaatttttcgggaagaactctttggcaaagctttgaccatcttggtgatactatgcttcctttctcagctctgatgtataacctcgccactggcgagaagcaggtcttgacttcttggaaaagttacactaatccagcggttggtgactttgtgcttcagattacaacgcaagtgccaacacaagctttaactatgagaggctcgaagccttattggagaagcggtccatgggctaaaacaagaaacttcaaacttccacgtatagtgataacatcgaagggttcactggagatttctaggcatagtgggactgattgggtattgaactttgtggctccagcgcactcatgtgattattacggtgtatgtggaccttttgggatttgtgtcaagtcagtgtgtaaatgcttcaaagggtttataccaaaatatattgaggagtggaaaagaggaaattggactgatggttgtgtgaggcgtaccaaactacattgtcaggaaaactcaactaaaaaagatgcaaacttcttccatccagttgccaacataaagcctccagacttttacgaatttgcaagtgctgtggatgcagaaggatgctacaaaatttgcctccacaactgttcttgcttggccttttcttatattcatggaattgggtgcttaatatggaaccaagacttcatggacacagtgcaattttctgcaggaggagagattctttccattcgtcttgcacgttctgaattaggtgggaataagcgcaagaagaccattactgctagtattgtcagcctttctctttttctgatattgggttctactgcgtttggtttctggagatacagagttaaacataatgcttcacaagatgcaccgaaatatgatttggaaccacaagatgtctcaggttcatatttgtttgagatgaacaccattcaaactgccaccaataatttcagtctctcaaataaactgggacaaggtggatttggttcagtttacaagggaaagctgcaagatgggaaagaaattgctgtaaaacggctttctagcagctcagggcagggcaaagaggagttcatgaatgaaatagtactcatctcaaaactacaacacaaaaacttagttcggattttaggatgttgcattgaaggagaagagaggctgttgatttatgagtttatgttgaacaaaagccttgatacttttctcttcgattcaagaaaaaggcttgagattgactggccaaagagatttgatatcattcaaggtattgcgcgtggaattcactatctccatcgtgactcatgcctcaaggtaattcaccgtgatctgaaggtcagcaatattcttcttgacgagaagatgaatccaaagatatcagattttggattggctcggatgtatcagggaaccgaatatcaggacaatactcgcagggtcgtaggaactctaggatatatgtctccagaggatatattagaaatcataagcggagagaagatctcaagattcagctatggcaaagaagaaaaaacccttattgcatatgcatgggaatcttggtgtgaaactggaggagttgatcttttggataaagatgttgctgattcatgtcgcccattagaagttgagagatgtattcagattggtcttctctgtgttcaacaccaacctgcagacagaccaaacacacttgagttgatgtctatgctcacgacaacatcagatcttccatcaccaaaacaacccacatttgtagtgcactggagagatgacgaatcatcgtctaaggatttgatcactgtgaatgagatgacaaagtctgtgatcttagggcgttga

SEQ ID NO: 73156 - protein, 749 aa, Arabidopsis thaliana
  peptide (1)..(749): Ceres Seq. ID no. 4959271
  misc_feature (454)..(626): Pfam Name: Protein kinase domain Pfam Description: Protein kinase domain
  misc_feature (215)..(643): Homolog of NCBI NO: 15220528 NR Description: receptor kinase, putative; protein id: [Arabidopsis thaliana] >gi|25287701|pir||G96640 hypothetical
  misc_feature (3)..(220): Homolog of NCBI NO: 15220528 NR Description: receptor kinase, putative; protein id: [Arabidopsis thaliana] >gi|25287701|pir||G96640 hypothetical
  misc_feature (628)..(749): Homolog of NCBI NO: 15220528 NR Description: receptor kinase, putative; protein id: [Arabidopsis thaliana] >gi|25287701|pir||G96640 hypothetical
  misc_feature (393)..(643): Homolog of NCBI NO: 25287700 NR Description: hypothetical protein T25B24.15 [imported] - thaliana >gi|4585885|gb|AAD25558.1|AC005850_15 Putative
  misc_feature (3)..(220): Homolog of NCBI NO: 25287700 NR Description: hypothetical protein T25B24.15 [imported] - thaliana >gi|4585885|gb|AAD25558.1|AC005850_15 Putative
  misc_feature (215)..(420): Homolog of NCBI NO: 25287700 NR Description: hypothetical protein T25B24.15 [imported] - thaliana >gi|4585885|gb|AAD25558.1|AC005850_15 Putative
  misc_feature (628)..(749): Homolog of NCBI NO: 25287700 NR Description: hypothetical protein T25B24.15 [imported] - thaliana >gi|4585885|gb|AAD25558.1|AC005850_15 Putative
  misc_feature (215)..(643): Homolog of NCBI NO: 18407211 NR Description: receptor kinase, putative; protein id:
  misc_feature (3)..(220): Homolog of NCBI NO: 18407211 NR Description: receptor kinase, putative; protein id:
  misc_feature (628)..(749): Homolog of NCBI NO: 18407211 NR Description: receptor kinase, putative; protein id:
MRITFFASLLLFTNTIFISFSFAIAGINKESPLSIGQTLSSSNGVYELGFFSFNNSENHYLGIWFKGIIPRVVVWVANRENPVTDSTANLAISSNASLLLYNGKHGVAWSSGETLASNGSRAELSDTGNLIVIDNFSGRTLWQSFDHLGDTMLPFSALMYNLATGEKQVLTSWKSYTNPAVGDFVLQITTQVPTQALTMRGSKPYWRSGPWAKTRNFKLPRIVITSKGSLEISRHSGTDWVLNFVAPAHSCDYYGVCGPFGICVKSVCKCFKGFIPKYIEEWKRGNWTDGCVRRTKLHCQENSTKKDANFFHPVANIKPPDFYEFASAVDAEGCYKICLHNCSCLAFSYIHGIGCLIWNQDFMDTVQFSAGGEILSIRLARSELGGNKRKKTITASIVSLSLFLILGSTAFGFWRYRVKHNASQDAPKYDLEPQDVSGSYLFEMNTIQTATNNFSLSNKLGQGGFGSVYKGKLQDGKEIAVKRLSSSSGQGKEEFMNEIVLISKLQHKNLVRILGCCIEGEERLLIYEFMLNKSLDTFLFDSRKRLEIDWPKRFDIIQGIARGIHYLHRDSCLKVIHRDLKVSNILLDEKMNPKISDFGLARMYQGTEYQDNTRRVVGTLGYMSPEDILEIISGEKISRFSYGKEEKTLIAYAWESWCETGGVDLLDKDVADSCRPLEVERCIQIGLLCVQHQPADRPNTLELMSMLTTTSDLPSPKQPTFVVHWRDDESSSKDLITVNEMTKSVILGR

SEQ ID NO: 73157 - protein, 598 aa, Arabidopsis thaliana
  peptide (1)..(598): Ceres Seq. ID no. 4959272
  misc_feature (303)..(475): Pfam Name: Protein kinase domain Pfam Description: Protein kinase domain
  misc_feature (64)..(492): Homolog of NCBI NO: 15220528 NR Description: receptor kinase, putative; protein id: [Arabidopsis thaliana] >gi|25287701|pir||G96640 hypothetical
  misc_feature (1)..(69): Homolog of NCBI NO: 15220528 NR Description: receptor kinase, putative; protein id: [Arabidopsis thaliana] >gi|25287701|pir||G96640 hypothetical
  misc_feature (477)..(598): Homolog of NCBI NO: 15220528 NR Description: receptor kinase, putative; protein id: [Arabidopsis thaliana] >gi|25287701|pir||G96640 hypothetical
  misc_feature (242)..(492): Homolog of NCBI NO: 25287700 NR Description: hypothetical protein T25B24.15 [imported] - thaliana >gi|4585885|gb|AAD25558.1|AC005850_15 Putative
  misc_feature (1)..(69): Homolog of NCBI NO: 25287700 NR Description: hypothetical protein T25B24.15 [imported] - thaliana >gi|4585885|gb|AAD25558.1|AC005850_15 Putative
  misc_feature (64)..(269): Homolog of NCBI NO: 25287700 NR Description: hypothetical protein T25B24.15 [imported] - thaliana >gi|4585885|gb|AAD25558.1|AC005850_15 Putative
  misc_feature (477)..(598): Homolog of NCBI NO: 25287700 NR Description: hypothetical protein T25B24.15 [imported] - thaliana >gi|4585885|gb|AAD25558.1|AC005850_15 Putative
  misc_feature (64)..(492): Homolog of NCBI NO: 18407211 NR Description: receptor kinase, putative; protein id:
  misc_feature (1)..(69): Homolog of NCBI NO: 18407211 NR Description: receptor kinase, putative; protein id:
  misc_feature (477)..(598): Homolog of NCBI NO: 18407211 NR Description: receptor kinase, putative; protein id:
MLPFSALMYNLATGEKQVLTSWKSYTNPAVGDFVLQITTQVPTQALTMRGSKPYWRSGPWAKTRNFKLPRIVITSKGSLEISRHSGTDWVLNFVAPAHSCDYYGVCGPFGICVKSVCKCFKGFIPKYIEEWKRGNWTDGCVRRTKLHCQENSTKKDANFFHPVANIKPPDFYEFASAVDAEGCYKICLHNCSCLAFSYIHGIGCLIWNQDFMDTVQFSAGGEILSIRLARSELGGNKRKKTITASIVSLSLFLILGSTAFGFWRYRVKHNASQDAPKYDLEPQDVSGSYLFEMNTIQTATNNFSLSNKLGQGGFGSVYKGKLQDGKEIAVKRLSSSSGQGKEEFMNEIVLISKLQHKNLVRILGCCIEGEERLLIYEFMLNKSLDTFLFDSRKRLEIDWPKRFDIIQGIARGIHYLHRDSCLKVIHRDLKVSNILLDEKMNPKISDFGLARMYQGTEYQDNTRRVVGTLGYMSPEDILEIISGEKISRFSYGKEEKTLIAYAWESWCETGGVDLLDKDVADSCRPLEVERCIQIGLLCVQHQPADRPNTLELMSMLTTTSDLPSPKQPTFVVHWRDDESSSKDLITVNEMTKSVILGR

SEQ ID NO: 73158 - protein, 591 aa, Arabidopsis thaliana
  peptide (1)..(591): Ceres Seq. ID no. 4959273
  misc_feature (296)..(468): Pfam Name: Protein kinase domain Pfam Description: Protein kinase domain
  misc_feature (57)..(485): Homolog of NCBI NO: 15220528 NR Description: receptor kinase, putative; protein id: [Arabidopsis thaliana] >gi|25287701|pir||G96640 hypothetical
  misc_feature (1)..(62): Homolog of NCBI NO: 15220528 NR Description: receptor kinase, putative; protein id: [Arabidopsis thaliana] >gi|25287701|pir||G96640 hypothetical
  misc_feature (470)..(591): Homolog of NCBI NO: 15220528 NR Description: receptor kinase, putative; protein id: [Arabidopsis thaliana] >gi|25287701|pir||G96640 hypothetical
  misc_feature (235)..(485): Homolog of NCBI NO: 25287700 NR Description: hypothetical protein T25B24.15 [imported] - thaliana >gi|4585885|gb|AAD25558.1|AC005850_15 Putative
  misc_feature (1)..(62): Homolog of NCBI NO: 25287700 NR Description: hypothetical protein T25B24.15 [imported] - thaliana >gi|4585885|gb|AAD25558.1|AC005850_15 Putative
  misc_feature (57)..(262): Homolog of NCBI NO: 25287700 NR Description: hypothetical protein T25B24.15 [imported] - thaliana >gi|4585885|gb|AAD25558.1|AC005850_15 Putative
  misc_feature (470)..(591): Homolog of NCBI NO: 25287700 NR Description: hypothetical protein T25B24.15 [imported] - thaliana >gi|4585885|gb|AAD25558.1|AC005850_15 Putative
  misc_feature (57)..(485): Homolog of NCBI NO: 18407211 NR Description: receptor kinase, putative; protein id:
  misc_feature (1)..(62): Homolog of NCBI NO: 18407211 NR Description: receptor kinase, putative; protein id:
  misc_feature (470)..(591): Homolog of NCBI NO: 18407211 NR Description: receptor kinase, putative; protein id:
MYNLATGEKQVLTSWKSYTNPAVGDFVLQITTQVPTQALTMRGSKPYWRSGPWAKTRNFKLPRIVITSKGSLEISRHSGTDWVLNFVAPAHSCDYYGVCGPFGICVKSVCKCFKGFIPKYIEEWKRGNWTDGCVRRTKLHCQENSTKKDANFFHPVANIKPPDFYEFASAVDAEGCYKICLHNCSCLAFSYIHGIGCLIWNQDFMDTVQFSAGGEILSIRLARSELGGNKRKKTITASIVSLSLFLILGSTAFGFWRYRVKHNASQDAPKYDLEPQDVSGSYLFEMNTIQTATNNFSLSNKLGQGGFGSVYKGKLQDGKEIAVKRLSSSSGQGKEEFMNEIVLISKLQHKNLVRILGCCIEGEERLLIYEFMLNKSLDTFLFDSRKRLEIDWPKRFDIIQGIARGIHYLHRDSCLKVIHRDLKVSNILLDEKMNPKISDFGLARMYQGTEYQDNTRRVVGTLGYMSPEDILEIISGEKISRFSYGKEEKTLIAYAWESWCETGGVDLLDKDVADSCRPLEVERCIQIGLLCVQHQPADRPNTLELMSMLTTTSDLPSPKQPTFVVHWRDDESSSKDLITVNEMTKSVILGR

SEQ ID NO: 73159 - DNA, 2691 bp, Arabidopsis thaliana
  misc_feature (1)..(2691): Ceres Seq. ID no. 4959288
  misc_feature: MA Experiment ID: 20000439 Result: Up-regulated in Transcription
  misc_feature: MA Experiment 20000439 PARAMETER Experiment Name: At_Roots__P Parameter: Age (day) Value: 14 vs. 21
  misc_feature: MA Experiment 20000439 PARAMETER Experiment Name: At_Roots__P Parameter: Organism Value: A. thaliana
  misc_feature: MA Experiment 20000439 PARAMETER Experiment Name: At_Roots__P Parameter: Tissue Value: Roots vs. Whole Plant
  misc_feature: MA Experiment ID: 20000794 Result: Up-regulated in Transcription
  misc_feature: MA Experiment 20000794 PARAMETER Experiment Name: At_Petals_P Parameter: Age (day) Value: 23-25 days
  misc_feature: MA Experiment 20000794 PARAMETER Experiment Name: At_Petals_P Parameter: Plant Line Value: WS
  misc_feature: MA Experiment 20000794 PARAMETER Experiment Name: At_Petals_P Parameter: Tissue Value: Petals vs. Whole plant
  misc_feature: MA Experiment ID: 20001911 Result: Up-regulated in Transcription
  misc_feature: MA Experiment 20001911 PARAMETER Experiment Name: At_Drought_Reproduction_P Parameter: Age (day) Value: 40
  misc_feature: MA Experiment 20001911 PARAMETER Experiment Name: At_Drought_Reproduction_P Parameter: Organism Value: A. thaliana
  misc_feature: MA Experiment 20001911 PARAMETER Experiment Name: At_Drought_Reproduction_P Parameter: Plant Line Value: WS
  misc_feature: MA Experiment 20001911 PARAMETER Experiment Name: At_Drought_Reproduction_P Parameter: Timepoint (day) Value: 10
  misc_feature: MA Experiment 20001911 PARAMETER Experiment Name: At_Drought_Reproduction_P Parameter: Tissue Value: Flowers
  misc_feature: MA Experiment 20001911 PARAMETER Experiment Name: At_Drought_Reproduction_P Parameter: Treatment Value: Drought vs. No Drought
atgtcagtttctgttttgcgacagtgtaaatttcatttgtctctcacttctgtatgcttatcgtttatatttggtttaatattctctcttctcttcaaagctacaggcggaaattcggctgttgcacataagtcaggatctctaagtactccagcaacttctactggacaagcaggggataataagtctttagtagtgcatagtgttgttccacgggatagtgatattgggaaagactcttctgattcaggaaaggaatctatcactttctcaaaaacaaagccaggcatgctgttgagaccggcttatgtaagaaagacgccaacaaagtttgatgaaacaaagaagcagtcagtggctgttggatatctaaagaaaagtggattggatggtgagaagaaactagatactgagacggcgtttgattcagaaatgagtggtaggaacccatatgatgccgacgattctatcatcaagagtatcaccaacaagtttgaacaagctttattaccagaatcaccgactgatgaagcaaaatgtatgctgctgaaaccgcctcgtgtacagagatcaccaagtactaagtacaatgaggcaagatgggcgacatctactgattctggagctttagacagtaaaaagaatgggttagagtcctcaagagacatggacttgccaacagggctcagggatgacagaggtagtaacccatgtgaggaagatatcgagaacaagagcatttcaagtaggtcagaaagagttctgtcaccagaaaaagctggtgatgaactaaaaagccttgaatcccctggaggtagcaaagaatcaaaatctgtgaaggatatgcgtcatctggttattgattctttaaaaactgctgtgtttgcagtaaaagttgtttcgggaaggacacggtcattggttgagaggtttgaaagaggagaaaaaattactcattctgaagataaagcagccagtgcaacagtagttcatagctctaattctgtagaggaagagcccctgacagcatcggtacagacagttagcatgatgcctacccaggtaatgccagttaaacttgatcaggcaactaactcgaccacagttgacgttcctgtgttatcaacacgacgaactaagagtactccagtcagagtaatgcctgtagtactcggtcgggacactagcatggcaactgatacgcctcctgtaacatcaacccgacctgataggacttcagctactaatttgacatctgatgtgtctggtgtaacatcaaaacgacaaactaggacttctccagcccccgtcatgccaatgatactcaatcagacaacaaaaatgaaatctgatgagccttctataacatcaacatggcctgataggacttcggctactgatttgacatctgatgtgtctggtgtaatatcatcacgacaaactaggacttctccagcaccggtcatgccaatgaaactcaatcagaaaacaaaaataaaatctgatgagcctcctataacatcaacacggcctgataggccttcagctactaatttgacatctgatgagtctcctgtaacatcaacacgacaagcaaagacttctccagccccagttacgcctgtgatactaaatcagcgtcaaacaactaacatgaaatctgatgagcctcctgtaatatcaacaagaccacttaggacctcttcggcacgagtaatgcctgtgatactcaatcaagcatctaccacgtatgatgagcgtcctttatcatcttcacgatcggctagaacttctcctgcccgtataatgcctatgaaactcaatcaagcagataatatgccatcgtatgagcctccagttgcattaacacgatcagctaggaactctcccgcccgtgtaattcctgtgaaacttaatcaagcaacaaatgtgacagctgatgcatctcatataagatccaggcaaagatttagtccaactcaaacgctggcaacacctgcagtatttgatcaggtgactgatatgacactggatgagactacaaaaactcaacaatcttctgatatcttgacccaggaagagcctcagatatctgggagagaggatgatggtgacatttgggagattttaatgcgaactcatagtgaggtcttaaacactcttcaatcacggttgacaaaattacagattgtaagacatttctgggaacgtagtgatattaaaggcgcgattgcggccttaagaaaactgtcagatcactctgttcaagcagatgtgatcaatattctaacagacaaaacagagattttaacattagatttattttctcaattagcacccgtcctcacaggcttattgggcagcaagactgagaggcctgtaaatgtctccttggaaatgctcttgaagcttgtagcagtgtttggcacagttatacaatcaactgtttcagcacgacgagttgtcggcgttgatcttcatgcagaggaaagtaaaacaaatcgagaactgcaggttacagatctgccaaagctgttctgcggaattgcaaaaggttcagaagattcttccactactgacaagaagaggtggtcttatagcaagaaaggcacaagaactaaacctagttcttcaaacaccatagctcctggttcaaagtcaagaccactcggaatcacttgcgaactgtaa

SEQ ID NO: 73160 - protein, 896 aa, Arabidopsis thaliana
  peptide (1)..(896): Ceres Seq. ID no. 4959289
  misc_feature (318)..(699): Pfam Name: Equine herpesvirus glycoprotein gp2 Pfam Description: Equine herpesvirus glycoprotein gp2
  misc_feature (495)..(888): Homolog of NCBI NO: 15220302 NR Description: hypothetical protein; protein id: At1g11160.1
  misc_feature (396)..(896): Homolog of NCBI NO: 25404314 NR Description: hypothetical protein F11P17.7 [imported] -
  misc_feature (711)..(830): Homolog of NCBI NO: 26452373 NR Description: unknown protein [Arabidopsis thaliana]
  misc_feature (260)..(830): Homolog of NCBI NO: 25402650 NR Description: hypothetical protein [imported] - Arabidopsis >gi|5734734|gb|AAD49999.1|AC007259_12 Hypothetical protein
  misc_feature (27)..(533): Homolog of NCBI NO: 25402650 NR Description: hypothetical protein [imported] - Arabidopsis >gi|5734734|gb|AAD49999.1|AC007259_12 Hypothetical protein
  misc_feature (27)..(533): Homolog of NCBI NO: 15220302 NR Description: hypothetical protein; protein id: At1g11160.1
  misc_feature (365)..(845): Homolog of NCBI NO: 38344202 NR Description: OSJNBa0064G10.18 [Oryza sativa (japonica
  misc_feature (705)..(830): Homolog of NCBI NO: 30688988 NR Description: transducin / WD-40 repeat protein family thaliana] >gi|25083345|gb|AAN72064.1| putative protein
  misc_feature (260)..(678): Homolog of NCBI NO: 15220302 NR Description: hypothetical protein; protein id: At1g11160.1
  misc_feature (705)..(830): Homolog of NCBI NO: 30688991 NR Description: transducin / WD-40 repeat protein family
MSVSVLRQCKFHLSLTSVCLSFIFGLIFSLLFKATGGNSAVAHKSGSLSTPATSTGQAGDNKSLVVHSVVPRDSDIGKDSSDSGKESITFSKTKPGMLLRPAYVRKTPTKFDETKKQSVAVGYLKKSGLDGEKKLDTETAFDSEMSGRNPYDADDSIIKSITNKFEQALLPESPTDEAKCMLLKPPRVQRSPSTKYNEARWATSTDSGALDSKKNGLESSRDMDLPTGLRDDRGSNPCEEDIENKSISSRSERVLSPEKAGDELKSLESPGGSKESKSVKDMRHLVIDSLKTAVFAVKVVSGRTRSLVERFERGEKITHSEDKAASATVVHSSNSVEEEPLTASVQTVSMMPTQVMPVKLDQATNSTTVDVPVLSTRRTKSTPVRVMPVVLGRDTSMATDTPPVTSTRPDRTSATNLTSDVSGVTSKRQTRTSPAPVMPMILNQTTKMKSDEPSITSTWPDRTSATDLTSDVSGVISSRQTRTSPAPVMPMKLNQKTKIKSDEPPITSTRPDRPSATNLTSDESPVTSTRQAKTSPAPVTPVILNQRQTTNMKSDEPPVISTRPLRTSSARVMPVILNQASTTYDERPLSSSRSARTSPARIMPMKLNQADNMPSYEPPVALTRSARNSPARVIPVKLNQATNVTADASHIRSRQRFSPTQTLATPAVFDQVTDMTLDETTKTQQSSDILTQEEPQISGREDDGDIWEILMRTHSEVLNTLQSRLTKLQIVRHFWERSDIKGAIAALRKLSDHSVQADVINILTDKTEILTLDLFSQLAPVLTGLLGSKTERPVNVSLEMLLKLVAVFGTVIQSTVSARRVVGVDLHAEESKTNRELQVTDLPKLFCGIAKGSEDSSTTDKKRWSYSKKGTRTKPSSSNTIAPGSKSRPLGITCEL

SEQ ID NO: 73161 - protein, 800 aa, Arabidopsis thaliana
  peptide (1)..(800): Ceres Seq. ID no. 4959290
  misc_feature (222)..(603): Pfam Name: Equine herpesvirus glycoprotein gp2 Pfam Description: Equine herpesvirus glycoprotein gp2
  misc_feature (399)..(792): Homolog of NCBI NO: 15220302 NR Description: hypothetical protein; protein id: At1g11160.1
  misc_feature (300)..(800): Homolog of NCBI NO: 25404314 NR Description: hypothetical protein F11P17.7 [imported] -
  misc_feature (615)..(734): Homolog of NCBI NO: 26452373 NR Description: unknown protein [Arabidopsis thaliana]
  misc_feature (164)..(734): Homolog of NCBI NO: 25402650 NR Description: hypothetical protein [imported] - Arabidopsis >gi|5734734|gb|AAD49999.1|AC007259_12 Hypothetical protein
  misc_feature (1)..(437): Homolog of NCBI NO: 25402650 NR Description: hypothetical protein [imported] - Arabidopsis >gi|5734734|gb|AAD49999.1|AC007259_12 Hypothetical protein
  misc_feature (1)..(437): Homolog of NCBI NO: 15220302 NR Description: hypothetical protein; protein id: At1g11160.1
  misc_feature (269)..(749): Homolog of NCBI NO: 38344202 NR Description: OSJNBa0064G10.18 [Oryza sativa (japonica
  misc_feature (609)..(734): Homolog of NCBI NO: 30688988 NR Description: transducin / WD-40 repeat protein family thaliana] >gi|25083345|gb|AAN72064.1| putative protein
  misc_feature (164)..(582): Homolog of NCBI NO: 15220302 NR Description: hypothetical protein; protein id: At1g11160.1
  misc_feature (609)..(734): Homolog of NCBI NO: 30688991 NR Description: transducin / WD-40 repeat protein family
MLLRPAYVRKTPTKFDETKKQSVAVGYLKKSGLDGEKKLDTETAFDSEMSGRNPYDADDSIIKSITNKFEQALLPESPTDEAKCMLLKPPRVQRSPSTKYNEARWATSTDSGALDSKKNGLESSRDMDLPTGLRDDRGSNPCEEDIENKSISSRSERVLSPEKAGDELKSLESPGGSKESKSVKDMRHLVIDSLKTAVFAVKVVSGRTRSLVERFERGEKITHSEDKAASATVVHSSNSVEEEPLTASVQTVSMMPTQVMPVKLDQATNSTTVDVPVLSTRRTKSTPVRVMPVVLGRDTSMATDTPPVTSTRPDRTSATNLTSDVSGVTSKRQTRTSPAPVMPMILNQTTKMKSDEPSITSTWPDRTSATDLTSDVSGVISSRQTRTSPAPVMPMKLNQKTKIKSDEPPITSTRPDRPSATNLTSDESPVTSTRQAKTSPAPVTPVILNQRQTTNMKSDEPPVISTRPLRTSSARVMPVILNQASTTYDERPLSSSRSARTSPARIMPMKLNQADNMPSYEPPVALTRSARNSPARVIPVKLNQATNVTADASHIRSRQRFSPTQTLATPAVFDQVTDMTLDETTKTQQSSDILTQEEPQISGREDDGDIWEILMRTHSEVLNTLQSRLTKLQIVRHFWERSDIKGAIAALRKLSDHSVQADVINILTDKTEILTLDLFSQLAPVLTGLLGSKTERPVNVSLEMLLKLVAVFGTVIQSTVSARRVVGVDLHAEESKTNRELQVTDLPKLFCGIAKGSEDSSTTDKKRWSYSKKGTRTKPSSSNTIAPGSKSRPLGITCEL

SEQ ID NO: 73162 - protein, 752 aa, Arabidopsis thaliana
  peptide (1)..(752): Ceres Seq. ID no. 4959291
  misc_feature (174)..(555): Pfam Name: Equine herpesvirus glycoprotein gp2 Pfam Description: Equine herpesvirus glycoprotein gp2
  misc_feature (351)..(744): Homolog of NCBI NO: 15220302 NR Description: hypothetical protein; protein id: At1g11160.1
  misc_feature (252)..(752): Homolog of NCBI NO: 25404314 NR Description: hypothetical protein F11P17.7 [imported] -
  misc_feature (567)..(686): Homolog of NCBI NO: 26452373 NR Description: unknown protein [Arabidopsis thaliana]
  misc_feature (116)..(686): Homolog of NCBI NO: 25402650 NR Description: hypothetical protein [imported] - Arabidopsis >gi|5734734|gb|AAD49999.1|AC007259_12 Hypothetical protein
  misc_feature (1)..(389): Homolog of NCBI NO: 25402650 NR Description: hypothetical protein [imported] - Arabidopsis >gi|5734734|gb|AAD49999.1|AC007259_12 Hypothetical protein
  misc_feature (1)..(389): Homolog of NCBI NO: 15220302 NR Description: hypothetical protein; protein id: At1g11160.1
  misc_feature (221)..(701): Homolog of NCBI NO: 38344202 NR Description: OSJNBa0064G10.18 [Oryza sativa (japonica
  misc_feature (561)..(686): Homolog of NCBI NO: 30688988 NR Description: transducin / WD-40 repeat protein family thaliana] >gi|25083345|gb|AAN72064.1| putative protein
  misc_feature (116)..(534): Homolog of NCBI NO: 15220302 NR Description: hypothetical protein; protein id: At1g11160.1
  misc_feature (561)..(686): Homolog of NCBI NO: 30688991 NR Description: transducin / WD-40 repeat protein family
MSGRNPYDADDSIIKSITNKFEQALLPESPTDEAKCMLLKPPRVQRSPSTKYNEARWATSTDSGALDSKKNGLESSRDMDLPTGLRDDRGSNPCEEDIENKSISSRSERVLSPEKAGDELKSLESPGGSKESKSVKDMRHLVIDSLKTAVFAVKVVSGRTRSLVERFERGEKITHSEDKAASATVVHSSNSVEEEPLTASVQTVSMMPTQVMPVKLDQATNSTTVDVPVLSTRRTKSTPVRVMPVVLGRDTSMATDTPPVTSTRPDRTSATNLTSDVSGVTSKRQTRTSPAPVMPMILNQTTKMKSDEPSITSTWPDRTSATDLTSDVSGVISSRQTRTSPAPVMPMKLNQKTKIKSDEPPITSTRPDRPSATNLTSDESPVTSTRQAKTSPAPVTPVILNQRQTTNMKSDEPPVISTRPLRTSSARVMPVILNQASTTYDERPLSSSRSARTSPARIMPMKLNQADNMPSYEPPVALTRSARNSPARVIPVKLNQATNVTADASHIRSRQRFSPTQTLATPAVFDQVTDMTLDETTKTQQSSDILTQEEPQISGREDDGDIWEILMRTHSEVLNTLQSRLTKLQIVRHFWERSDIKGAIAALRKLSDHSVQADVINILTDKTEILTLDLFSQLAPVLTGLLGSKTERPVNVSLEMLLKLVAVFGTVIQSTVSARRVVGVDLHAEESKTNRELQVTDLPKLFCGIAKGSEDSSTTDKKRWSYSKKGTRTKPSSSNTIAPGSKSRPLGITCEL

SEQ ID NO: 73163 - DNA, 1020 bp, Arabidopsis thaliana
  misc_feature (1)..(1020): Ceres Seq. ID no. 4959297
  misc_feature: MA Experiment ID: 20000179 Result: Up-regulated in Transcription
  misc_feature: MA Experiment 20000179 PARAMETER Experiment Name: At_Germinating_Seeds_P Parameter: Age (hr) Value: 6 vs. 0
  misc_feature: MA Experiment 20000179 PARAMETER Experiment Name: At_Germinating_Seeds_P Parameter: Tissue Value: Germinating Seeds
  misc_feature: MA Experiment ID: 20000184 Result: Down-regulated in Transcription
  misc_feature: MA Experiment 20000184 PARAMETER Experiment Name: At_Shoots__P Parameter: Age (day) Value: 7
  misc_feature: MA Experiment 20000184 PARAMETER Experiment Name: At_Shoots__P Parameter: Tissue Value: Shoots vs. Whole Plant
  misc_feature: MA Experiment ID: 20000185 Result: Down-regulated in Transcription
  misc_feature: MA Experiment 20000185 PARAMETER Experiment Name: At_Roots__P Parameter: Age (day) Value: 7 vs. 21
  misc_feature: MA Experiment 20000185 PARAMETER Experiment Name: At_Roots__P Parameter: Organism Value: A. thaliana
  misc_feature: MA Experiment 20000185 PARAMETER Experiment Name: At_Roots__P Parameter: Tissue Value: Roots vs. Whole Plant
  misc_feature: MA Experiment ID: 20000213 Result: Up-regulated in Transcription
  misc_feature: MA Experiment 20000213 PARAMETER Experiment Name: At_4deg_Cold_P Parameter: Timepoint (hr) Value: 2
  misc_feature: MA Experiment ID: 20000234 Result: Down-regulated in Transcription
  misc_feature: MA Experiment 20000234 PARAMETER Experiment Name: At_Siliques_P Parameter: Age (day) Value: 21
  misc_feature: MA Experiment 20000234 PARAMETER Experiment Name: At_Siliques_P Parameter: Organism Value: A. thaliana
  misc_feature: MA Experiment 20000234 PARAMETER Experiment Name: At_Siliques_P Parameter: Plant Line Value: WS
  misc_feature: MA Experiment 20000234 PARAMETER Experiment Name: At_Siliques_P Parameter: Tissue Value: Less Than 5mm Siliques vs. Whole Plant
  misc_feature: MA Experiment ID: 20000235 Result: Down-regulated in Transcription
  misc_feature: MA Experiment 20000235 PARAMETER Experiment Name: At_Siliques_P Parameter: Age (day) Value: 21
  misc_feature: MA Experiment 20000235 PARAMETER Experiment Name: At_Siliques_P Parameter: Organism Value: A. thaliana
  misc_feature: MA Experiment 20000235 PARAMETER Experiment Name: At_Siliques_P Parameter: Plant Line Value: WS
  misc_feature: MA Experiment 20000235 PARAMETER Experiment Name: At_Siliques_P Parameter: Tissue Value: 5-10mm Siliques vs. Whole Plant
  misc_feature: MA Experiment ID: 20000264 Result: Down-regulated in Transcription
  misc_feature: MA Experiment 20000264 PARAMETER Experiment Name: At_Open_Flower_P Parameter: Age (day) Value: 21
  misc_feature: MA Experiment 20000264 PARAMETER Experiment Name: At_Open_Flower_P Parameter: Plant Line Value: WS
  misc_feature: MA Experiment 20000264 PARAMETER Experiment Name: At_Open_Flower_P Parameter: Tissue Value: Open Flower vs. Whole Plant
  misc_feature: MA Experiment ID: 20000265 Result: Down-regulated in Transcription
  misc_feature: MA Experiment 20000265 PARAMETER Experiment Name: At_Open_Flower_P Parameter: Age (day) Value: 21
  misc_feature: MA Experiment 20000265 PARAMETER Experiment Name: At_Open_Flower_P Parameter: Plant Line Value: WS
  misc_feature: MA Experiment 20000265 PARAMETER Experiment Name: At_Open_Flower_P Parameter: Tissue Value: Closed Flower vs. Whole Plant
  misc_feature: MA Experiment ID: 20000268 Result: Down-regulated in Transcription
  misc_feature: MA Experiment 20000268 PARAMETER Experiment Name: At_100mM_NaCl__P Parameter: Age (day) Value: 14
  misc_feature: MA Experiment 20000268 PARAMETER Experiment Name: At_100mM_NaCl__P Parameter: Organism Value: A. thaliana
  misc_feature: MA Experiment 20000268 PARAMETER Experiment Name: At_100mM_NaCl__P Parameter: Plant Line Value: WS
  misc_feature: MA Experiment 20000268 PARAMETER Experiment Name: At_100mM_NaCl__P Parameter: Timepoint (hr) Value: 6
  misc_feature: MA Experiment 20000268 PARAMETER Experiment Name: At_100mM_NaCl__P Parameter: Tissue Value: Whole Plant
  misc_feature: MA Experiment 20000268 PARAMETER Experiment Name: At_100mM_NaCl__P Parameter: Treatment Value: 100mM NaCl vs. No Treatment
  misc_feature: MA Experiment ID: 20000286 Result: Down-regulated in Transcription
  misc_feature: MA Experiment 20000286 PARAMETER Experiment Name: At_Open_Flower_P Parameter: Age (day) Value: 21
  misc_feature: MA Experiment 20000286 PARAMETER Experiment Name: At_Open_Flower_P Parameter: Plant Line Value: WS
  misc_feature: MA Experiment 20000286 PARAMETER Experiment Name: At_Open_Flower_P Parameter: Tissue Value: Half Open vs. Whole Plant
  misc_feature: MA Experiment ID: 20000437 Result: Up-regulated in Transcription
  misc_feature: MA Experiment 20000437 PARAMETER Experiment Name: At_Drought_P Parameter: Age (day) Value: 8
  misc_feature: MA Experiment 20000437 PARAMETER Experiment Name: At_Drought_P Parameter: Organism Value: A. thaliana
  misc_feature: MA Experiment 20000437 PARAMETER Experiment Name: At_Drought_P Parameter: Plant Line Value: WS
  misc_feature: MA Experiment 20000437 PARAMETER Experiment Name: At_Drought_P Parameter: Timepoint (hr) Value: 24
  misc_feature: MA Experiment 20000437 PARAMETER Experiment Name: At_Drought_P Parameter: Tissue Value: Whole Plant
  misc_feature: MA Experiment 20000437 PARAMETER Experiment Name: At_Drought_P Parameter: Treatment Value: Drought vs. No Drought
  misc_feature: MA Experiment ID: 20000438 Result: Down-regulated in Transcription
  misc_feature: MA Experiment 20000438 PARAMETER Experiment Name: At_Shoots__P Parameter: Age (day) Value: 14
  misc_feature: MA Experiment 20000438 PARAMETER Experiment Name: At_Shoots__P Parameter: Tissue Value: Shoots vs. Whole Plant
  misc_feature: MA Experiment ID: 20000439 Result: Down-regulated in Transcription
  misc_feature: MA Experiment 20000439 PARAMETER Experiment Name: At_Roots__P Parameter: Age (day) Value: 14 vs. 21
  misc_feature: MA Experiment 20000439 PARAMETER Experiment Name: At_Roots__P Parameter: Organism Value: A. thaliana
  misc_feature: MA Experiment 20000439 PARAMETER Experiment Name: At_Roots__P Parameter: Tissue Value: Roots vs. Whole Plant
  misc_feature: MA Experiment ID: 20000451 Result: Down-regulated in Transcription
  misc_feature: MA Experiment 20000451 PARAMETER Experiment Name: At_CS6879_Shoots-Roots_P Parameter: Age (day) Value: 14
  misc_feature: MA Experiment 20000451 PARAMETER Experiment Name: At_CS6879_Shoots-Roots_P Parameter: Organism Value: A. thaliana
  misc_feature: MA Experiment 20000451 PARAMETER Experiment Name: At_CS6879_Shoots-Roots_P Parameter: Plant Line Value: CS6879 vs. WS
  misc_feature: MA Experiment 20000451 PARAMETER Experiment Name: At_CS6879_Shoots-Roots_P Parameter: Tissue Value: Roots
  misc_feature: MA Experiment ID: 20000452 Result: Down-regulated in Transcription
  misc_feature: MA Experiment 20000452 PARAMETER Experiment Name: At_CS6879_Shoots-Roots_P Parameter: Age (day) Value: 14
  misc_feature: MA Experiment 20000452 PARAMETER Experiment Name: At_CS6879_Shoots-Roots_P Parameter: Organism Value: A. thaliana
  misc_feature: MA Experiment 20000452 PARAMETER Experiment Name: At_CS6879_Shoots-Roots_P Parameter: Plant Line Value: CS6879 vs. WS
  misc_feature: MA Experiment 20000452 PARAMETER Experiment Name: At_CS6879_Shoots-Roots_P Parameter: Tissue Value: Shoots
  misc_feature: MA Experiment ID: 20000606 Result: Up-regulated in Transcription
  misc_feature: MA Experiment 20000606 PARAMETER Experiment Name: At_CS8548_Mutant_P Parameter: Age (day) Value: 14
  misc_feature: MA Experiment 20000606 PARAMETER Experiment Name: At_CS8548_Mutant_P Parameter: Plant Line Value: CS8548 vs. wt
  misc_feature: MA Experiment 20000606 PARAMETER Experiment Name: At_CS8548_Mutant_P Parameter: Tissue Value: Whole Plant
  misc_feature: MA Experiment ID: 20001557 Result: Up-regulated in Transcription
  misc_feature: MA Experiment 20001557 PARAMETER Experiment Name: At_Drought_Soil_Dry_P Parameter: Age (day) Value: 27
  misc_feature: MA Experiment 20001557 PARAMETER Experiment Name: At_Drought_Soil_Dry_P Parameter: Organism Value: A. thaliana
  misc_feature: MA Experiment 20001557 PARAMETER Experiment Name: At_Drought_Soil_Dry_P Parameter: Plant Line Value: WS
  misc_feature: MA Experiment 20001557 PARAMETER Experiment Name: At_Drought_Soil_Dry_P Parameter: Post Timepoint (hr) Value: 3
  misc_feature: MA Experiment 20001557 PARAMETER Experiment Name: At_Drought_Soil_Dry_P Parameter: Post-Treatment Value: Re-Water vs. No Drought
  misc_feature: MA Experiment 20001557 PARAMETER Experiment Name: At_Drought_Soil_Dry_P Parameter: Timepoint (day) Value: 13
  misc_feature: MA Experiment 20001557 PARAMETER Experiment Name: At_Drought_Soil_Dry_P Parameter: Treatment Value: Drought vs. No Drought
  misc_feature: MA Experiment ID: 20001910 Result: Down-regulated in Transcription
  misc_feature: MA Experiment 20001910 PARAMETER Experiment Name: At_Drought_Reproduction_P Parameter: Age (day) Value: 37
  misc_feature: MA Experiment 20001910 PARAMETER Experiment Name: At_Drought_Reproduction_P Parameter: Organism Value: A. thaliana
  misc_feature: MA Experiment 20001910 PARAMETER Experiment Name: At_Drought_Reproduction_P Parameter: Plant Line Value: WS
  misc_feature: MA Experiment 20001910 PARAMETER Experiment Name: At_Drought_Reproduction_P Parameter: Timepoint (day) Value: 7
  misc_feature: MA Experiment 20001910 PARAMETER Experiment Name: At_Drought_Reproduction_P Parameter: Tissue Value: Flowers
  misc_feature: MA Experiment 20001910 PARAMETER Experiment Name: At_Drought_Reproduction_P Parameter: Treatment Value: Drought vs. No Drought
atgacaaccaaggcggtgctaatctcaagcggcgtcgccaccgtggctctgttactgaaactctctgttccggtagctgttgatttctccgtgtcacgagctccgatcttgtggagctccttgttgtcatggctgaaaccaccgtatctttacgttgttaccaacggaattatcatcactatcgttgcttcttctaagtattaccgaagtcaccatgaccgtgatgaagaagatgagatcgtcgtgtacggtggtggaggttataagatccagacggaggagccgattgtgaatcaacatcaagcttctccgaggattctggaggttaaggatttggatactggtgcgcattttggtttcgttgtggcgaatctggaggctgaggaactggaatcagaggcggttacggcggttgtgtttgacgatgaggaggaggagaagaagattatagatagcgcggcgacggcggaggatgaaattgaagaggagcttaagagtgtgattatggttgagaattcagatctggttgaatccgatgtcataccgccgccgatgatgatcgaatcggagaatcttcctccgattgagaagcctctcgttacttcaaggttcggtcaccggaaattgatgaaagcaagtcaagaaggtggaagagctttgagagtgacgaagccgaagaagaacgagacgttggagaatacgtggaagatgataacggaagggaaatcaacgccgttgactagacagttataccggagatctgacacgtttggacgtggagattccgggggagttgacggtgaggtgaaaccggtttataagaagtcggatacgtttagggacaggactaattattatcagttggcggagacggcgaaggtgaggaaagagccgtcgctgagtcaggaagagttgaatcggcgagttgaggcgtttataaagaagtttaatgaggagatgaagttgcagagaatggagtctctcagacagtacaaagagataactagccgtggggtttag

SEQ ID NO: 73164 - protein, 339 aa, Arabidopsis thaliana; identical to SEQ ID NO: 47170
  peptide (1)..(339): Ceres Seq. ID no. 4959298
  misc_feature (4)..(333): Pfam Name: Cotton fibre expressed protein Pfam Description: Cotton fibre expressed protein
  misc_feature (1)..(339): Homolog of NCBI NO: 25373438 NR Description: hypothetical protein F11P17.2 [imported] - thaliana >gi|2443876|gb|AAB71469.1| Hypothetical protein
  misc_feature (1)..(339): Homolog of NCBI NO: 30696552 NR Description: cotton fiber expressed protein -related
  misc_feature (4)..(171): Homolog of NCBI NO: 15220323 NR Description: hypothetical protein; protein id: At1g11230.1
  misc_feature (188)..(334): Homolog of NCBI NO: 15220323 NR Description: hypothetical protein; protein id: At1g11230.1
  misc_feature (4)..(178): Homolog of NCBI NO: 18391249 NR Description: expressed protein; protein id: At1g11210.1, by cDNA: 37592., supported by cDNA: gi_13358179, supported by gi_15146279, supported by cDNA: gi_19699167 [Arabidopsis
  misc_feature (4)..(178): Homolog of NCBI NO: 21593266 NR Description: unknown [Arabidopsis thaliana]
  misc_feature (188)..(339): Homolog of NCBI NO: 18391249 NR Description: expressed protein; protein id: At1g11210.1, by cDNA: 37592., supported by cDNA: gi_13358179, supported by gi_15146279, supported by cDNA: gi_19699167 [Arabidopsis
  misc_feature (188)..(339): Homolog of NCBI NO: 21593266 NR Description: unknown [Arabidopsis thaliana]
  misc_feature (4)..(334): Homolog of NCBI NO: 25373437 NR Description: hypothetical protein [imported] - Arabidopsis >gi|5734740|gb|AAD50005.1|AC007259_18 Hypothetical protein
  misc_feature (132)..(245): Homolog of NCBI NO: 7484718 NR Description: fiber protein 3 [imported] - upland cotton

SEQ ID NO: 73165 - protein, 171 aa, Arabidopsis thaliana
  peptide (1)..(171): Ceres Seq. ID no. 4959299
  misc_feature (1)..(165): Pfam Name: Cotton fibre expressed protein Pfam Description: Cotton fibre expressed protein
  misc_feature (1)..(171): Homolog of NCBI NO: 25373438 NR Description: hypothetical protein F11P17.2 [imported] - thaliana >gi|2443876|gb|AAB71469.1| Hypothetical protein
  misc_feature (1)..(171): Homolog of NCBI NO: 30696552 NR Description: cotton fiber expressed protein -related
  misc_feature (20)..(166): Homolog of NCBI NO: 15220323 NR Description: hypothetical protein; protein id: At1g11230.1
  misc_feature (20)..(171): Homolog of NCBI NO: 18391249 NR Description: expressed protein; protein id: At1g11210.1, by cDNA: 37592., supported by cDNA: gi_13358179, supported by gi_15146279, supported by cDNA: gi_19699167 [Arabidopsis
  misc_feature (20)..(171): Homolog of NCBI NO: 21593266 NR Description: unknown [Arabidopsis thaliana]
  misc_feature (1)..(166): Homolog of NCBI NO: 25373437 NR Description: hypothetical protein [imported] - Arabidopsis >gi|5734740|gb|AAD50005.1|AC007259_18 Hypothetical protein
  misc_feature (1)..(77): Homolog of NCBI NO: 7484718 NR Description: fiber protein 3 [imported] - upland cotton
  misc_feature (1)..(164): Homolog of NCBI NO: 15220310 NR Description: hypothetical protein; protein id: At1g11220.1
  misc_feature (1)..(164): Homolog of NCBI NO: 25373435 NR Description: hypothetical protein [imported] - Arabidopsis >gi|5734737|gb|AAD50002.1|AC007259_15 Unknown protein
  misc_feature (1)..(170): Homolog of NCBI NO: 7484716 NR Description: fiber protein 1 [imported] - upland cotton
MVENSDLVESDVIPPPMMIESENLPPIEKPLVTSRFGHRKLMKASQEGGRALRVTKPKKNETLENTWKMITEGKSTPLTRQLYRRSDTFGRGDSGGVDGEVKPVYKKSDTFRDRTNYYQLAETAKVRKEPSLSQEELNRRVEAFIKKFNEEMKLQRMESLRQYKEITSRGV

SEQ ID NO: 73166 - DNA, 1287 bp, Arabidopsis thaliana
  misc_feature (1)..(1287): Ceres Seq. ID no. 4959406
  misc_feature: MA Experiment ID: 20000171 Result: Up-regulated in Transcription
  misc_feature: MA Experiment 20000171 PARAMETER Experiment Name: At_42deg_Heat_P Parameter: Age (day) Value: 14
  misc_feature: MA Experiment 20000171 PARAMETER Experiment Name: At_42deg_Heat_P Parameter: Organism Value: A. thaliana
  misc_feature: MA Experiment 20000171 PARAMETER Experiment Name: At_42deg_Heat_P Parameter: Plant Line Value: WS
  misc_feature: MA Experiment 20000171 PARAMETER Experiment Name: At_42deg_Heat_P Parameter: Temperature (deg C) Value: 42 vs. 22
  misc_feature: MA Experiment 20000171 PARAMETER Experiment Name: At_42deg_Heat_P Parameter: Timepoint (hr) Value: 1
  misc_feature: MA Experiment 20000171 PARAMETER Experiment Name: At_42deg_Heat_P Parameter: Tissue Value: Aerial
  misc_feature: MA Experiment ID: 20000173 Result: Up-regulated in Transcription
  misc_feature: MA Experiment 20000173 PARAMETER Experiment Name: At_42deg_Heat_P Parameter: Age (day) Value: 14
  misc_feature: MA Experiment 20000173 PARAMETER Experiment Name: At_42deg_Heat_P Parameter: Organism Value: A. thaliana
  misc_feature: MA Experiment 20000173 PARAMETER Experiment Name: At_42deg_Heat_P Parameter: Plant Line Value: WS
  misc_feature: MA Experiment 20000173 PARAMETER Experiment Name: At_42deg_Heat_P Parameter: Temperature (deg C) Value: 42 vs. 22
  misc_feature: MA Experiment 20000173 PARAMETER Experiment Name: At_42deg_Heat_P Parameter: Timepoint (hr) Value: 6
  misc_feature: MA Experiment 20000173 PARAMETER Experiment Name: At_42deg_Heat_P Parameter: Tissue Value: Aerial
  misc_feature: MA Experiment ID: 20000184 Result: Down-regulated in Transcription
  misc_feature: MA Experiment 20000184 PARAMETER Experiment Name: At_Shoots__P Parameter: Age (day) Value: 7
  misc_feature: MA Experiment 20000184 PARAMETER Experiment Name: At_Shoots__P Parameter: Tissue Value: Shoots vs. Whole Plant
  misc_feature: MA Experiment ID: 20001451 Result: Down-regulated in Transcription
  misc_feature: MA Experiment 20001451 PARAMETER Experiment Name: At_Far-red-induction_P Parameter: Age (day) Value: 7
  misc_feature: MA Experiment 20001451 PARAMETER Experiment Name: At_Far-red-induction_P Parameter: Light Value: Far-red vs. White
  misc_feature: MA Experiment 20001451 PARAMETER Experiment Name: At_Far-red-induction_P Parameter: Organism Value: A. thaliana
  misc_feature: MA Experiment 20001451 PARAMETER Experiment Name: At_Far-red-induction_P Parameter: Plant Line Value: Columbia
  misc_feature: MA Experiment 20001451 PARAMETER Experiment Name: At_Far-red-induction_P Parameter: Timepoint (hr) Value: 24
  misc_feature: MA Experiment 20001451 PARAMETER Experiment Name: At_Far-red-induction_P Parameter: Tissue Value: Whole Plant
  misc_feature: MA Experiment ID: 20001557 Result: Up-regulated in Transcription
  misc_feature: MA Experiment 20001557 PARAMETER Experiment Name: At_Drought_Soil_Dry_P Parameter: Age (day) Value: 27
  misc_feature: MA Experiment 20001557 PARAMETER Experiment Name: At_Drought_Soil_Dry_P Parameter: Organism Value: A. thaliana
  misc_feature: MA Experiment 20001557 PARAMETER Experiment Name: At_Drought_Soil_Dry_P Parameter: Plant Line Value: WS
  misc_feature: MA Experiment 20001557 PARAMETER Experiment Name: At_Drought_Soil_Dry_P Parameter: Post Timepoint (hr) Value: 3
  misc_feature: MA Experiment 20001557 PARAMETER Experiment Name: At_Drought_Soil_Dry_P Parameter: Post-Treatment Value: Re-Water vs. No Drought
  misc_feature: MA Experiment 20001557 PARAMETER Experiment Name: At_Drought_Soil_Dry_P Parameter: Timepoint (day) Value: 13
  misc_feature: MA Experiment 20001557 PARAMETER Experiment Name: At_Drought_Soil_Dry_P Parameter: Treatment Value: Drought vs. No Drought
atggcgttgttgggatttgcttgcgggcctcgttacagacagctgcagtatgaggtcctccatcgaactctggagaaagcaggtcctgcttttatcaaatttggtcaatggattgctacgcgacctgatcggtttaataaggatttgtgtttgcagctttcaaagcttcacagtaatgctcctgagcacagttttgcgttcaccaaaaagagcattgaaaatgcatttggtcgtaaactctctgagatatttgaggaatttgatgaggcgccagtggcatctgggagtatagctcaagtacaccgagcttccttgaagtttcagtatgcaggacaaaaggtgaagtcctcggaagttgctgtgaaagttagacatccttgtgttgaggaaacgatgaagcgagattttgtgataattaatttcgtggcgaggctaaccacttttattccggggttaaattggcttagattggacgagtgtgtgcaacagtttagtgtctacatgttgtcccaagttgatctctcaagggaagcttctcatttgagtcggtttatatataacttccgtggatggaaagatgtctcttttcctaagcccatctatcctctaatacatcccgctgttttagtcgagacgtatgagcacggagagagtgtggctcgttatgttgatggctccgaaggacaagaaaaacttaaggctaaagtagctcatatcggaactaatgctctcttgaaaatgctcctggtcgacaacttcattcatgctgatatgcatcctgggaatattcttgtccggccaaacaatactagaagaggtctattcagatcgaggaagccacacatcgttttcctagatgtgggcatgactgcagaactttcaaaaactgaccgagataacctactcggatttttcaaggccgttgcacgtagagacggccggactgctgctgaacgaacacttaaattatctaaacaacagaattgtcctgatccacaggcctttatcaaggaagtagaagaagcatttacattctggggaacagaggaaggggatctagtccatccagcggattgtatgcacgaactattcgagaaaatgaggagtcatagagttaatatcgacggcaatgtgtccaccgtcatgtttacaacattagttctcgagggttggcaacggaaactggatccaggatacgatgtgatgcgtacgctacaaacaatgctgctgaaaacggattggatgaaatcactttcttacacgatcgatggacttatggctccgtag

SEQ ID NO: 73167 - protein, 428 aa, Arabidopsis thaliana; identical to SEQ ID NO: 46436
  peptide (1)..(428): Ceres Seq. ID no. 4959407
  misc_feature (74)..(200): Pfam Name: ABC1 family Pfam Description: ABC1 family
  misc_feature (1)..(428): Homolog of NCBI NO: 25404331 NR Description: hypothetical protein T25B24.1 [imported] - thaliana >gi|4585871|gb|AAD25544.1|AC005850_1 Unknown protein
  misc_feature (1)..(428): Homolog of NCBI NO: 30696591 NR Description: expressed protein [Arabidopsis thaliana] unknown protein [Arabidopsis thaliana]
  misc_feature (1)..(428): Homolog of NCBI NO: 30682208 NR Description: hypethetical 62.8 KD protein in SSE1-CAR1
  misc_feature (1)..(428): Homolog of NCBI NO: 19387282 NR Description: putative 62.8 kDa protein [Oryza sativa (japonica
  misc_feature (1)..(428): Homolog of NCBI NO: 32488318 NR Description: OSJNBa0015K02.12 [Oryza sativa (japonica
  misc_feature (6)..(413): Homolog of NCBI NO: 34394005 NR Description: putative ubiquinone biosynthesis protein AarF
  misc_feature (95)..(287): Homolog of NCBI NO: 32261307 NR Description: putative ubiquinone biosynthesis protein AarF sapiens] >gi|31872130|gb|AAP60021.1| putative ubiquinone
  misc_feature (282)..(410): Homolog of NCBI NO: 32261307 NR Description: putative ubiquinone biosynthesis protein AarF sapiens] >gi|31872130|gb|AAP60021.1| putative ubiquinone
  misc_feature (10)..(103): Homolog of NCBI NO: 32261307 NR Description: putative ubiquinone biosynthesis protein AarF sapiens] >gi|31872130|gb|AAP60021.1| putative ubiquinone
  misc_feature (89)..(266): Homolog of NCBI NO: 32409949 NR Description: hypothetical protein [Neurospora crassa]

SEQ ID NO: 73168 - protein, 297 aa, Arabidopsis thaliana
  peptide (1)..(297): Ceres Seq. ID no. 4959408
  misc_feature (1)..(69): Pfam Name: ABC1 family Pfam Description: ABC1 family
  misc_feature (1)..(297): Homolog of NCBI NO: 25404331 NR Description: hypothetical protein T25B24.1 [imported] - thaliana >gi|4585871|gb|AAD25544.1|AC005850_1 Unknown protein
  misc_feature (1)..(297): Homolog of NCBI NO: 30696591 NR Description: expressed protein [Arabidopsis thaliana] unknown protein [Arabidopsis thaliana]
  misc_feature (1)..(297): Homolog of NCBI NO: 30682208 NR Description: hypethetical 62.8 KD protein in SSE1-CAR1
  misc_feature (1)..(297): Homolog of NCBI NO: 19387282 NR Description: putative 62.8 kDa protein [Oryza sativa (japonica
  misc_feature (1)..(297): Homolog of NCBI NO: 32488318 NR Description: OSJNBa0015K02.12 [Oryza sativa (japonica
  misc_feature (1)..(282): Homolog of NCBI NO: 34394005 NR Description: putative ubiquinone biosynthesis protein AarF
  misc_feature (1)..(156): Homolog of NCBI NO: 32261307 NR Description: putative ubiquinone biosynthesis protein AarF sapiens] >gi|31872130|gb|AAP60021.1| putative ubiquinone
  misc_feature (151)..(279): Homolog of NCBI NO: 32261307 NR Description: putative ubiquinone biosynthesis protein AarF sapiens] >gi|31872130|gb|AAP60021.1| putative ubiquinone
  misc_feature (1)..(135): Homolog of NCBI NO: 32409949 NR Description: hypothetical protein [Neurospora crassa]
  misc_feature (148)..(271): Homolog of NCBI NO: 32409949 NR Description: hypothetical protein [Neurospora crassa]
MKRDFVIINFVARLTTFIPGLNWLRLDECVQQFSVYMLSQVDLSREASHLSRFIYNFRGWKDVSFPKPIYPLIHPAVLVETYEHGESVARYVDGSEGQEKLKAKVAHIGTNALLKMLLVDNFIHADMHPGNILVRPNNTRRGLFRSRKPHIVFLDVGMTAELSKTDRDNLLGFFKAVARRDGRTAAERTLKLSKQQNCPDPQAFIKEVEEAFTFWGTEEGDLVHPADCMHELFEKMRSHRVNIDGNVSTVMFTTLVLEGWQRKLDPGYDVMRTLQTMLLKTDWMKSLSYTIDGLMAP

SEQ ID NO: 73169 - protein, 261 aa, Arabidopsis thaliana
  peptide (1)..(261): Ceres Seq. ID no. 4959409
  misc_feature (1)..(261): Homolog of NCBI NO: 25404331 NR Description: hypothetical protein T25B24.1 [imported] - thaliana >gi|4585871|gb|AAD25544.1|AC005850_1 Unknown protein
  misc_feature (1)..(261): Homolog of NCBI NO: 30696591 NR Description: expressed protein [Arabidopsis thaliana] unknown protein [Arabidopsis thaliana]
  misc_feature (1)..(261): Homolog of NCBI NO: 30682208 NR Description: hypethetical 62.8 KD protein in SSE1-CAR1
  misc_feature (1)..(261): Homolog of NCBI NO: 19387282 NR Description: putative 62.8 kDa protein [Oryza sativa (japonica
  misc_feature (1)..(261): Homolog of NCBI NO: 32488318 NR Description: OSJNBa0015K02.12 [Oryza sativa (japonica
  misc_feature (1)..(246): Homolog of NCBI NO: 34394005 NR Description: putative ubiquinone biosynthesis protein AarF
  misc_feature (1)..(120): Homolog of NCBI NO: 32261307 NR Description: putative ubiquinone biosynthesis protein AarF sapiens] >gi|31872130|gb|AAP60021.1| putative ubiquinone
  misc_feature (115)..(243): Homolog of NCBI NO: 32261307 NR Description: putative ubiquinone biosynthesis protein AarF sapiens] >gi|31872130|gb|AAP60021.1| putative ubiquinone
  misc_feature (1)..(99): Homolog of NCBI NO: 32409949 NR Description: hypothetical protein [Neurospora crassa]
  misc_feature (112)..(235): Homolog of NCBI NO: 32409949 NR Description: hypothetical protein [Neurospora crassa]
MLSQVDLSREASHLSRFIYNFRGWKDVSFPKPIYPLIHPAVLVETYEHGESVARYVDGSEGQEKLKAKVAHIGTNALLKMLLVDNFIHADMHPGNILVRPNNTRRGLFRSRKPHIVFLDVGMTAELSKTDRDNLLGFFKAVARRDGRTAAERTLKLSKQQNCPDPQAFIKEVEEAFTFWGTEEGDLVHPADCMHELFEKMRSHRVNIDGNVSTVMFTTLVLEGWQRKLDPGYDVMRTLQTMLLKTDWMKSLSYTIDGLMAP

SEQ ID NO: 73170 - DNA, 2457 bp, Arabidopsis thaliana
  misc_feature (1)..(2457): Ceres Seq. ID no. 4959410
  misc_feature: MA Experiment ID: 20000314 Result: Up-regulated in Transcription
  misc_feature: MA Experiment 20000314 PARAMETER Experiment Name: At_14day_Shoots-Roots_Sub_P Parameter: Age (day) Value: 14
  misc_feature: MA Experiment 20000314 PARAMETER Experiment Name: At_14day_Shoots-Roots_Sub_P Parameter: Organism Value: A. thaliana
  misc_feature: MA Experiment 20000314 PARAMETER Experiment Name: At_14day_Shoots-Roots_Sub_P Parameter: Plant Line Value: WS
  misc_feature: MA Experiment 20000314 PARAMETER Experiment Name: At_14day_Shoots-Roots_Sub_P Parameter: Tissue Value: Roots vs. Whole Plant
atggggaagaagaggatcatgttctttgcttccttgctcttaattaccatctttttaagtttcagctatgcagggataacgagagaaagtcctctgtcaataggaaaaactctcagctcctctaatggagtttatgaattgggattcttcagttttaataactcccaaaatcagtatgttggaatctggttcaagggtatcattccccgggtggttgtgtgggtggccaatagagaaaagcctgttacagactctgcagcaaatttaactatcagcagcaatggaagtcttctgttgtttaatgaaaatcatagcgttgtgtggtccattggagaaacttttgcatctaacgggtctcgtgcggagcttacagacaacggaaatttagttgtcatagacaataattcgggaagaactctatgggaaagctttgagcattttggtgacactatgctacctttctcaaacctgatgtataatcttgccacaggtgagaagcgggtgttgacttcttggaaaagtcacactgatccatcgcctggcgattttacggttcagattacaccgcaagttccatcccaggcgtgtactatgagaggctcaaagacttattggagaagcggtccatgggctaaaacaaggttcaccgggatacctgtaatggatgacacatatacaagtccattcagccttcagcaagatacaaacgggtcaggatccttcacttattttgaaagaaacttcaaactttcatatataatgataacatcagaaggctcactgaagatttttcagcataatggaatggactgggaattaaacttcgaggctccagaaaattcatgcgatatttacggcttttgtggaccttttggaatttgtgttatgtcagtacctccaaagtgtaaatgcttcaaagggtttgtaccaaaatccattgaggagtggaaaagaggaaactggactgatggttgtgtgaggcatactgaactacattgccaaggaaacactaatggtaaaactgtaaacggcttctatcacgttgccaacataaagcctccagacttttacgaatttgcaagttttgtggatgctgaaggatgctaccaaatttgcctccacaattgttcttgcttggcctttgcttatatcaatggaataggttgcttaatgtggaaccaagacctaatggacgcagtgcaattttctgcagggggagaaattctttccattcgccttgcaagttctgaactaggtggaaataagcgcaacaaaatcattgttgctagtattgtgagcctttctctttttgtgatactggcttttgctgcgttttgtttcttgagatacaaagtgaaacataccgcgaagatatcaaagattgcttcaaaagaggcatggaataatgatctagagccacaagatgtctcaggtttaaagttctttgagatgaataccattcaaactgccactgataatttcagtctctcaaataaactaggacaaggtggatttggctcagtttacaagggaaagctgcaagatgggaaagaaattgctgtaaaacggctttctagcagctccggacagggaaaagaggagttcatgaatgaaatagtactcatctcgaaactacaacataaaaacttggttaggattctgggatgttgcattgaaggagaagagaggctgttggtatatgagtttttgctgaacaaaagccttgatacttttctcttcgttctgatcgtttctatacggtattattgcttagattcaagaaaaaggcttgagattgactggcctaagagatttaatatcattgaaggcattgcgcgtgggcttcactatctccaccgtgactcatgcctcagggtcattcaccgtgatcttaaggttagcaatattcttctggatgagaagatgaacccaaaaatatcagactttggattggctcggatgtatcagggaaccgaatatcaggacaacactcgtagggttgcaggaactctaggatatatggctcccgagtatgcatggactgggatgttctctgagaaatcagatatctacagttttggagttatactgttggaaatcatcaccggggagaagatctcaagattcagctatggtagacaaggaaaaacccttcttgcatatgcatgggaatcttggtgtgaaagtggaggaatcgatcttttggataaagatgttgctgattcatgtcacccattagaagttgagagatgtgtgcagattggtttgctatgtgttcaacaccaacctgctgatagaccaaacacaatggagttgttgtctatgctcaccacaacatcagatcttacatcaccaaaacagcccacatttgtagtgcacacgagagatgaagaatctctgtctcagggtttgatcaccgtcaatgagatgacccaatctgtgatccttgggcgttaa

SEQ ID NO: 73171 - protein, 818 aa, Arabidopsis thaliana
  peptide (1)..(818): Ceres Seq. ID no. 4959411
  misc_feature (69)..(179): Pfam Name: D-mannose binding lectin Pfam Description: D-mannose binding lectin
  misc_feature (1)..(818): Homolog of NCBI NO: 30682149 NR Description: S-locus protein kinase, putative [Arabidopsis
  misc_feature (1)..(818): Homolog of NCBI NO: 30682152 NR Description: S-locus protein kinase, putative [Arabidopsis
  misc_feature (246)..(580): Homolog of NCBI NO: 30696575 NR Description: S-locus protein kinase, putative [Arabidopsis
  misc_feature (697)..(818): Homolog of NCBI NO: 30696575 NR Description: S-locus protein kinase, putative [Arabidopsis
  misc_feature (151)..(232): Homolog of NCBI NO: 30696575 NR Description: S-locus protein kinase, putative [Arabidopsis
  misc_feature (420)..(694): Homolog of NCBI NO: 30696575 NR Description: S-locus protein kinase, putative [Arabidopsis
  misc_feature (32)..(818): Homolog of NCBI NO: 30314606 NR Description: S receptor kinase [Brassica rapa]
  misc_feature (6)..(413): Homolog of NCBI NO: 15220351 NR Description: receptor kinase, putative; protein id:
  misc_feature (479)..(818): Homolog of NCBI NO: 15220351 NR Description: receptor kinase, putative; protein id:
  misc_feature (32)..(796): Homolog of NCBI NO: 25956275 NR Description: unnamed protein product [Lotus japonicus]
MGKKRIMFFASLLLITIFLSFSYAGITRESPLSIGKTLSSSNGVYELGFFSFNNSQNQYVGIWFKGIIPRVVVWVANREKPVTDSAANLTISSNGSLLLFNENHSVVWSIGETFASNGSRAELTDNGNLVVIDNNSGRTLWESFEHFGDTMLPFSNLMYNLATGEKRVLTSWKSHTDPSPGDFTVQITPQVPSQACTMRGSKTYWRSGPWAKTRFTGIPVMDDTYTSPFSLQQDTNGSGSFTYFERNFKLSYIMITSEGSLKIFQHNGMDWELNFEAPENSCDIYGFCGPFGICVMSVPPKCKCFKGFVPKSIEEWKRGNWTDGCVRHTELHCQGNTNGKTVNGFYHVANIKPPDFYEFASFVDAEGCYQICLHNCSCLAFAYINGIGCLMWNQDLMDAVQFSAGGEILSIRLASSELGGNKRNKIIVASIVSLSLFVILAFAAFCFLRYKVKHTAKISKIASKEAWNNDLEPQDVSGLKFFEMNTIQTATDNFSLSNKLGQGGFGSVYKGKLQDGKEIAVKRLSSSSGQGKEEFMNEIVLISKLQHKNLVRILGCCIEGEERLLVYEFLLNKSLDTFLFVLIVSIRYYCLDSRKRLEIDWPKRFNIIEGIARGLHYLHRDSCLRVIHRDLKVSNILLDEKMNPKISDFGLARMYQGTEYQDNTRRVAGTLGYMAPEYAWTGMFSEKSDIYSFGVILLEIITGEKISRFSYGRQGKTLLAYAWESWCESGGIDLLDKDVADSCHPLEVERCVQIGLLCVQHQPADRPNTMELLSMLTTTSDLTSPKQPTFVVHTRDEESLSQGLITVNEMTQSVILGR

SEQ ID NO: 73172 - protein, 812 aa, Arabidopsis thaliana
  peptide (1)..(812): Ceres Seq. ID no. 4959412
  misc_feature (63)..(173): Pfam Name: D-mannose binding lectin Pfam Description: D-mannose binding lectin
  misc_feature (1)..(812): Homolog of NCBI NO: 30682149 NR Description: S-locus protein kinase, putative [Arabidopsis
  misc_feature (1)..(812): Homolog of NCBI NO: 30682152 NR Description: S-locus protein kinase, putative [Arabidopsis
  misc_feature (240)..(574): Homolog of NCBI NO: 30696575 NR Description: S-locus protein kinase, putative [Arabidopsis
  misc_feature (691)..(812): Homolog of NCBI NO: 30696575 NR Description: S-locus protein kinase, putative [Arabidopsis
  misc_feature (145)..(226): Homolog of NCBI NO: 30696575 NR Description: S-locus protein kinase, putative [Arabidopsis
  misc_feature (414)..(688): Homolog of NCBI NO: 30696575 NR Description: S-locus protein kinase, putative [Arabidopsis
  misc_feature (26)..(812): Homolog of NCBI NO: 30314606 NR Description: S receptor kinase [Brassica rapa]
  misc_feature (1)..(407): Homolog of NCBI NO: 15220351 NR Description: receptor kinase, putative; protein id:
  misc_feature (473)..(812): Homolog of NCBI NO: 15220351 NR Description: receptor kinase, putative; protein id:
  misc_feature (26)..(790): Homolog of NCBI NO: 25956275 NR Description: unnamed protein product [Lotus japonicus]
MFFASLLLITIFLSFSYAGITRESPLSIGKTLSSSNGVYELGFFSFNNSQNQYVGIWFKGIIPRVVVWVANREKPVTDSAANLTISSNGSLLLFNENHSVVWSIGETFASNGSRAELTDNGNLVVIDNNSGRTLWESFEHFGDTMLPFSNLMYNLATGEKRVLTSWKSHTDPSPGDFTVQITPQVPSQACTMRGSKTYWRSGPWAKTRFTGIPVMDDTYTSPFSLQQDTNGSGSFTYFERNFKLSYIMITSEGSLKIFQHNGMDWELNFEAPENSCDIYGFCGPFGICVMSVPPKCKCFKGFVPKSIEEWKRGNWTDGCVRHTELHCQGNTNGKTVNGFYHVANIKPPDFYEFASFVDAEGCYQICLHNCSCLAFAYINGIGCLMWNQDLMDAVQFSAGGEILSIRLASSELGGNKRNKIIVASIVSLSLFVILAFAAFCFLRYKVKHTAKISKIASKEAWNNDLEPQDVSGLKFFEMNTIQTATDNFSLSNKLGQGGFGSVYKGKLQDGKEIAVKRLSSSSGQGKEEFMNEIVLISKLQHKNLVRILGCCIEGEERLLVYEFLLNKSLDTFLFVLIVSIRYYCLDSRKRLEIDWPKRFNIIEGIARGLHYLHRDSCLRVIHRDLKVSNILLDEKMNPKISDFGLARMYQGTEYQDNTRRVAGTLGYMAPEYAWTGMFSEKSDIYSFGVILLEIITGEKISRFSYGRQGKTLLAYAWESWCESGGIDLLDKDVADSCHPLEVERCVQIGLLCVQHQPADRPNTMELLSMLTTTSDLTSPKQPTFVVHTRDEESLSQGLITVNEMTQSVILGR

SEQ ID NO: 73173 - protein, 668 aa, Arabidopsis thaliana
  peptide (1)..(668): Ceres Seq. ID no. 4959413
  misc_feature (1)..(668): Homolog of NCBI NO: 30682149 NR Description: S-locus protein kinase, putative [Arabidopsis
  misc_feature (1)..(668): Homolog of NCBI NO: 30682152 NR Description: S-locus protein kinase, putative [Arabidopsis
  misc_feature (96)..(430): Homolog of NCBI NO: 30696575 NR Description: S-locus protein kinase, putative [Arabidopsis
  misc_feature (547)..(668): Homolog of NCBI NO: 30696575 NR Description: S-locus protein kinase, putative [Arabidopsis
  misc_feature (1)..(82): Homolog of NCBI NO: 30696575 NR Description: S-locus protein kinase, putative [Arabidopsis
  misc_feature (270)..(544): Homolog of NCBI NO: 30696575 NR Description: S-locus protein kinase, putative [Arabidopsis
  misc_feature (1)..(668): Homolog of NCBI NO: 30314606 NR Description: S receptor kinase [Brassica rapa]
  misc_feature (1)..(263): Homolog of NCBI NO: 15220351 NR Description: receptor kinase, putative; protein id:
  misc_feature (329)..(668): Homolog of NCBI NO: 15220351 NR Description: receptor kinase, putative; protein id:
  misc_feature (1)..(646): Homolog of NCBI NO: 25956275 NR Description: unnamed protein product [Lotus japonicus]
MLPFSNLMYNLATGEKRVLTSWKSHTDPSPGDFTVQITPQVPSQACTMRGSKTYWRSGPWAKTRFTGIPVMDDTYTSPFSLQQDTNGSGSFTYFERNFKLSYIMITSEGSLKIFQHNGMDWELNFEAPENSCDIYGFCGPFGICVMSVPPKCKCFKGFVPKSIEEWKRGNWTDGCVRHTELHCQGNTNGKTVNGFYHVANIKPPDFYEFASFVDAEGCYQICLHNCSCLAFAYINGIGCLMWNQDLMDAVQFSAGGEILSIRLASSELGGNKRNKIIVASIVSLSLFVILAFAAFCFLRYKVKHTAKISKIASKEAWNNDLEPQDVSGLKFFEMNTIQTATDNFSLSNKLGQGGFGSVYKGKLQDGKEIAVKRLSSSSGQGKEEFMNEIVLISKLQHKNLVRILGCCIEGEERLLVYEFLLNKSLDTFLFVLIVSIRYYCLDSRKRLEIDWPKRFNIIEGIARGLHYLHRDSCLRVIHRDLKVSNILLDEKMNPKISDFGLARMYQGTEYQDNTRRVAGTLGYMAPEYAWTGMFSEKSDIYSFGVILLEIITGEKISRFSYGRQGKTLLAYAWESWCESGGIDLLDKDVADSCHPLEVERCVQIGLLCVQHQPADRPNTMELLSMLTTTSDLTSPKQPTFVVHTRDEESLSQGLITVNEMTQSVILGR

SEQ ID NO: 73174 - DNA, 3372 bp, Arabidopsis thaliana
  misc_feature (1)..(3372): Ceres Seq. ID no. 4959487
  misc_feature: MA Experiment ID: 20000307 Result: Down-regulated in Transcription
  misc_feature: MA Experiment 20000307 PARAMETER Experiment Name: At_Germinating_Seeds_Sub_P Parameter: Age (hr) Value: 24 vs. 0
  misc_feature: MA Experiment 20000307 PARAMETER Experiment Name: At_Germinating_Seeds_Sub_P Parameter: Organism Value: A. thaliana
  misc_feature: MA Experiment 20000307 PARAMETER Experiment Name: At_Germinating_Seeds_Sub_P Parameter: Plant Line Value: WS
  misc_feature: MA Experiment 20000307 PARAMETER Experiment Name: At_Germinating_Seeds_Sub_P Parameter: Tissue Value: Germinating Seeds
  misc_feature: MA Experiment ID: 20000328 Result: Down-regulated in Transcription
  misc_feature: MA Experiment 20000328 PARAMETER Experiment Name: At_42deg_Heat_Sub_P Parameter: Age (day) Value: 14
  misc_feature: MA Experiment 20000328 PARAMETER Experiment Name: At_42deg_Heat_Sub_P Parameter: Organism Value: A. thaliana
  misc_feature: MA Experiment 20000328 PARAMETER Experiment Name: At_42deg_Heat_Sub_P Parameter: Plant Line Value: WS
  misc_feature: MA Experiment 20000328 PARAMETER Experiment Name: At_42deg_Heat_Sub_P Parameter: Temperature (deg C) Value: 42 vs. 22
  misc_feature: MA Experiment 20000328 PARAMETER Experiment Name: At_42deg_Heat_Sub_P Parameter: Timepoint (hr) Value: 6
  misc_feature: MA Experiment 20000328 PARAMETER Experiment Name: At_42deg_Heat_Sub_P Parameter: Tissue Value: Aerial
  misc_feature: MA Experiment ID: 20000355 Result: Down-regulated in Transcription
  misc_feature: MA Experiment 20000355 PARAMETER Experiment Name: At_Siliques_Sub_P Parameter: Age (day) Value: 21
  misc_feature: MA Experiment 20000355 PARAMETER Experiment Name: At_Siliques_Sub_P Parameter: Organism Value: A. thaliana
  misc_feature: MA Experiment 20000355 PARAMETER Experiment Name: At_Siliques_Sub_P Parameter: Plant Line Value: WS
  misc_feature: MA Experiment 20000355 PARAMETER Experiment Name: At_Siliques_Sub_P Parameter: Tissue Value: Less Than 5mm Siliques vs. Whole Plant
  misc_feature: MA Experiment ID: 20000440 Result: Down-regulated in Transcription
  misc_feature: MA Experiment 20000440 PARAMETER Experiment Name: At_Closed-Flower__Sub_P Parameter: Tissue Value: Closed Flower vs. Whole Plant
atggaagtaactttagggccaatgacttatttatggattgttgtgtcttttgctctgaacttgttatggattcttgtcaggtatcctgatgacgtccatgatcgtaagtgggttccattctcagaagatgaattgatgacagtaaacaacactgtagatacagactttgataatccttatgacccgccaaaagctgtaattagcacggctgccataccaaccaatgccagttcaagtctgatccttacttggctaacttccaatccagaagatcagatctacatctacattcactttcttgaactacaagtgttacggggcaatgaaactaggatattcgacattttgatgaatggaatcattacttctccagcttatagtcctacggactcggttgtcgacacagtatacaacaaagaacctctaaggtgcaatgcttcagtatgcagcttggaactaagaaaaacactcggttcaactcttccacctctaattaacgccatcgagattttcacagtacttgagtttccagaaacagcaacatatgaagatgatttcagtgcaattgagaacatccgagctgcgtatgcattaagcaacgggagtggagatccatgcgtccctaaaccatcccactatctcaaatgcagcaacttcacggatacgtccgtagtacaattgagaatcatttccctaaatttatcctcaatgagattatccggtgtcatatcacctagcattcaaactctgaccaagcttcaagtgctggacttgtcgaataacaatttgaccggaggagtacccggatttctatccaacatggtgtccttgttgtcaatagacttaagcaataatagtttaagtggtccgattccacaagctcttcttgatagacgaaaggaaggattggatttaaagtttcatggaaacacaaaactttatgagtttatttcacacaggaaaaagaattttccattagtagcagttgttgcctcagcttctgccatcgccattgtcctggttgttcttggtgtccttttcatctgccttcgaagaaagccaccaagtagagaggctccacactcatcaatcgaaacagtaaagagaagatttacttattcagaggttatggcaatgacaaataatttcaagaaaattattggtgaaggagggtttggaatcatctatcacggtcatctgaacgatggccagcaagtagctgttaaagtactatctgaatcatcatcccaaggatacaagcagttcaaggctgaggttgaacttttaatgagagttcatcatgtaaacctggtaaaccttgctggatattgtgatgacagcaaccacttagcactgatctatgagttcatggagaatagagacttaaaagagcatctctcaggaaaagaaggctcctcattcttggactggccatgtagactaaaaatagctgcagaagctgcacttggattggaatacttgcacacaggatgcaaaccaccgatgattcatagagatgttaaaagcacaaatatattgttgaatgaagactttcaggcaaaactcggtgattttggactttcgagatctttccctatcgggggtgaaactcatgtgtcgacagttgttgtcggaactcatggatttctcgatcctgaatattaccaaacacagcggttgtccgagaagagtgatgtctacagtttcggtattgtcttactagaaatcatcacaaacaaacttgtgattgatcaaactcgtgaaaggcctcatatagcagaatgggtgaggtatatgctttcaataggtgatatcgaaagtgtaatggatccaaaccttaaggggaaatatgactctagctctgcctggaaagttcttgaactagcgatgttgtgttcgaaactttctttagcagaaagaccaaacatggctcaaattgttcatgaactaaatgagtatctattgtacgagaactcaagaagagaaatcagtcaagatgtgaggtcaaaaaattccagtgaagtgagcacaaacaccgaaatggctcctatggcactgaacctcctcgaaaaggcatctcctttttccaattccttctcctatgctaatgctacagatgcgagccttagagctggtcgaaaagggttgagtttttctgtctcttacctcgttgattcattgggtttacctaaaaaggtcgcagaatcgatctcaaagaaagtcagcttcgaggacaaaggcaatcctgattctgttctgagtctattgagaagtcatgggttcactgattctcagatctcaagcatcattacggattatccacaattgctagtagctgatgctgagaaatcaattggtcccaagcttcagtttctgcagtccagaggagcttcaaggtctgagctcactcatattgtatctacagttcctgaaatcttggggaagagaggggacaaaactatcagcatatactatgattttgttaaagagattatagaagcggataagagttccaagttcgaaaagttatgtcattctttgccagagggtagtaagcaggagaacaaaatcagaaatgttttggttttgagagaattgggtgttcctcaaaggttgttgttcccattgcttatatctgatcaccaacctgtctgtggaaaagaaaattttgaagaatcactcaagaaagttgttgagatgggttttgatccaaccacctcaaagtttgtcaaagctcttagggttgtttacagattccgcgacaaaactatagaagcaaaagttaatgtctgtaaaagtttaggcttttctgttggagatgtatgggcaatgtttaagaagtgtccttcctttctgaatttctctgagaacaagatagttcaaacttgggaaaccctgaagaagtgtggactactcgaagacgatgtcctctcagtgttgaagaagtttccacaatgcattaatgcttcagagcagaagataatgaactccattgaaacatttctaggcttaggatttagcagagatgaggttgcaatgatagccaagcgctttcctcaatgccttattttatctgcagagacagtgaagaaaaagactgagtttctggtgaagaagatgaattggccactaaaggctgtggtttcaacccctgcggtacttggatacagcttagagaagaggactatcccaaggtgtaatgtaattaaagctctcatgtccaaaggatcgcttggaagtgaactccctggaatgtcgtctgttttggtatgtaccaatgaagaattcttatgcaggtatgtgaagaaccatgatgacaagaagatagtacctgagttgatggctattttcaccggagatcgcgtttcatag

SEQ ID NO: 73175 - protein, 1123 aa, Arabidopsis thaliana
  peptide (1)..(1123): Ceres Seq. ID no. 4959488
  misc_feature (753)..(1098): Pfam Name: mTERF Pfam Description: mTERF
  misc_feature (686)..(1123): Homolog of NCBI NO: 25345734 NR Description: hypothetical protein F19K23.4 [imported] - thaliana >gi|2160136|gb|AAB60758.1| F19K23.4 gene product
  misc_feature (448)..(685): Homolog of NCBI NO: 25404359 NR Description: hypothetical protein F19K23.5 [imported] - thaliana >gi|2160137|gb|AAB60759.1| Similar to Arabidopsis light
  misc_feature (26)..(143): Homolog of NCBI NO: 25404359 NR Description: hypothetical protein F19K23.5 [imported] - thaliana >gi|2160137|gb|AAB60759.1| Similar to Arabidopsis light
  misc_feature (356)..(426): Homolog of NCBI NO: 25404359 NR Description: hypothetical protein F19K23.5 [imported] - thaliana >gi|2160137|gb|AAB60759.1| Similar to Arabidopsis light
  misc_feature (26)..(685): Homolog of NCBI NO: 25387148 NR Description: probable protein kinase [imported] - Arabidopsis >gi|9802795|gb|AAF99864.1|AC015448_14 Putative protein kinase
  misc_feature (26)..(685): Homolog of NCBI NO: 15218048 NR Description: light repressible receptor protein kinase,
  misc_feature (26)..(685): Homolog of NCBI NO: 25387154 NR Description: protein F22G5.6 [imported] - Arabidopsis thaliana
  misc_feature (26)..(681): Homolog of NCBI NO: 15232537 NR Description: serine/threonine-specific protein kinase,
  misc_feature (26)..(685): Homolog of NCBI NO: 15222436 NR Description: protein kinase, putative; protein id: At1g07560.1
  misc_feature (26)..(672): Homolog of NCBI NO: 15225949 NR Description: putative receptor-like protein kinase; protein id:
MEVTLGPMTYLWIVVSFALNLLWILVRYPDDVHDRKWVPFSEDELMTVNNTVDTDFDNPYDPPKAVISTAAIPTNASSSLILTWLTSNPEDQIYIYIHFLELQVLRGNETRIFDILMNGIITSPAYSPTDSVVDTVYNKEPLRCNASVCSLELRKTLGSTLPPLINAIEIFTVLEFPETATYEDDFSAIENIRAAYALSNGSGDPCVPKPSHYLKCSNFTDTSVVQLRIISLNLSSMRLSGVISPSIQTLTKLQVLDLSNNNLTGGVPGFLSNMVSLLSIDLSNNSLSGPIPQALLDRRKEGLDLKFHGNTKLYEFISHRKKNFPLVAVVASASAIAIVLVVLGVLFICLRRKPPSREAPHSSIETVKRRFTYSEVMAMTNNFKKIIGEGGFGIIYHGHLNDGQQVAVKVLSESSSQGYKQFKAEVELLMRVHHVNLVNLAGYCDDSNHLALIYEFMENRDLKEHLSGKEGSSFLDWPCRLKIAAEAALGLEYLHTGCKPPMIHRDVKSTNILLNEDFQAKLGDFGLSRSFPIGGETHVSTVVVGTHGFLDPEYYQTQRLSEKSDVYSFGIVLLEIITNKLVIDQTRERPHIAEWVRYMLSIGDIESVMDPNLKGKYDSSSAWKVLELAMLCSKLSLAERPNMAQIVHELNEYLLYENSRREISQDVRSKNSSEVSTNTEMAPMALNLLEKASPFSNSFSYANATDASLRAGRKGLSFSVSYLVDSLGLPKKVAESISKKVSFEDKGNPDSVLSLLRSHGFTDSQISSIITDYPQLLVADAEKSIGPKLQFLQSRGASRSELTHIVSTVPEILGKRGDKTISIYYDFVKEIIEADKSSKFEKLCHSLPEGSKQENKIRNVLVLRELGVPQRLLFPLLISDHQPVCGKENFEESLKKVVEMGFDPTTSKFVKALRVVYRFRDKTIEAKVNVCKSLGFSVGDVWAMFKKCPSFLNFSENKIVQTWETLKKCGLLEDDVLSVLKKFPQCINASEQKIMNSIETFLGLGFSRDEVAMIAKRFPQCLILSAETVKKKTEFLVKKMNWPLKAVVSTPAVLGYSLEKRTIPRCNVIKALMSKGSLGSELPGMSSVLVCTNEEFLCRYVKNHDDKKIVPELMAIFTGDRVS

SEQ ID NO: 73176 - protein, 1116 aa, Arabidopsis thaliana
  peptide (1)..(1116): Ceres Seq. ID no. 4959489
  misc_feature (746)..(1091): Pfam Name: mTERF Pfam Description: mTERF
  misc_feature (679)..(1116): Homolog of NCBI NO: 25345734 NR Description: hypothetical protein F19K23.4 [imported] - thaliana >gi|2160136|gb|AAB60758.1| F19K23.4 gene product
  misc_feature (441)..(678): Homolog of NCBI NO: 25404359 NR Description: hypothetical protein F19K23.5 [imported] - thaliana >gi|2160137|gb|AAB60759.1| Similar to Arabidopsis light
  misc_feature (19)..(136): Homolog of NCBI NO: 25404359 NR Description: hypothetical protein F19K23.5 [imported] - thaliana >gi|2160137|gb|AAB60759.1| Similar to Arabidopsis light
  misc_feature (349)..(419): Homolog of NCBI NO: 25404359 NR Description: hypothetical protein F19K23.5 [imported] - thaliana >gi|2160137|gb|AAB60759.1| Similar to Arabidopsis light
  misc_feature (19)..(678): Homolog of NCBI NO: 25387148 NR Description: probable protein kinase [imported] - Arabidopsis >gi|9802795|gb|AAF99864.1|AC015448_14 Putative protein kinase
  misc_feature (19)..(678): Homolog of NCBI NO: 15218048 NR Description: light repressible receptor protein kinase,
  misc_feature (19)..(678): Homolog of NCBI NO: 25387154 NR Description: protein F22G5.6 [imported] - Arabidopsis thaliana
  misc_feature (19)..(674): Homolog of NCBI NO: 15232537 NR Description: serine/threonine-specific protein kinase,
  misc_feature (19)..(678): Homolog of NCBI NO: 15222436 NR Description: protein kinase, putative; protein id: At1g07560.1
  misc_feature (19)..(665): Homolog of NCBI NO: 15225949 NR Description: putative receptor-like protein kinase; protein id:
MTYLWIVVSFALNLLWILVRYPDDVHDRKWVPFSEDELMTVNNTVDTDFDNPYDPPKAVISTAAIPTNASSSLILTWLTSNPEDQIYIYIHFLELQVLRGNETRIFDILMNGIITSPAYSPTDSVVDTVYNKEPLRCNASVCSLELRKTLGSTLPPLINAIEIFTVLEFPETATYEDDFSAIENIRAAYALSNGSGDPCVPKPSHYLKCSNFTDTSVVQLRIISLNLSSMRLSGVISPSIQTLTKLQVLDLSNNNLTGGVPGFLSNMVSLLSIDLSNNSLSGPIPQALLDRRKEGLDLKFHGNTKLYEFISHRKKNFPLVAVVASASAIAIVLVVLGVLFICLRRKPPSREAPHSSIETVKRRFTYSEVMAMTNNFKKIIGEGGFGIIYHGHLNDGQQVAVKVLSESSSQGYKQFKAEVELLMRVHHVNLVNLAGYCDDSNHLALIYEFMENRDLKEHLSGKEGSSFLDWPCRLKIAAEAALGLEYLHTGCKPPMIHRDVKSTNILLNEDFQAKLGDFGLSRSFPIGGETHVSTVVVGTHGFLDPEYYQTQRLSEKSDVYSFGIVLLEIITNKLVIDQTRERPHIAEWVRYMLSIGDIESVMDPNLKGKYDSSSAWKVLELAMLCSKLSLAERPNMAQIVHELNEYLLYENSRREISQDVRSKNSSEVSTNTEMAPMALNLLEKASPFSNSFSYANATDASLRAGRKGLSFSVSYLVDSLGLPKKVAESISKKVSFEDKGNPDSVLSLLRSHGFTDSQISSIITDYPQLLVADAEKSIGPKLQFLQSRGASRSELTHIVSTVPEILGKRGDKTISIYYDFVKEIIEADKSSKFEKLCHSLPEGSKQENKIRNVLVLRELGVPQRLLFPLLISDHQPVCGKENFEESLKKVVEMGFDPTTSKFVKALRVVYRFRDKTIEAKVNVCKSLGFSVGDVWAMFKKCPSFLNFSENKIVQTWETLKKCGLLEDDVLSVLKKFPQCINASEQKIMNSIETFLGLGFSRDEVAMIAKRFPQCLILSAETVKKKTEFLVKKMNWPLKAVVSTPAVLGYSLEKRTIPRCNVIKALMSKGSLGSELPGMSSVLVCTNEEFLCRYVKNHDDKKIVPELMAIFTGDRVS

SEQ ID NO: 73177 - protein, 1078 aa, Arabidopsis thaliana
  peptide (1)..(1078): Ceres Seq. ID no. 4959490
  misc_feature (708)..(1053): Pfam Name: mTERF Pfam Description: mTERF
  misc_feature (641)..(1078): Homolog of NCBI NO: 25345734 NR Description: hypothetical protein F19K23.4 [imported] - thaliana >gi|2160136|gb|AAB60758.1| F19K23.4 gene product
  misc_feature (403)..(640): Homolog of NCBI NO: 25404359 NR Description: hypothetical protein F19K23.5 [imported] - thaliana >gi|2160137|gb|AAB60759.1| Similar to Arabidopsis light
  misc_feature (1)..(98): Homolog of NCBI NO: 25404359 NR Description: hypothetical protein F19K23.5 [imported] - thaliana >gi|2160137|gb|AAB60759.1| Similar to Arabidopsis light
  misc_feature (311)..(381): Homolog of NCBI NO: 25404359 NR Description: hypothetical protein F19K23.5 [imported] - thaliana >gi|2160137|gb|AAB60759.1| Similar to Arabidopsis light
  misc_feature (1)..(640): Homolog of NCBI NO: 25387148 NR Description: probable protein kinase [imported] - Arabidopsis >gi|9802795|gb|AAF99864.1|AC015448_14 Putative protein kinase
  misc_feature (1)..(640): Homolog of NCBI NO: 15218048 NR Description: light repressible receptor protein kinase,
  misc_feature (1)..(640): Homolog of NCBI NO: 25387154 NR Description: protein F22G5.6 [imported] - Arabidopsis thaliana
  misc_feature (1)..(636): Homolog of NCBI NO: 15232537 NR Description: serine/threonine-specific protein kinase,
  misc_feature (1)..(640): Homolog of NCBI NO: 15222436 NR Description: protein kinase, putative; protein id: At1g07560.1
  misc_feature (1)..(627): Homolog of NCBI NO: 15225949 NR Description: putative receptor-like protein kinase; protein id:
MTVNNTVDTDFDNPYDPPKAVISTAAIPTNASSSLILTWLTSNPEDQIYIYIHFLELQVLRGNETRIFDILMNGIITSPAYSPTDSVVDTVYNKEPLRCNASVCSLELRKTLGSTLPPLINAIEIFTVLEFPETATYEDDFSAIENIRAAYALSNGSGDPCVPKPSHYLKCSNFTDTSVVQLRIISLNLSSMRLSGVISPSIQTLTKLQVLDLSNNNLTGGVPGFLSNMVSLLSIDLSNNSLSGPIPQALLDRRKEGLDLKFHGNTKLYEFISHRKKNFPLVAVVASASAIAIVLVVLGVLFICLRRKPPSREAPHSSIETVKRRFTYSEVMAMTNNFKKIIGEGGFGIIYHGHLNDGQQVAVKVLSESSSQGYKQFKAEVELLMRVHHVNLVNLAGYCDDSNHLALIYEFMENRDLKEHLSGKEGSSFLDWPCRLKIAAEAALGLEYLHTGCKPPMIHRDVKSTNILLNEDFQAKLGDFGLSRSFPIGGETHVSTVVVGTHGFLDPEYYQTQRLSEKSDVYSFGIVLLEIITNKLVIDQTRERPHIAEWVRYMLSIGDIESVMDPNLKGKYDSSSAWKVLELAMLCSKLSLAERPNMAQIVHELNEYLLYENSRREISQDVRSKNSSEVSTNTEMAPMALNLLEKASPFSNSFSYANATDASLRAGRKGLSFSVSYLVDSLGLPKKVAESISKKVSFEDKGNPDSVLSLLRSHGFTDSQISSIITDYPQLLVADAEKSIGPKLQFLQSRGASRSELTHIVSTVPEILGKRGDKTISIYYDFVKEIIEADKSSKFEKLCHSLPEGSKQENKIRNVLVLRELGVPQRLLFPLLISDHQPVCGKENFEESLKKVVEMGFDPTTSKFVKALRVVYRFRDKTIEAKVNVCKSLGFSVGDVWAMFKKCPSFLNFSENKIVQTWETLKKCGLLEDDVLSVLKKFPQCINASEQKIMNSIETFLGLGFSRDEVAMIAKRFPQCLILSAETVKKKTEFLVKKMNWPLKAVVSTPAVLGYSLEKRTIPRCNVIKALMSKGSLGSELPGMSSVLVCTNEEFLCRYVKNHDDKKIVPELMAIFTGDRVS

SEQ ID NO: 73178 - DNA, 614 bp, Arabidopsis thaliana
  misc_feature (1)..(614): Ceres Seq. ID no. 4959549
  misc_feature: MA Experiment ID: 108434 Result: Down-regulated in Transcription
  misc_feature: MA Experiment 108434 PARAMETER Experiment Name: At_Root_Tips_cDNA_P Parameter: Tissue Value: Root Tips
  misc_feature: MA Experiment ID: 108462 Result: Up-regulated in Transcription
  misc_feature: MA Experiment 108462 PARAMETER Experiment Name: At_Germinating_Seeds_cDNA_P Parameter: Age (day) Value: 2 vs. 0
  misc_feature: MA Experiment 108462 PARAMETER Experiment Name: At_Germinating_Seeds_cDNA_P Parameter: Tissue Value: Germinating Seeds
  misc_feature: MA Experiment ID: 108595 Result: Down-regulated in Transcription
  misc_feature: MA Experiment 108595 PARAMETER Experiment Name: At_Ler-pi_Ovule_cDNA_P Parameter: Plant Line Value: null
  misc_feature: MA Experiment ID: 20000179 Result: Up-regulated in Transcription
  misc_feature: MA Experiment 20000179 PARAMETER Experiment Name: At_Germinating_Seeds_P Parameter: Age (hr) Value: 6 vs. 0
  misc_feature: MA Experiment 20000179 PARAMETER Experiment Name: At_Germinating_Seeds_P Parameter: Tissue Value: Germinating Seeds
  misc_feature: MA Experiment ID: 20000180 Result: Up-regulated in Transcription
  misc_feature: MA Experiment 20000180 PARAMETER Experiment Name: At_Germinating_Seeds_P Parameter: Age (hr) Value: 24 vs. 0
  misc_feature: MA Experiment 20000180 PARAMETER Experiment Name: At_Germinating_Seeds_P Parameter: Tissue Value: Germinating Seeds
  misc_feature: MA Experiment ID: 20000185 Result: Up-regulated in Transcription
  misc_feature: MA Experiment 20000185 PARAMETER Experiment Name: At_Roots__P Parameter: Age (day) Value: 7 vs. 21
  misc_feature: MA Experiment 20000185 PARAMETER Experiment Name: At_Roots__P Parameter: Organism Value: A. thaliana
  misc_feature: MA Experiment 20000185 PARAMETER Experiment Name: At_Roots__P Parameter: Tissue Value: Roots vs. Whole Plant
  misc_feature: MA Experiment ID: 20000224 Result: Down-regulated in Transcription
  misc_feature: MA Experiment ID: 20000234 Result: Up-regulated in Transcription
  misc_feature: MA Experiment 20000234 PARAMETER Experiment Name: At_Siliques_P Parameter: Age (day) Value: 21
  misc_feature: MA Experiment 20000234 PARAMETER Experiment Name: At_Siliques_P Parameter: Organism Value: A. thaliana
  misc_feature: MA Experiment 20000234 PARAMETER Experiment Name: At_Siliques_P Parameter: Plant Line Value: WS
  misc_feature: MA Experiment 20000234 PARAMETER Experiment Name: At_Siliques_P Parameter: Tissue Value: Less Than 5mm Siliques vs. Whole Plant
  misc_feature: MA Experiment ID: 20000235 Result: Up-regulated in Transcription
  misc_feature: MA Experiment 20000235 PARAMETER Experiment Name: At_Siliques_P Parameter: Age (day) Value: 21
  misc_feature: MA Experiment 20000235 PARAMETER Experiment Name: At_Siliques_P Parameter: Organism Value: A. thaliana
  misc_feature: MA Experiment 20000235 PARAMETER Experiment Name: At_Siliques_P Parameter: Plant Line Value: WS
  misc_feature: MA Experiment 20000235 PARAMETER Experiment Name: At_Siliques_P Parameter: Tissue Value: 5-10mm Siliques vs. Whole Plant
  misc_feature: MA Experiment ID: 20000439 Result: Up-regulated in Transcription
  misc_feature: MA Experiment 20000439 PARAMETER Experiment Name: At_Roots__P Parameter: Age (day) Value: 14 vs. 21
  misc_feature: MA Experiment 20000439 PARAMETER Experiment Name: At_Roots__P Parameter: Organism Value: A. thaliana
  misc_feature: MA Experiment 20000439 PARAMETER Experiment Name: At_Roots__P Parameter: Tissue Value: Roots vs. Whole Plant
  misc_feature: MA Experiment ID: 20001555 Result: Down-regulated in Transcription
  misc_feature: MA Experiment 20001555 PARAMETER Experiment Name: At_Drought_Soil_Dry_P Parameter: Age (day) Value: 24
  misc_feature: MA Experiment 20001555 PARAMETER Experiment Name: At_Drought_Soil_Dry_P Parameter: Organism Value: A. thaliana
  misc_feature: MA Experiment 20001555 PARAMETER Experiment Name: At_Drought_Soil_Dry_P Parameter: Plant Line Value: WS
  misc_feature: MA Experiment 20001555 PARAMETER Experiment Name: At_Drought_Soil_Dry_P Parameter: Post Timepoint (hr) Value: None
  misc_feature: MA Experiment 20001555 PARAMETER Experiment Name: At_Drought_Soil_Dry_P Parameter: Post-Treatment Value: None
  misc_feature: MA Experiment 20001555 PARAMETER Experiment Name: At_Drought_Soil_Dry_P Parameter: Timepoint (day) Value: 10
  misc_feature: MA Experiment 20001555 PARAMETER Experiment Name: At_Drought_Soil_Dry_P Parameter: Treatment Value: Drought vs. No Drought
  misc_feature: MA Experiment ID: 20001556 Result: Down-regulated in Transcription
  misc_feature: MA Experiment 20001556 PARAMETER Experiment Name: At_Drought_Soil_Dry_P Parameter: Age (day) Value: 26
  misc_feature: MA Experiment 20001556 PARAMETER Experiment Name: At_Drought_Soil_Dry_P Parameter: Organism Value: A. thaliana
  misc_feature: MA Experiment 20001556 PARAMETER Experiment Name: At_Drought_Soil_Dry_P Parameter: Plant Line Value: WS
  misc_feature: MA Experiment 20001556 PARAMETER Experiment Name: At_Drought_Soil_Dry_P Parameter: Post Timepoint (hr) Value: None
  misc_feature: MA Experiment 20001556 PARAMETER Experiment Name: At_Drought_Soil_Dry_P Parameter: Post-Treatment Value: None
  misc_feature: MA Experiment 20001556 PARAMETER Experiment Name: At_Drought_Soil_Dry_P Parameter: Timepoint (day) Value: 12
  misc_feature: MA Experiment 20001556 PARAMETER Experiment Name: At_Drought_Soil_Dry_P Parameter: Treatment Value: Drought vs. No Drought
  misc_feature: MA Experiment ID: 20001560 Result: Up-regulated in Transcription
  misc_feature: MA Experiment 20001560 PARAMETER Experiment Name: At_Drought_Soil_Dry_P Parameter: Age (day) Value: 28
  misc_feature: MA Experiment 20001560 PARAMETER Experiment Name: At_Drought_Soil_Dry_P Parameter: Organism Value: A. thaliana
  misc_feature: MA Experiment 20001560 PARAMETER Experiment Name: At_Drought_Soil_Dry_P Parameter: Plant Line Value: WS
  misc_feature: MA Experiment 20001560 PARAMETER Experiment Name: At_Drought_Soil_Dry_P Parameter: Post Timepoint (hr) Value: None
  misc_feature: MA Experiment 20001560 PARAMETER Experiment Name: At_Drought_Soil_Dry_P Parameter: Post-Treatment Value: None
  misc_feature: MA Experiment 20001560 PARAMETER Experiment Name: At_Drought_Soil_Dry_P Parameter: Timepoint (day) Value: 14
  misc_feature: MA Experiment 20001560 PARAMETER Experiment Name: At_Drought_Soil_Dry_P Parameter: Treatment Value: Drought vs. No Drought
aaatcagacaaaagcctcgcatctctctctcttgggatctgaatcttcaaattgaaaacaaaaagatcacaagagaaaaaaacaaaaaaaaatgcctcatggaactcttgaagttgttcttgtcagcgccaaaggtctcgaggacgcagattttctgaatcagaagagcaacgttgcagaaggaatggggacaactccggaatggaatgagacatttatcttcactgtctctgaaggaactacagagttaaaagcgaaaatcttcgacaaagatgtcggtacagaggatgatgcggttggtgaagcaactattccgttggagccggttttcgtggaaggaagtattccaccaactgcatacaatgtggtgaaagatgaagagtacaaaggagagatttgggtggctctctccttcaagccctcggaaaaccgaagcaggggtatggacgaggagtcctatgggggctggaaaaactctgaagcatcatactaagagaagaaaccattgtgtgtcactgtttgatttgagtcttgggaacaaaatgttgagttttcatttgaaagcgtattttttgttcagattgtttttaatgatttcataaactcgtgagatt

SEQ ID NO: 73179 - protein, 133 aa, Arabidopsis thaliana; identical to SEQ ID NO: 29919
  peptide (1)..(133): Ceres Seq. ID no. 4959550
  misc_feature (6)..(73): Pfam Name: C2 domain Pfam Description: C2 domain
  misc_feature (1)..(133): Homolog of NCBI NO: 15221718 NR Description: putative elicitor-responsive gene; protein id: supported by cDNA: 18965., supported by cDNA: gi_15451085,
  misc_feature (1)..(133): Homolog of NCBI NO: 21553977 NR Description: putative elicitor-responsive gene [Arabidopsis
  misc_feature (1)..(129): Homolog of NCBI NO: 11358958 NR Description: elicitor-responsive gene 3 [imported] - rice
  misc_feature (1)..(126): Homolog of NCBI NO: 38345558 NR Description: OSJNBa0032F06.15 [Oryza sativa (japonica
  misc_feature (1)..(133): Homolog of NCBI NO: 3860331 NR Description: hypothetical protein [Cicer arietinum]
  misc_feature (1)..(126): Homolog of NCBI NO: 7489756 NR Description: hypothetical protein - maize
  misc_feature (1)..(114): Homolog of NCBI NO: 5565983 NR Description: unknown [Zea mays]

SEQ ID NO: 73180 - protein, 102 aa, Arabidopsis thaliana; identical to SEQ ID NO: 29920
  peptide (1)..(102): Ceres Seq. ID no. 4959551
  misc_feature (1)..(102): Homolog of NCBI NO: 15221718 NR Description: putative elicitor-responsive gene; protein id: supported by cDNA: 18965., supported by cDNA: gi_15451085,
  misc_feature (1)..(102): Homolog of NCBI NO: 21553977 NR Description: putative elicitor-responsive gene [Arabidopsis
  misc_feature (1)..(98): Homolog of NCBI NO: 11358958 NR Description: elicitor-responsive gene 3 [imported] - rice
  misc_feature (1)..(95): Homolog of NCBI NO: 38345558 NR Description: OSJNBa0032F06.15 [Oryza sativa (japonica
  misc_feature (1)..(102): Homolog of NCBI NO: 3860331 NR Description: hypothetical protein [Cicer arietinum]
  misc_feature (1)..(95): Homolog of NCBI NO: 7489756 NR Description: hypothetical protein - maize
  misc_feature (1)..(83): Homolog of NCBI NO: 5565983 NR Description: unknown [Zea mays]

SEQ ID NO: 73181 - protein, 75 aa, Arabidopsis thaliana
  peptide (1)..(75): Ceres Seq. ID no. 4959552
MKSTKERFGWLSPSSPRKTEAGVWTRSPMGAGKTLKHHTKRRNHCVSLFDLSLGNKMLSFHLKAYFLFRLFLMIS

SEQ ID NO: 73182 - DNA, 705 bp, Arabidopsis thaliana
  misc_feature (1)..(705): Ceres Seq. ID no. 4959614
  misc_feature: MA Experiment ID: 20000180 Result: Down-regulated in Transcription
  misc_feature: MA Experiment 20000180 PARAMETER Experiment Name: At_Germinating_Seeds_P Parameter: Age (hr) Value: 24 vs. 0
  misc_feature: MA Experiment 20000180 PARAMETER Experiment Name: At_Germinating_Seeds_P Parameter: Tissue Value: Germinating Seeds
  misc_feature: MA Experiment ID: 20000234 Result: Up-regulated in Transcription
  misc_feature: MA Experiment 20000234 PARAMETER Experiment Name: At_Siliques_P Parameter: Age (day) Value: 21
  misc_feature: MA Experiment 20000234 PARAMETER Experiment Name: At_Siliques_P Parameter: Organism Value: A. thaliana
  misc_feature: MA Experiment 20000234 PARAMETER Experiment Name: At_Siliques_P Parameter: Plant Line Value: WS
  misc_feature: MA Experiment 20000234 PARAMETER Experiment Name: At_Siliques_P Parameter: Tissue Value: Less Than 5mm Siliques vs. Whole Plant
  misc_feature: MA Experiment ID: 20000235 Result: Up-regulated in Transcription
  misc_feature: MA Experiment 20000235 PARAMETER Experiment Name: At_Siliques_P Parameter: Age (day) Value: 21
  misc_feature: MA Experiment 20000235 PARAMETER Experiment Name: At_Siliques_P Parameter: Organism Value: A. thaliana
  misc_feature: MA Experiment 20000235 PARAMETER Experiment Name: At_Siliques_P Parameter: Plant Line Value: WS
  misc_feature: MA Experiment 20000235 PARAMETER Experiment Name: At_Siliques_P Parameter: Tissue Value: 5-10mm Siliques vs. Whole Plant
  misc_feature: MA Experiment ID: 20000451 Result: Down-regulated in Transcription
  misc_feature: MA Experiment 20000451 PARAMETER Experiment Name: At_CS6879_Shoots-Roots_P Parameter: Age (day) Value: 14
  misc_feature: MA Experiment 20000451 PARAMETER Experiment Name: At_CS6879_Shoots-Roots_P Parameter: Organism Value: A. thaliana
  misc_feature: MA Experiment 20000451 PARAMETER Experiment Name: At_CS6879_Shoots-Roots_P Parameter: Plant Line Value: CS6879 vs. WS
  misc_feature: MA Experiment 20000451 PARAMETER Experiment Name: At_CS6879_Shoots-Roots_P Parameter: Tissue Value: Roots
atgcaggcggaggagataatatgccgtgtttcagacgaagagatcatcgagaattacctgaggccaaagataaacggtgaaacatcttcaatcccgagatatgttgtggaattggcagaggagctgtacactgtagagccttggctgcttcctcgacaaacagctccaattctcaaccctggcgagtggttctactttgggaaacgcaatcgaaagtatagtaacttggaaggtgttcattgcgagggatcgtggatactcgaagacggttgcatcgcagtcctgtccaaggagacgggtgaggaaattggtggaacgacgagatttaggtattactataggaacaagggggataaagagagtcgtctgaagatgagcaattggtttatgagagagtatcgtctctattacaaatccaggagagtcttcaatggacgtcaggtgatggagccacttcactgctacatagtgaacaaatacattcatgatgatggcatttttgatatctgcaatatgggaaacaactatttcggcaatcgctatcgcgaaagcaactcccaaaatactgttgtggatgcttcggttgacattctcctccaacacactctacattttgcggacgttgcatttgcctcgcatttgatattgacacacctatacatacattcattgattcaatcatataatatatcaattcatacttga

SEQ ID NO: 73183 - protein, 234 aa, Arabidopsis thaliana
  peptide (1)..(234): Ceres Seq. ID no. 4959615
  misc_feature (11)..(136): Pfam Name: No apical meristem (NAM) protein Pfam Description: No apical meristem (NAM) protein
  misc_feature (1)..(154): Homolog of NCBI NO: 18407972 NR Description: Expressed protein; protein id: At1g64105.1, by cDNA: 97474. [Arabidopsis thaliana]
  misc_feature (2)..(133): Homolog of NCBI NO: 15238786 NR Description: putative protein; protein id: At5g18300.1 thaliana] >gi|9758912|dbj|BAB09488.1|
  misc_feature (9)..(134): Homolog of NCBI NO: 7486659 NR Description: hypothetical protein F8D20.90 - Arabidopsis
  misc_feature (11)..(135): Homolog of NCBI NO: 15218843 NR Description: jasmonic acid, putative; protein id: At1g65910.1
  misc_feature (11)..(135): Homolog of NCBI NO: 15237939 NR Description: NAM (no apical meristem)-like protein; protein At5g17260.1 [Arabidopsis thaliana] >gi|10177071|dbj|BAB10513.1|
  misc_feature (9)..(139): Homolog of NCBI NO: 21358787 NR Description: nam-like protein 1 [Petunia x hybrida]
  misc_feature (11)..(135): Homolog of NCBI NO: 15229511 NR Description: hypothetical protein; protein id: At3g17730.1 thaliana] >gi|9294586|dbj|BAB02867.1| contains similarity to NAM
MQAEEIICRVSDEEIIENYLRPKINGETSSIPRYVVELAEELYTVEPWLLPRQTAPILNPGEWFYFGKRNRKYSNLEGVHCEGSWILEDGCIAVLSKETGEEIGGTTRFRYYYRNKGDKESRLKMSNWFMREYRLYYKSRRVFNGRQVMEPLHCYIVNKYIHDDGIFDICNMGNNYFGNRYRESNSQNTVVDASVDILLQHTLHFADVAFASHLILTHLYIHSLIQSYNISIHT

SEQ ID NO: 73184 - DNA, 1016 bp, Arabidopsis thaliana
  misc_feature (1)..(1016): Ceres Seq. ID no. 4960102
  misc_feature: MA Experiment ID: 20000169 Result: Up-regulated in Transcription
  misc_feature: MA Experiment 20000169 PARAMETER Experiment Name: At_100uM_ABA_P Parameter: Age (day) Value: 14
  misc_feature: MA Experiment 20000169 PARAMETER Experiment Name: At_100uM_ABA_P Parameter: Organism Value: A. thaliana
  misc_feature: MA Experiment 20000169 PARAMETER Experiment Name: At_100uM_ABA_P Parameter: Plant Line Value: WS
  misc_feature: MA Experiment 20000169 PARAMETER Experiment Name: At_100uM_ABA_P Parameter: Timepoint (hr) Value: 6
  misc_feature: MA Experiment 20000169 PARAMETER Experiment Name: At_100uM_ABA_P Parameter: Tissue Value: Aerial
  misc_feature: MA Experiment 20000169 PARAMETER Experiment Name: At_100uM_ABA_P Parameter: Treatment Value: 100uM ABA vs. No Treatment
  misc_feature: MA Experiment ID: 20000184 Result: Up-regulated in Transcription
  misc_feature: MA Experiment 20000184 PARAMETER Experiment Name: At_Shoots__P Parameter: Age (day) Value: 7
  misc_feature: MA Experiment 20000184 PARAMETER Experiment Name: At_Shoots__P Parameter: Tissue Value: Shoots vs. Whole Plant
  misc_feature: MA Experiment ID: 20000185 Result: Up-regulated in Transcription
  misc_feature: MA Experiment 20000185 PARAMETER Experiment Name: At_Roots__P Parameter: Age (day) Value: 7 vs. 21
  misc_feature: MA Experiment 20000185 PARAMETER Experiment Name: At_Roots__P Parameter: Organism Value: A. thaliana
  misc_feature: MA Experiment 20000185 PARAMETER Experiment Name: At_Roots__P Parameter: Tissue Value: Roots vs. Whole Plant
  misc_feature: MA Experiment ID: 20000234 Result: Up-regulated in Transcription
  misc_feature: MA Experiment 20000234 PARAMETER Experiment Name: At_Siliques_P Parameter: Age (day) Value: 21
  misc_feature: MA Experiment 20000234 PARAMETER Experiment Name: At_Siliques_P Parameter: Organism Value: A. thaliana
  misc_feature: MA Experiment 20000234 PARAMETER Experiment Name: At_Siliques_P Parameter: Plant Line Value: WS
  misc_feature: MA Experiment 20000234 PARAMETER Experiment Name: At_Siliques_P Parameter: Tissue Value: Less Than 5mm Siliques vs. Whole Plant
  misc_feature: MA Experiment ID: 20000264 Result: Up-regulated in Transcription
  misc_feature: MA Experiment 20000264 PARAMETER Experiment Name: At_Open_Flower_P Parameter: Age (day) Value: 21
  misc_feature: MA Experiment 20000264 PARAMETER Experiment Name: At_Open_Flower_P Parameter: Plant Line Value: WS
  misc_feature: MA Experiment 20000264 PARAMETER Experiment Name: At_Open_Flower_P Parameter: Tissue Value: Open Flower vs. Whole Plant
  misc_feature: MA Experiment ID: 20000265 Result: Up-regulated in Transcription
  misc_feature: MA Experiment 20000265 PARAMETER Experiment Name: At_Open_Flower_P Parameter: Age (day) Value: 21
  misc_feature: MA Experiment 20000265 PARAMETER Experiment Name: At_Open_Flower_P Parameter: Plant Line Value: WS
  misc_feature: MA Experiment 20000265 PARAMETER Experiment Name: At_Open_Flower_P Parameter: Tissue Value: Closed Flower vs. Whole Plant
  misc_feature: MA Experiment ID: 20000438 Result: Up-regulated in Transcription
  misc_feature: MA Experiment 20000438 PARAMETER Experiment Name: At_Shoots__P Parameter: Age (day) Value: 14
  misc_feature: MA Experiment 20000438 PARAMETER Experiment Name: At_Shoots__P Parameter: Tissue Value: Shoots vs. Whole Plant
  misc_feature: MA Experiment ID: 20000439 Result: Up-regulated in Transcription
  misc_feature: MA Experiment 20000439 PARAMETER Experiment Name: At_Roots__P Parameter: Age (day) Value: 14 vs. 21
  misc_feature: MA Experiment 20000439 PARAMETER Experiment Name: At_Roots__P Parameter: Organism Value: A. thaliana
  misc_feature: MA Experiment 20000439 PARAMETER Experiment Name: At_Roots__P Parameter: Tissue Value: Roots vs. Whole Plant
  misc_feature: MA Experiment ID: 20001248 Result: Down-regulated in Transcription
  misc_feature: MA Experiment 20001248 PARAMETER Experiment Name: At_Far-red-induction_P Parameter: Age (day) Value: 7
  misc_feature: MA Experiment 20001248 PARAMETER Experiment Name: At_Far-red-induction_P Parameter: Light Value: Far-red vs. White
  misc_feature: MA Experiment 20001248 PARAMETER Experiment Name: At_Far-red-induction_P Parameter: Organism Value: A. thaliana
  misc_feature: MA Experiment 20001248 PARAMETER Experiment Name: At_Far-red-induction_P Parameter: Plant Line Value: Columbia
  misc_feature: MA Experiment 20001248 PARAMETER Experiment Name: At_Far-red-induction_P Parameter: Timepoint (hr) Value: 4
  misc_feature: MA Experiment 20001248 PARAMETER Experiment Name: At_Far-red-induction_P Parameter: Tissue Value: Whole Plant
  misc_feature: Pfam Name: adh_short Pfam Description: short chain dehydrogenase
aaagtctcaacctttcttctctaatggagatctgcacttacttcaaatcacaacccacttggctcctcattctcttcgttctggggtcaatctcaatcttcaaattcatcttcaccctcctcagatctttctacatctacttcctccgaccatccaaaaacctccgccgatacggttcatgggcaatcatcaccggaccaacagacggaatcggtaaagctttcgcctttcagttagcccagaaaggtcttaaccttatactcgttgctcgtaacccagacaagctcaaagatgtctctgattccatcagatctaagtattttcatgaggttgatgaagagttgatcaataacttgattaagatcaatgttgaaggaactactaaagttactcaagctgtgttgcctaatatgcttaagaggaagaaaggtgctattattaatatgggttctggtgctgctgctcttattccttcttatcctttttactctgtttatgctggtgctaaaacgtacgtggatcagttcacaaagtgtctacatgttgagtataagaagagtgggattgatgttcaatgccaggttcccttgtatgttgcaacaaagatgacaaaaataagaagagcatccttcttagttgcatcaccagagggttacgcaaaggcagcactgcgttttgtaggctatgaagcacaatgcacaccgtactggcctcacgctctcatgggtgcagttgtctctgcattgcccgaaagcgtttttgaatcatttaacatcaagagatgcctccagatccggaagaagggtctccaaaaagactccatgaagaaagaatgaatcttccaggtttaagttactaccaagaatttccttcttctgaagttgttggtttcttgaaaagcttctgttctgaatcttttgtaagacttgtactctttagttttctaagttttttatattttaagattaaaaaccctaacgtacacgaataatttacttcctctgtttctatttatt

SEQ ID NO: 73185 - protein, 277 aa, Arabidopsis thaliana; identical to SEQ ID NO: 27288
  peptide (1)..(277): Ceres Seq. ID no. 4960103
  misc_feature: Pfam Name: adh_short Pfam Description: short chain dehydrogenase
  misc_feature (104)..(277): Homolog of NCBI NO: 18408847 NR Description: Expressed protein; protein id: At1g67730.1, by cDNA: 7434. [Arabidopsis thaliana] >gi|21594872|gb|AAM66051.1|
  misc_feature (8)..(106): Homolog of NCBI NO: 18408847 NR Description: Expressed protein; protein id: At1g67730.1, by cDNA: 7434. [Arabidopsis thaliana] >gi|21594872|gb|AAM66051.1|
  misc_feature (104)..(277): Homolog of NCBI NO: 28565597 NR Description: putative 3-ketoacyl-CoA reductase 1 [Brassica
  misc_feature (8)..(106): Homolog of NCBI NO: 28565597 NR Description: putative 3-ketoacyl-CoA reductase 1 [Brassica
  misc_feature (104)..(277): Homolog of NCBI NO: 28565601 NR Description: putative 3-ketoacyl-CoA reductase 2 [Brassica
  misc_feature (8)..(106): Homolog of NCBI NO: 28565601 NR Description: putative 3-ketoacyl-CoA reductase 2 [Brassica
  misc_feature (104)..(277): Homolog of NCBI NO: 11072027 NR Description: F12A21.14 [Arabidopsis thaliana]
  misc_feature (41)..(106): Homolog of NCBI NO: 11072027 NR Description: F12A21.14 [Arabidopsis thaliana]
  misc_feature (104)..(277): Homolog of NCBI NO: 2586125 NR Description: b-keto acyl reductase [Arabidopsis thaliana]
  misc_feature (77)..(106): Homolog of NCBI NO: 2586125 NR Description: b-keto acyl reductase [Arabidopsis thaliana]

SEQ ID NO: 73186 - protein, 270 aa, Arabidopsis thaliana; identical to SEQ ID NO: 27289
  peptide (1)..(270): Ceres Seq. ID no. 4960104
  misc_feature: Pfam Name: adh_short Pfam Description: short chain dehydrogenase
  misc_feature (97)..(270): Homolog of NCBI NO: 18408847 NR Description: Expressed protein; protein id: At1g67730.1, by cDNA: 7434. [Arabidopsis thaliana] >gi|21594872|gb|AAM66051.1|
  misc_feature (1)..(99): Homolog of NCBI NO: 18408847 NR Description: Expressed protein; protein id: At1g67730.1, by cDNA: 7434. [Arabidopsis thaliana] >gi|21594872|gb|AAM66051.1|
  misc_feature (97)..(270): Homolog of NCBI NO: 28565597 NR Description: putative 3-ketoacyl-CoA reductase 1 [Brassica
  misc_feature (1)..(99): Homolog of NCBI NO: 28565597 NR Description: putative 3-ketoacyl-CoA reductase 1 [Brassica
  misc_feature (97)..(270): Homolog of NCBI NO: 28565601 NR Description: putative 3-ketoacyl-CoA reductase 2 [Brassica
  misc_feature (1)..(99): Homolog of NCBI NO: 28565601 NR Description: putative 3-ketoacyl-CoA reductase 2 [Brassica
  misc_feature (97)..(270): Homolog of NCBI NO: 11072027 NR Description: F12A21.14 [Arabidopsis thaliana]
  misc_feature (34)..(99): Homolog of NCBI NO: 11072027 NR Description: F12A21.14 [Arabidopsis thaliana]
  misc_feature (97)..(270): Homolog of NCBI NO: 2586125 NR Description: b-keto acyl reductase [Arabidopsis thaliana]
  misc_feature (70)..(99): Homolog of NCBI NO: 2586125 NR Description: b-keto acyl reductase [Arabidopsis thaliana]

SEQ ID NO: 73187 - protein, 141 aa, Arabidopsis thaliana; identical to SEQ ID NO: 27290
  peptide (1)..(141): Ceres Seq. ID no. 4960105
  misc_feature: Pfam Name: adh_short Pfam Description: short chain dehydrogenase
  misc_feature (1)..(141): Homolog of NCBI NO: 18408847 NR Description: Expressed protein; protein id: At1g67730.1, by cDNA: 7434. [Arabidopsis thaliana] >gi|21594872|gb|AAM66051.1|
  misc_feature (1)..(141): Homolog of NCBI NO: 28565597 NR Description: putative 3-ketoacyl-CoA reductase 1 [Brassica
  misc_feature (1)..(141): Homolog of NCBI NO: 28565601 NR Description: putative 3-ketoacyl-CoA reductase 2 [Brassica
  misc_feature (1)..(141): Homolog of NCBI NO: 11072027 NR Description: F12A21.14 [Arabidopsis thaliana]
  misc_feature (1)..(141): Homolog of NCBI NO: 2586125 NR Description: b-keto acyl reductase [Arabidopsis thaliana]
  misc_feature (1)..(141): Homolog of NCBI NO: 13605726 NR Description: At1g67730/F12A21_31 [Arabidopsis thaliana]
  misc_feature (1)..(141): Homolog of NCBI NO: 23505781 NR Description: At1g67730/F12A21_31 [Arabidopsis thaliana]
  misc_feature (1)..(140): Homolog of NCBI NO: 38345332 NR Description: OSJNBa0081L15.5 [Oryza sativa (japonica
  misc_feature (1)..(140): Homolog of NCBI NO: 7489413 NR Description: probable b-keto acyl reductase (EC 1.1.-.-) -
  misc_feature (1)..(140): Homolog of NCBI NO: 7489808 NR Description: probable beta-keto acyl reductase - maize

SEQ ID NO: 73188 - DNA, 1005 bp, Arabidopsis thaliana
  misc_feature (1)..(1005): Ceres Seq. ID no. 4960149
  misc_feature: MA Experiment ID: 108434 Result: Up-regulated in Transcription
  misc_feature: MA Experiment 108434 PARAMETER Experiment Name: At_Root_Tips_cDNA_P Parameter: Tissue Value: Root Tips
  misc_feature: MA Experiment ID: 108463 Result: Down-regulated in Transcription
  misc_feature: MA Experiment 108463 PARAMETER Experiment Name: At_Germinating_Seeds_cDNA_P Parameter: Age (day) Value: 3 vs. 0
  misc_feature: MA Experiment 108463 PARAMETER Experiment Name: At_Germinating_Seeds_cDNA_P Parameter: Tissue Value: Germinating Seeds
  misc_feature: MA Experiment ID: 108464 Result: Down-regulated in Transcription
  misc_feature: MA Experiment 108464 PARAMETER Experiment Name: At_Germinating_Seeds_cDNA_P Parameter: Age (day) Value: 4 vs. 0
  misc_feature: MA Experiment 108464 PARAMETER Experiment Name: At_Germinating_Seeds_cDNA_P Parameter: Tissue Value: Germinating Seeds
  misc_feature: MA Experiment ID: 108585 Result: Down-regulated in Transcription
  misc_feature: MA Experiment 108585 PARAMETER Experiment Name: At_5mM_NaNP_cDNA_P Parameter: Timepoint (hr) Value: 6
  misc_feature: MA Experiment 108585 PARAMETER Experiment Name: At_5mM_NaNP_cDNA_P Parameter: Tissue Value: Aerial
  misc_feature: MA Experiment 108585 PARAMETER Experiment Name: At_5mM_NaNP_cDNA_P Parameter: Treatment Value: null
  misc_feature: MA Experiment ID: 108595 Result: Down-regulated in Transcription
  misc_feature: MA Experiment 108595 PARAMETER Experiment Name: At_Ler-pi_Ovule_cDNA_P Parameter: Plant Line Value: null
  misc_feature: MA Experiment ID: 108668 Result: Down-regulated in Transcription
  misc_feature: MA Experiment 108668 PARAMETER Experiment Name: At_2mM_SA_cDNA_P Parameter: Plant Line Value: WS
  misc_feature: MA Experiment 108668 PARAMETER Experiment Name: At_2mM_SA_cDNA_P Parameter: Timepoint (hr) Value: 6
  misc_feature: MA Experiment 108668 PARAMETER Experiment Name: At_2mM_SA_cDNA_P Parameter: Treatment Value: 2mM SA vs. No Treatment
  misc_feature: MA Experiment ID: 20000069 Result: Up-regulated in Transcription
  misc_feature: MA Experiment 20000069 PARAMETER Experiment Name: At_100uM_ABA_Mutants_cDNA_P Parameter: Plant Line Value: CS23
  misc_feature: MA Experiment 20000069 PARAMETER Experiment Name: At_100uM_ABA_Mutants_cDNA_P Parameter: Timepoint (hr) Value: 6
  misc_feature: MA Experiment 20000069 PARAMETER Experiment Name: At_100uM_ABA_Mutants_cDNA_P Parameter: Tissue Value: Aerial
  misc_feature: MA Experiment 20000069 PARAMETER Experiment Name: At_100uM_ABA_Mutants_cDNA_P Parameter: Treatment Value: 100uM ABA vs. No Treatment
  misc_feature: MA Experiment ID: 20000070 Result: Up-regulated in Transcription
  misc_feature: MA Experiment 20000070 PARAMETER Experiment Name: At_100uM_ABA_Mutants_cDNA_P Parameter: Plant Line Value: CS24
  misc_feature: MA Experiment 20000070 PARAMETER Experiment Name: At_100uM_ABA_Mutants_cDNA_P Parameter: Timepoint (hr) Value: 6
  misc_feature: MA Experiment 20000070 PARAMETER Experiment Name: At_100uM_ABA_Mutants_cDNA_P Parameter: Tissue Value: Aerial
  misc_feature: MA Experiment 20000070 PARAMETER Experiment Name: At_100uM_ABA_Mutants_cDNA_P Parameter: Treatment Value: 100uM ABA vs. No Treatment
  misc_feature: MA Experiment ID: 20000071 Result: Up-regulated in Transcription
  misc_feature: MA Experiment 20000071 PARAMETER Experiment Name: At_100uM_ABA_Mutants_cDNA_P Parameter: Plant Line Value: CS8104
  misc_feature: MA Experiment 20000071 PARAMETER Experiment Name: At_100uM_ABA_Mutants_cDNA_P Parameter: Timepoint (hr) Value: 6
  misc_feature: MA Experiment 20000071 PARAMETER Experiment Name: At_100uM_ABA_Mutants_cDNA_P Parameter: Tissue Value: Aerial
  misc_feature: MA Experiment 20000071 PARAMETER Experiment Name: At_100uM_ABA_Mutants_cDNA_P Parameter: Treatment Value: 100uM ABA vs. No Treatment
  misc_feature: MA Experiment ID: 20000072 Result: Up-regulated in Transcription
  misc_feature: MA Experiment 20000072 PARAMETER Experiment Name: At_100uM_ABA_Mutants_cDNA_P Parameter: Plant Line Value: CS8105
  misc_feature: MA Experiment 20000072 PARAMETER Experiment Name: At_100uM_ABA_Mutants_cDNA_P Parameter: Timepoint (hr) Value: 6
  misc_feature: MA Experiment 20000072 PARAMETER Experiment Name: At_100uM_ABA_Mutants_cDNA_P Parameter: Tissue Value: Aerial
  misc_feature: MA Experiment 20000072 PARAMETER Experiment Name: At_100uM_ABA_Mutants_cDNA_P Parameter: Treatment Value: 100uM ABA vs. No Treatment
  misc_feature: MA Experiment ID: 20000086 Result: Up-regulated in Transcription
  misc_feature: MA Experiment 20000086 PARAMETER Experiment Name: At_100uM_ABA_Mutants_cDNA_P Parameter: Plant Line Value: CS22
  misc_feature: MA Experiment 20000086 PARAMETER Experiment Name: At_100uM_ABA_Mutants_cDNA_P Parameter: Timepoint (hr) Value: 6
  misc_feature: MA Experiment 20000086 PARAMETER Experiment Name: At_100uM_ABA_Mutants_cDNA_P Parameter: Tissue Value: Aerial
  misc_feature: MA Experiment 20000086 PARAMETER Experiment Name: At_100uM_ABA_Mutants_cDNA_P Parameter: Treatment Value: 100uM ABA vs. No Treatment
  misc_feature: MA Experiment ID: 20000087 Result: Up-regulated in Transcription
  misc_feature: MA Experiment 20000087 PARAMETER Experiment Name: At_100uM_ABA_Mutants_cDNA_P Parameter: Plant Line Value: WS
  misc_feature: MA Experiment 20000087 PARAMETER Experiment Name: At_100uM_ABA_Mutants_cDNA_P Parameter: Timepoint (hr) Value: 6
  misc_feature: MA Experiment 20000087 PARAMETER Experiment Name: At_100uM_ABA_Mutants_cDNA_P Parameter: Tissue Value: Aerial
  misc_feature: MA Experiment 20000087 PARAMETER Experiment Name: At_100uM_ABA_Mutants_cDNA_P Parameter: Treatment Value: 100uM ABA vs. No Treatment
  misc_feature: MA Experiment ID: 20000088 Result: Up-regulated in Transcription
  misc_feature: MA Experiment 20000088 PARAMETER Experiment Name: At_100uM_ABA_Mutants_cDNA_P Parameter: Plant Line Value: Landsberg
  misc_feature: MA Experiment 20000088 PARAMETER Experiment Name: At_100uM_ABA_Mutants_cDNA_P Parameter: Timepoint (hr) Value: 6
  misc_feature: MA Experiment 20000088 PARAMETER Experiment Name: At_100uM_ABA_Mutants_cDNA_P Parameter: Tissue Value: Aerial
  misc_feature: MA Experiment 20000088 PARAMETER Experiment Name: At_100uM_ABA_Mutants_cDNA_P Parameter: Treatment Value: 100uM ABA vs. No Treatment
  misc_feature: MA Experiment ID: 20000089 Result: Up-regulated in Transcription
  misc_feature: MA Experiment ID: 20000111 Result: Down-regulated in Transcription
  misc_feature: MA Experiment 20000111 PARAMETER Experiment Name: At_42deg_Heat_cDNA_P Parameter: Temperature (deg C) Value: 42 vs. 22
  misc_feature: MA Experiment 20000111 PARAMETER Experiment Name: At_42deg_Heat_cDNA_P Parameter: Timepoint (hr) Value: 6
  misc_feature: MA Experiment 20000111 PARAMETER Experiment Name: At_42deg_Heat_cDNA_P Parameter: Tissue Value: Aerial
  misc_feature: MA Experiment ID: 20000112 Result: Down-regulated in Transcription
  misc_feature: MA Experiment 20000112 PARAMETER Experiment Name: At_42deg_Heat_cDNA_P Parameter: Temperature (deg C) Value: 42 vs. 22
  misc_feature: MA Experiment 20000112 PARAMETER Experiment Name: At_42deg_Heat_cDNA_P Parameter: Timepoint (hr) Value: 2
  misc_feature: MA Experiment 20000112 PARAMETER Experiment Name: At_42deg_Heat_cDNA_P Parameter: Tissue Value: Aerial
  misc_feature: MA Experiment ID: 20000113 Result: Down-regulated in Transcription
  misc_feature: MA Experiment 20000113 PARAMETER Experiment Name: At_42deg_Heat_cDNA_P Parameter: Temperature (deg C) Value: 42 vs. 22
  misc_feature: MA Experiment 20000113 PARAMETER Experiment Name: At_42deg_Heat_cDNA_P Parameter: Timepoint (hr) Value: 8
  misc_feature: MA Experiment 20000113 PARAMETER Experiment Name: At_42deg_Heat_cDNA_P Parameter: Tissue Value: Aerial
  misc_feature: MA Experiment ID: 20000117 Result: Up-regulated in Transcription
  misc_feature: MA Experiment 20000117 PARAMETER Experiment Name: At_100uM_ABA_Mutants_cDNA_P Parameter: Plant Line Value: Columbia
  misc_feature: MA Experiment 20000117 PARAMETER Experiment Name: At_100uM_ABA_Mutants_cDNA_P Parameter: Timepoint (hr) Value: 6
  misc_feature: MA Experiment 20000117 PARAMETER Experiment Name: At_100uM_ABA_Mutants_cDNA_P Parameter: Tissue Value: Aerial
  misc_feature: MA Experiment 20000117 PARAMETER Experiment Name: At_100uM_ABA_Mutants_cDNA_P Parameter: Treatment Value: 100uM ABA vs. No Treatment
atgtttgtttccaatatgattcctctaacctttgtaacagtctgtgtatgtagagtcttgaagccgaataaagttgctctcaacagtatgattctttcagctatgaggacttgctcaatctctgggttccatactcatcttccgaagtcaagcggttcagtttcttcgagaaagaggttttcttctactgctttatcactcatcactcaaaccatttcaccatttgctcatccccgttcatcagtaattgtgtcaagccttctctccccatctgatatccctcagaaatctgaagaatggtttgctttaaggaaagacaagttaaccacaagtacattcagtacagcgctggggttttggaaaggaaaccggcgtgccgagctctggcatgaaaaggtttatgattcagatgcacgagttgttgaggagtctgcacggtttgctatgaactggggtgtacaaatggaatcatctgcgatagaaaggtacaaaagaataatgggttgtgaggttggaacaatgggatttgctattcactccaatgaggaatttcactggcttggcgcttcaccggatggaatcctcgattgctttggtattctagaagtgaaatgtccatataacaaagggaaaaccgaaactgtattaccctggaaaaaagtgccctactattacatgcctcagctgcagggtcaaatggagataatggaccgggaatgggtcaacttatactgctggacacgaaatggaagcacggttttccgtgtgatgagagaccgaagctattggagaatcatacatgatgtattaagggagttctggtgggagagtgtgattcctgcaagggaggctttgttgttagggaaagaggatgaggaggtgaaaaagtatgagccaacatctacgcataaacgaaccaagcttgccatagctaaaagcctaaatttggctgcggaatcaaaactagtatgcagagaaattgctgatcatgtcgagttcttttag

SEQ ID NO: 73189 - protein, 334 aa, Arabidopsis thaliana
  peptide (1)..(334): Ceres Seq. ID no. 4960150
  misc_feature (1)..(334): Homolog of NCBI NO: 25404961 NR Description: protein F12A21.19 [imported] - Arabidopsis >gi|11072024|gb|AAG28903.1|AC008113_19 F12A21.19 [Arabidopsis
  misc_feature (13)..(334): Homolog of NCBI NO: 30697546 NR Description: F12A21.19 [Arabidopsis thaliana] unknown protein [Arabidopsis thaliana]
  misc_feature (61)..(334): Homolog of NCBI NO: 40253518 NR Description: unknown protein [Oryza sativa (japonica
  misc_feature (18)..(334): Homolog of NCBI NO: 38345347 NR Description: OSJNBa0081L15.20 [Oryza sativa (japonica
  misc_feature (80)..(334): Homolog of NCBI NO: 10241653 NR Description: contains similarity to F12A21.16 [Oryza sativa
  misc_feature (98)..(327): Homolog of NCBI NO: 15222951 NR Description: unknown protein; protein id: At1g13810.1
  misc_feature (98)..(327): Homolog of NCBI NO: 25402766 NR Description: protein F16A14.4 [imported] - Arabidopsis >gi|8778385|gb|AAF79393.1|AC068197_3 F16A14.4 [Arabidopsis
  misc_feature (84)..(294): Homolog of NCBI NO: 9631735 NR Description: PBCV-1 exonuclease [Paramecium bursaria Chlorella
MFVSNMIPLTFVTVCVCRVLKPNKVALNSMILSAMRTCSISGFHTHLPKSSGSVSSRKRFSSTALSLITQTISPFAHPRSSVIVSSLLSPSDIPQKSEEWFALRKDKLTTSTFSTALGFWKGNRRAELWHEKVYDSDARVVEESARFAMNWGVQMESSAIERYKRIMGCEVGTMGFAIHSNEEFHWLGASPDGILDCFGILEVKCPYNKGKTETVLPWKKVPYYYMPQLQGQMEIMDREWVNLYCWTRNGSTVFRVMRDRSYWRIIHDVLREFWWESVIPAREALLLGKEDEEVKKYEPTSTHKRTKLAIAKSLNLAAESKLVCREIADHVEFF

SEQ ID NO: 73190 - protein, 329 aa, Arabidopsis thaliana
  peptide (1)..(329): Ceres Seq. ID no. 4960151
  misc_feature (1)..(329): Homolog of NCBI NO: 25404961 NR Description: protein F12A21.19 [imported] - Arabidopsis >gi|11072024|gb|AAG28903.1|AC008113_19 F12A21.19 [Arabidopsis
  misc_feature (8)..(329): Homolog of NCBI NO: 30697546 NR Description: F12A21.19 [Arabidopsis thaliana] unknown protein [Arabidopsis thaliana]
  misc_feature (56)..(329): Homolog of NCBI NO: 40253518 NR Description: unknown protein [Oryza sativa (japonica
  misc_feature (13)..(329): Homolog of NCBI NO: 38345347 NR Description: OSJNBa0081L15.20 [Oryza sativa (japonica
  misc_feature (75)..(329): Homolog of NCBI NO: 10241653 NR Description: contains similarity to F12A21.16 [Oryza sativa
  misc_feature (93)..(322): Homolog of NCBI NO: 15222951 NR Description: unknown protein; protein id: At1g13810.1
  misc_feature (93)..(322): Homolog of NCBI NO: 25402766 NR Description: protein F16A14.4 [imported] - Arabidopsis >gi|8778385|gb|AAF79393.1|AC068197_3 F16A14.4 [Arabidopsis
  misc_feature (79)..(289): Homolog of NCBI NO: 9631735 NR Description: PBCV-1 exonuclease [Paramecium bursaria Chlorella
MIPLTFVTVCVCRVLKPNKVALNSMILSAMRTCSISGFHTHLPKSSGSVSSRKRFSSTALSLITQTISPFAHPRSSVIVSSLLSPSDIPQKSEEWFALRKDKLTTSTFSTALGFWKGNRRAELWHEKVYDSDARVVEESARFAMNWGVQMESSAIERYKRIMGCEVGTMGFAIHSNEEFHWLGASPDGILDCFGILEVKCPYNKGKTETVLPWKKVPYYYMPQLQGQMEIMDREWVNLYCWTRNGSTVFRVMRDRSYWRIIHDVLREFWWESVIPAREALLLGKEDEEVKKYEPTSTHKRTKLAIAKSLNLAAESKLVCREIADHVEFF

SEQ ID NO: 73191 - protein, 305 aa, Arabidopsis thaliana
  peptide (1)..(305): Ceres Seq. ID no. 4960152
  misc_feature (1)..(305): Homolog of NCBI NO: 25404961 NR Description: protein F12A21.19 [imported] - Arabidopsis >gi|11072024|gb|AAG28903.1|AC008113_19 F12A21.19 [Arabidopsis
  misc_feature (1)..(305): Homolog of NCBI NO: 30697546 NR Description: F12A21.19 [Arabidopsis thaliana] unknown protein [Arabidopsis thaliana]
  misc_feature (32)..(305): Homolog of NCBI NO: 40253518 NR Description: unknown protein [Oryza sativa (japonica
  misc_feature (1)..(305): Homolog of NCBI NO: 38345347 NR Description: OSJNBa0081L15.20 [Oryza sativa (japonica
  misc_feature (51)..(305): Homolog of NCBI NO: 10241653 NR Description: contains similarity to F12A21.16 [Oryza sativa
  misc_feature (69)..(298): Homolog of NCBI NO: 15222951 NR Description: unknown protein; protein id: At1g13810.1
  misc_feature (69)..(298): Homolog of NCBI NO: 25402766 NR Description: protein F16A14.4 [imported] - Arabidopsis >gi|8778385|gb|AAF79393.1|AC068197_3 F16A14.4 [Arabidopsis
  misc_feature (55)..(265): Homolog of NCBI NO: 9631735 NR Description: PBCV-1 exonuclease [Paramecium bursaria Chlorella
MILSAMRTCSISGFHTHLPKSSGSVSSRKRFSSTALSLITQTISPFAHPRSSVIVSSLLSPSDIPQKSEEWFALRKDKLTTSTFSTALGFWKGNRRAELWHEKVYDSDARVVEESARFAMNWGVQMESSAIERYKRIMGCEVGTMGFAIHSNEEFHWLGASPDGILDCFGILEVKCPYNKGKTETVLPWKKVPYYYMPQLQGQMEIMDREWVNLYCWTRNGSTVFRVMRDRSYWRIIHDVLREFWWESVIPAREALLLGKEDEEVKKYEPTSTHKRTKLAIAKSLNLAAESKLVCREIADHVEFF

SEQ ID NO: 73192 - DNA, 751 bp, Arabidopsis thaliana
  misc_feature (1)..(751): Ceres Seq. ID no. 4960291
  misc_feature: MA Experiment ID: 108462 Result: Down-regulated in Transcription
  misc_feature: MA Experiment 108462 PARAMETER Experiment Name: At_Germinating_Seeds_cDNA_P Parameter: Age (day) Value: 2 vs. 0
  misc_feature: MA Experiment 108462 PARAMETER Experiment Name: At_Germinating_Seeds_cDNA_P Parameter: Tissue Value: Germinating Seeds
  misc_feature: MA Experiment ID: 108463 Result: Down-regulated in Transcription
  misc_feature: MA Experiment 108463 PARAMETER Experiment Name: At_Germinating_Seeds_cDNA_P Parameter: Age (day) Value: 3 vs. 0
  misc_feature: MA Experiment 108463 PARAMETER Experiment Name: At_Germinating_Seeds_cDNA_P Parameter: Tissue Value: Germinating Seeds
  misc_feature: MA Experiment ID: 108464 Result: Down-regulated in Transcription
  misc_feature: MA Experiment 108464 PARAMETER Experiment Name: At_Germinating_Seeds_cDNA_P Parameter: Age (day) Value: 4 vs. 0
  misc_feature: MA Experiment 108464 PARAMETER Experiment Name: At_Germinating_Seeds_cDNA_P Parameter: Tissue Value: Germinating Seeds
aaatttctcaaaatcgcaaaatctttgcctctttcttctctaatcgaactaaatcttaaaactttgctgattgattgattttcgattccgggagaagaaaaatggtatctgggttgattaatgagaaccctatcatttacccaaagaaagagaggcgtcttcgtactgatacaagcattactgatgagcttacaccagaaccaattgatcaacttgagatttttgatcatataagagatatcaaagatccagagcatcctaatactctggaagatctcagagtagttacagaagactcagttgaagtggatgatgagaacagttatgttagggttacgttcactccaactgtcgaacattgtagcatggcaaccgttatcggtctttgtgtccgtgtgaaacttctacgaagccttccttctcgatacaagattgatataagggtagcacctggttctcatgcaacagaagatgcattgaataaacaactaaacgataaagaacgtgtggcggctgcactagagaatccaaacctcgtggagatggttgatgaatgcctgccatcagaagagtgaattgcttttattttcttgtgagcaagtaatttacacaagcctggtggtctcagtttacactatcaatacatgtctctgttttatttgcaaagattttgatccatcacatcgactaggacttgcattgtaatacttactctgatttcaagtttgttctcaatcatttcaataaagtc

SEQ ID NO: 73193 - protein, 157 aa, Arabidopsis thaliana; identical to SEQ ID NO: 35345
  peptide (1)..(157): Ceres Seq. ID no. 4960292
  misc_feature (36)..(115): Pfam Name: Domain of unknown function DUF59 Pfam Description: Domain of unknown function DUF59
  misc_feature (1)..(157): Homolog of NCBI NO: 28973748 NR Description: unknown protein [Arabidopsis thaliana]
  misc_feature (1)..(157): Homolog of NCBI NO: 15221347 NR Description: unknown protein; protein id: At1g68310.1 thaliana] >gi|20455357|sp|Q9C9G6|U195_ARATH Hypothetical protein
  misc_feature (1)..(153): Homolog of NCBI NO: 38347077 NR Description: OSJNBa0006A01.18 [Oryza sativa (japonica
  misc_feature (1)..(153): Homolog of NCBI NO: 15232658 NR Description: hypothetical protein; protein id: At3g09380.1 thaliana] >gi|6478928|gb|AAF14033.1|AC011436_17 hypothetical
  misc_feature (40)..(153): Homolog of NCBI NO: 38567963 NR Description: OSJNBa0093F12.4 [Oryza sativa (japonica
  misc_feature (1)..(157): Homolog of NCBI NO: 34896898 NR Description: hypothetical protein [Oryza sativa (japonica group)] >gi|24899438|gb|AAN65008.1| hypothetical protein [Oryza
  misc_feature (1)..(153): Homolog of NCBI NO: 20455368 NR Description: Hypothetical protein At3g09380
  misc_feature (4)..(153): Homolog of NCBI NO: 7706343 NR Description: CGI-128 protein [Homo sapiens]
  misc_feature (1)..(156): Homolog of NCBI NO: 24662341 NR Description: CG7949-PA [Drosophila melanogaster]
  misc_feature (4)..(153): Homolog of NCBI NO: 21312046 NR Description: RIKEN cDNA 1110019N10 [Mus musculus]

SEQ ID NO: 73194 - DNA, 687 bp, Arabidopsis thaliana
  misc_feature (1)..(687): Ceres Seq. ID no. 4960373
  misc_feature: MA Experiment ID: 20000328 Result: Down-regulated in Transcription
  misc_feature: MA Experiment 20000328 PARAMETER Experiment Name: At_42deg_Heat_Sub_P Parameter: Age (day) Value: 14
  misc_feature: MA Experiment 20000328 PARAMETER Experiment Name: At_42deg_Heat_Sub_P Parameter: Organism Value: A. thaliana
  misc_feature: MA Experiment 20000328 PARAMETER Experiment Name: At_42deg_Heat_Sub_P Parameter: Plant Line Value: WS
  misc_feature: MA Experiment 20000328 PARAMETER Experiment Name: At_42deg_Heat_Sub_P Parameter: Temperature (deg C) Value: 42 vs. 22
  misc_feature: MA Experiment 20000328 PARAMETER Experiment Name: At_42deg_Heat_Sub_P Parameter: Timepoint (hr) Value: 6
  misc_feature: MA Experiment 20000328 PARAMETER Experiment Name: At_42deg_Heat_Sub_P Parameter: Tissue Value: Aerial
atggggtcacttttgcagggttttactaaatcactcgccatgactttcctctccgagattggtgacaaaacgttcttcgctgctgctattttggcgatgcggtatcctaggaggcttgtattagctggttgtttatcagctttgattgtcatgactatattatctgctacacttggttgggctgctccaaatctgatctctcggaaatggactcatcatataacaacattcttgttctttggctttgggttatggtctttgtgggatggttttaaagaaggaggaggttctgaagaattggcagaagttgaagcagaactggattctgatttgaagaagactaatgatcaatcgaaaaacagtaagattgaagatgaacagaaaaagcagaaaagaccattccttactgcattcttctctcccatttttctcaaggcgttttcgattaacttctttggtgaatggggtgacaagagtcagcttgcgaccattggtttggctgcagatgaaaatccactcggcgtggtccttggcggaattgtggcacaaacattgtgtaccacagctgctgtgcttggtggcaagagcttagcatctcaaatatccgaacgaattgtggctctttccggtggaatgcttttcattatcttcggcattcagtcgcttcttactccggttgatgcttga

SEQ ID NO: 73195 - protein, 228 aa, Arabidopsis thaliana; identical to SEQ ID NO: 38159
  peptide (1)..(228): Ceres Seq. ID no. 4960374
  misc_feature (8)..(83): Pfam Name: Uncharacterized protein family UPF0016 Pfam Description: Uncharacterized protein family UPF0016
  misc_feature (1)..(228): Homolog of NCBI NO: 15221462 NR Description: transmembrane protein, putative; protein id: [Arabidopsis thaliana] >gi|25353311|pir||A96711 hypothetical
  misc_feature (1)..(228): Homolog of NCBI NO: 15222613 NR Description: transmembrane protein, putative; protein id: supported by cDNA: 40780. [Arabidopsis thaliana]
  misc_feature (1)..(228): Homolog of NCBI NO: 21593636 NR Description: transmembrane protein, putative [Arabidopsis
  misc_feature (2)..(227): Homolog of NCBI NO: 21357589 NR Description: CG4196-PC [Drosophila melanogaster]
  misc_feature (5)..(228): Homolog of NCBI NO: 7689027 NR Description: uncharacterized hypothalamus protein HTMP [Homo
  misc_feature (5)..(228): Homolog of NCBI NO: 32189371 NR Description: TPA regulated locus; uncharacterized hypothalamus HTMP [Homo sapiens] >gi|9963757|gb|AAG09678.1|AF183409_1 protein PT27 [Homo sapiens] >gi|18568117|gb|AAL75947.1|AF132746_1
  misc_feature (5)..(225): Homolog of NCBI NO: 6755853 NR Description: TPA regulated locus [Mus musculus]
  misc_feature (5)..(225): Homolog of NCBI NO: 7684611 NR Description: TPARDL [Mus musculus]
  misc_feature (3)..(225): Homolog of NCBI NO: 18421551 NR Description: transmembrane protein FT27/PFT27-like; protein At5g36290.1, supported by cDNA: 12993., supported by cDNA: [Arabidopsis thaliana] >gi|15450794|gb|AAK96668.1| transmembrane
  misc_feature (5)..(223): Homolog of NCBI NO: 31240317 NR Description: ENSANGP00000008699 [Anopheles gambiae]

SEQ ID NO: 73196 - protein, 215 aa, Arabidopsis thaliana; identical to SEQ ID NO: 38160
  peptide (1)..(215): Ceres Seq. ID no. 4960375
  misc_feature (1)..(70): Pfam Name: Uncharacterized protein family UPF0016 Pfam Description: Uncharacterized protein family UPF0016
  misc_feature (1)..(215): Homolog of NCBI NO: 15221462 NR Description: transmembrane protein, putative; protein id: [Arabidopsis thaliana] >gi|25353311|pir||A96711 hypothetical
  misc_feature (1)..(215): Homolog of NCBI NO: 15222613 NR Description: transmembrane protein, putative; protein id: supported by cDNA: 40780. [Arabidopsis thaliana]
  misc_feature (1)..(215): Homolog of NCBI NO: 21593636 NR Description: transmembrane protein, putative [Arabidopsis
  misc_feature (1)..(214): Homolog of NCBI NO: 21357589 NR Description: CG4196-PC [Drosophila melanogaster]
  misc_feature (1)..(215): Homolog of NCBI NO: 7689027 NR Description: uncharacterized hypothalamus protein HTMP [Homo
  misc_feature (1)..(215): Homolog of NCBI NO: 32189371 NR Description: TPA regulated locus; uncharacterized hypothalamus HTMP [Homo sapiens] >gi|9963757|gb|AAG09678.1|AF183409_1 protein PT27 [Homo sapiens] >gi|18568117|gb|AAL75947.1|AF132746_1
  misc_feature (1)..(212): Homolog of NCBI NO: 6755853 NR Description: TPA regulated locus [Mus musculus]
  misc_feature (1)..(212): Homolog of NCBI NO: 7684611 NR Description: TPARDL [Mus musculus]
  misc_feature (1)..(212): Homolog of NCBI NO: 18421551 NR Description: transmembrane protein FT27/PFT27-like; protein At5g36290.1, supported by cDNA: 12993., supported by cDNA: [Arabidopsis thaliana] >gi|15450794|gb|AAK96668.1| transmembrane
  misc_feature (1)..(210): Homolog of NCBI NO: 31240317 NR Description: ENSANGP00000008699 [Anopheles gambiae]

SEQ ID NO: 73197 - protein, 196 aa, Arabidopsis thaliana
  peptide (1)..(196): Ceres Seq. ID no. 4960376
  misc_feature (1)..(51): Pfam Name: Uncharacterized protein family UPF0016 Pfam Description: Uncharacterized protein family UPF0016
  misc_feature (1)..(196): Homolog of NCBI NO: 15221462 NR Description: transmembrane protein, putative; protein id: [Arabidopsis thaliana] >gi|25353311|pir||A96711 hypothetical
  misc_feature (1)..(196): Homolog of NCBI NO: 15222613 NR Description: transmembrane protein, putative; protein id: supported by cDNA: 40780. [Arabidopsis thaliana]
  misc_feature (1)..(196): Homolog of NCBI NO: 21593636 NR Description: transmembrane protein, putative [Arabidopsis
  misc_feature (1)..(195): Homolog of NCBI NO: 21357589 NR Description: CG4196-PC [Drosophila melanogaster]
  misc_feature (1)..(196): Homolog of NCBI NO: 7689027 NR Description: uncharacterized hypothalamus protein HTMP [Homo
  misc_feature (1)..(196): Homolog of NCBI NO: 32189371 NR Description: TPA regulated locus; uncharacterized hypothalamus HTMP [Homo sapiens] >gi|9963757|gb|AAG09678.1|AF183409_1 protein PT27 [Homo sapiens] >gi|18568117|gb|AAL75947.1|AF132746_1
  misc_feature (1)..(193): Homolog of NCBI NO: 6755853 NR Description: TPA regulated locus [Mus musculus]
  misc_feature (1)..(193): Homolog of NCBI NO: 7684611 NR Description: TPARDL [Mus musculus]
  misc_feature (1)..(193): Homolog of NCBI NO: 18421551 NR Description: transmembrane protein FT27/PFT27-like; protein At5g36290.1, supported by cDNA: 12993., supported by cDNA: [Arabidopsis thaliana] >gi|15450794|gb|AAK96668.1| transmembrane
  misc_feature (1)..(191): Homolog of NCBI NO: 31240317 NR Description: ENSANGP00000008699 [Anopheles gambiae]
MRYPRRLVLAGCLSALIVMTILSATLGWAAPNLISRKWTHHITTFLFFGFGLWSLWDGFKEGGGSEELAEVEAELDSDLKKTNDQSKNSKIEDEQKKQKRPFLTAFFSPIFLKAFSINFFGEWGDKSQLATIGLAADENPLGVVLGGIVAQTLCTTAAVLGGKSLASQISERIVALSGGMLFIIFGIQSLLTPVDA

SEQ ID NO: 73198 - DNA, 1449 bp, Arabidopsis thaliana
  misc_feature (1)..(1449): Ceres Seq. ID no. 4960485
  misc_feature: MA Experiment ID: 108435 Result: Down-regulated in Transcription
  misc_feature: MA Experiment 108435 PARAMETER Experiment Name: At_stm_Mutants_cDNA_P Parameter: Plant Line Value: wt Landsburg vs stm
  misc_feature: MA Experiment 108435 PARAMETER Experiment Name: At_stm_Mutants_cDNA_P Parameter: Tissue Value: Shoot Apical Meristem Region
  misc_feature: MA Experiment ID: 108462 Result: Up-regulated in Transcription
  misc_feature: MA Experiment 108462 PARAMETER Experiment Name: At_Germinating_Seeds_cDNA_P Parameter: Age (day) Value: 2 vs. 0
  misc_feature: MA Experiment 108462 PARAMETER Experiment Name: At_Germinating_Seeds_cDNA_P Parameter: Tissue Value: Germinating Seeds
  misc_feature: MA Experiment ID: 108463 Result: Up-regulated in Transcription
  misc_feature: MA Experiment 108463 PARAMETER Experiment Name: At_Germinating_Seeds_cDNA_P Parameter: Age (day) Value: 3 vs. 0
  misc_feature: MA Experiment 108463 PARAMETER Experiment Name: At_Germinating_Seeds_cDNA_P Parameter: Tissue Value: Germinating Seeds
  misc_feature: MA Experiment ID: 108464 Result: Up-regulated in Transcription
  misc_feature: MA Experiment 108464 PARAMETER Experiment Name: At_Germinating_Seeds_cDNA_P Parameter: Age (day) Value: 4 vs. 0
  misc_feature: MA Experiment 108464 PARAMETER Experiment Name: At_Germinating_Seeds_cDNA_P Parameter: Tissue Value: Germinating Seeds
  misc_feature: MA Experiment ID: 108488 Result: Up-regulated in Transcription
  misc_feature: MA Experiment ID: 108573 Result: Up-regulated in Transcription
  misc_feature: MA Experiment 108573 PARAMETER Experiment Name: At_Drought_cDNA_P Parameter: Timepoint (hr) Value: 6
  misc_feature: MA Experiment 108573 PARAMETER Experiment Name: At_Drought_cDNA_P Parameter: Tissue Value: Aerial
  misc_feature: MA Experiment 108573 PARAMETER Experiment Name: At_Drought_cDNA_P Parameter: Treatment Value: Drought vs. No Drought
  misc_feature: MA Experiment ID: 108577 Result: Up-regulated in Transcription
  misc_feature: MA Experiment 108577 PARAMETER Experiment Name: At_42deg_Heat_cDNA_P Parameter: Temperature (deg C) Value: 42 vs. 22
  misc_feature: MA Experiment 108577 PARAMETER Experiment Name: At_42deg_Heat_cDNA_P Parameter: Timepoint (hr) Value: 6
  misc_feature: MA Experiment 108577 PARAMETER Experiment Name: At_42deg_Heat_cDNA_P Parameter: Tissue Value: Aerial
  misc_feature: MA Experiment ID: 108595 Result: Down-regulated in Transcription
  misc_feature: MA Experiment 108595 PARAMETER Experiment Name: At_Ler-pi_Ovule_cDNA_P Parameter: Plant Line Value: null
  misc_feature: MA Experiment ID: 20000072 Result: Down-regulated in Transcription
  misc_feature: MA Experiment 20000072 PARAMETER Experiment Name: At_100uM_ABA_Mutants_cDNA_P Parameter: Plant Line Value: CS8105
  misc_feature: MA Experiment 20000072 PARAMETER Experiment Name: At_100uM_ABA_Mutants_cDNA_P Parameter: Timepoint (hr) Value: 6
  misc_feature: MA Experiment 20000072 PARAMETER Experiment Name: At_100uM_ABA_Mutants_cDNA_P Parameter: Tissue Value: Aerial
  misc_feature: MA Experiment 20000072 PARAMETER Experiment Name: At_100uM_ABA_Mutants_cDNA_P Parameter: Treatment Value: 100uM ABA vs. No Treatment
  misc_feature: MA Experiment ID: 20000086 Result: Down-regulated in Transcription
  misc_feature: MA Experiment 20000086 PARAMETER Experiment Name: At_100uM_ABA_Mutants_cDNA_P Parameter: Plant Line Value: CS22
  misc_feature: MA Experiment 20000086 PARAMETER Experiment Name: At_100uM_ABA_Mutants_cDNA_P Parameter: Timepoint (hr) Value: 6
  misc_feature: MA Experiment 20000086 PARAMETER Experiment Name: At_100uM_ABA_Mutants_cDNA_P Parameter: Tissue Value: Aerial
  misc_feature: MA Experiment 20000086 PARAMETER Experiment Name: At_100uM_ABA_Mutants_cDNA_P Parameter: Treatment Value: 100uM ABA vs. No Treatment
  misc_feature: MA Experiment ID: 20000087 Result: Down-regulated in Transcription
  misc_feature: MA Experiment 20000087 PARAMETER Experiment Name: At_100uM_ABA_Mutants_cDNA_P Parameter: Plant Line Value: WS
  misc_feature: MA Experiment 20000087 PARAMETER Experiment Name: At_100uM_ABA_Mutants_cDNA_P Parameter: Timepoint (hr) Value: 6
  misc_feature: MA Experiment 20000087 PARAMETER Experiment Name: At_100uM_ABA_Mutants_cDNA_P Parameter: Tissue Value: Aerial
  misc_feature: MA Experiment 20000087 PARAMETER Experiment Name: At_100uM_ABA_Mutants_cDNA_P Parameter: Treatment Value: 100uM ABA vs. No Treatment
  misc_feature: MA Experiment ID: 20000089 Result: Down-regulated in Transcription
  misc_feature: MA Experiment ID: 20000090 Result: Down-regulated in Transcription
atgtctctcaaggcgttagactacgagtccttgaatgaaaacgtgaagaattgtcagtatgcagtcagaggtgaactttatcttcgtgcttctgagcttcagaaagaaggcaaaaagattattttcacaaatgttggaaaccctcatgctttaggacagaaacctctgacttttcctcgtcaggtggtttctttatgccaagcaccatttctgttagatgatccaaatgttggtatgatattcccagcagatgctattgcaagagctaagcattatctttccttgacttctggtggtcttggtgcttacagtgactcaagaggtcttccgggagttcggaaagaagtcgctgagttcattgaacggcgtgatggatatccaagcgatccagaactcatatttctaactgatggagcgagcaaaggtgtgatgcaaatcttgaattgtgtcatacgcggtcagaaagacggaatgattctggttccagttccacagtatccactctactcggctactatatctctgttaggtggtactcttgttccttactatcttgaagagtctgaaaactggggacttgatgttaacaaccttcgccaatctgttgctcaagctcgctctcaaggaataacagtaagggcaatggtgattattaaccccggaaacccaactggccagtgtcttagcgaagctaacataagagagatactacggttctgttgtgatgagagattagttcttctcggagacgaagtgtatcagcaaaatatataccaagatgaacgtccctttatcagttccaagaaggttttgatggatatgggagcaccgatcagcaaggaagttcagctcatatctttccacaccgtttccaaaggatactggggcgaatgtgggcaacggggaggttactttgagatgacaaatatccctcccaggaccgttgaggagatatacaaggtggcctctatagctctcagccccaacgtctctgcgcagatatttatgggtttaatggttagcccaccaaagcctggagacatttcatatgaccaattcgttcgtgagagcaagggaatactagaatcactgagaagaagagcaaggatgatgactgatggattcaacagctgcaaaaacgtcgtctgtaatttcacagaaggtgctatgtattcattccctcaaataaagttgccgtcgaaagcaatccaagcagcaaaacaagccggaaaagtccctgacgttttctactgccttaagctcttagaagccacaggaatctccacagttccaggctctggatttggacaaaaagaaggggtgtttcatttaaggacaacaattctgccagcagaagaagaaatgccagagattatggacagtttcaaaaagttcaatgatgagtttatgtctcagtacgctgataactttggttactccagaatgtga

SEQ ID NO: 73199 - protein, 482 aa, Arabidopsis thaliana
  peptide (1)..(482): Ceres Seq. ID no. 4960486
  misc_feature (118)..(466): Pfam Name: Aminotransferase class I and II Pfam Description: Aminotransferase class I and II
  misc_feature (1)..(482): Homolog of NCBI NO: 15223186 NR Description: putative alanine aminotransferase; protein id: supported by cDNA: 120310., supported by cDNA: gi_14334913, by cDNA: gi_17104534 [Arabidopsis thaliana]
  misc_feature (1)..(482): Homolog of NCBI NO: 21537112 NR Description: putative alanine aminotransferase [Arabidopsis
  misc_feature (1)..(482): Homolog of NCBI NO: 30688330 NR Description: alanine aminotransferase -related [Arabidopsis
  misc_feature (1)..(482): Homolog of NCBI NO: 16604499 NR Description: At1g23310/F26F24_4 [Arabidopsis thaliana]
  misc_feature (1)..(482): Homolog of NCBI NO: 13430566 NR Description: putative alanine aminotransferase [Arabidopsis
  misc_feature (4)..(482): Homolog of NCBI NO: 29569153 NR Description: alanine aminotransferase [Oryza sativa (indica
  misc_feature (4)..(482): Homolog of NCBI NO: 34899390 NR Description: putative alanine aminotransferase [Oryza sativa
  misc_feature (103)..(482): Homolog of NCBI NO: 14596229 NR Description: alanine aminotransferase-like protein
  misc_feature (4)..(474): Homolog of NCBI NO: 7434113 NR Description: alanine transaminase (EC 2.6.1.2) - Chlamydomonas
  misc_feature (1)..(475): Homolog of NCBI NO: 37533928 NR Description: putative alanine aminotransferase [Oryza sativa
MSLKALDYESLNENVKNCQYAVRGELYLRASELQKEGKKIIFTNVGNPHALGQKPLTFPRQVVSLCQAPFLLDDPNVGMIFPADAIARAKHYLSLTSGGLGAYSDSRGLPGVRKEVAEFIERRDGYPSDPELIFLTDGASKGVMQILNCVIRGQKDGMILVPVPQYPLYSATISLLGGTLVPYYLEESENWGLDVNNLRQSVAQARSQGITVRAMVIINPGNPTGQCLSEANIREILRFCCDERLVLLGDEVYQQNIYQDERPFISSKKVLMDMGAPISKEVQLISFHTVSKGYWGECGQRGGYFEMTNIPPRTVEEIYKVASIALSPNVSAQIFMGLMVSPPKPGDISYDQFVRESKGILESLRRRARMMTDGFNSCKNVVCNFTEGAMYSFPQIKLPSKAIQAAKQAGKVPDVFYCLKLLEATGISTVPGSGFGQKEGVFHLRTTILPAEEEMPEIMDSFKKFNDEFMSQYADNFGYSRM

SEQ ID NO: 73200 - protein, 404 aa, Arabidopsis thaliana
  peptide (1)..(404): Ceres Seq. ID no. 4960487
  misc_feature (40)..(388): Pfam Name: Aminotransferase class I and II Pfam Description: Aminotransferase class I and II
  misc_feature (1)..(404): Homolog of NCBI NO: 15223186 NR Description: putative alanine aminotransferase; protein id: supported by cDNA: 120310., supported by cDNA: gi_14334913, by cDNA: gi_17104534 [Arabidopsis thaliana]
  misc_feature (1)..(404): Homolog of NCBI NO: 21537112 NR Description: putative alanine aminotransferase [Arabidopsis
  misc_feature (1)..(404): Homolog of NCBI NO: 30688330 NR Description: alanine aminotransferase -related [Arabidopsis
  misc_feature (1)..(404): Homolog of NCBI NO: 16604499 NR Description: At1g23310/F26F24_4 [Arabidopsis thaliana]
  misc_feature (1)..(404): Homolog of NCBI NO: 13430566 NR Description: putative alanine aminotransferase [Arabidopsis
  misc_feature (1)..(404): Homolog of NCBI NO: 29569153 NR Description: alanine aminotransferase [Oryza sativa (indica
  misc_feature (1)..(404): Homolog of NCBI NO: 34899390 NR Description: putative alanine aminotransferase [Oryza sativa
  misc_feature (25)..(404): Homolog of NCBI NO: 14596229 NR Description: alanine aminotransferase-like protein
  misc_feature (1)..(396): Homolog of NCBI NO: 7434113 NR Description: alanine transaminase (EC 2.6.1.2) - Chlamydomonas
  misc_feature (1)..(397): Homolog of NCBI NO: 37533928 NR Description: putative alanine aminotransferase [Oryza sativa
MIFPADAIARAKHYLSLTSGGLGAYSDSRGLPGVRKEVAEFIERRDGYPSDPELIFLTDGASKGVMQILNCVIRGQKDGMILVPVPQYPLYSATISLLGGTLVPYYLEESENWGLDVNNLRQSVAQARSQGITVRAMVIINPGNPTGQCLSEANIREILRFCCDERLVLLGDEVYQQNIYQDERPFISSKKVLMDMGAPISKEVQLISFHTVSKGYWGECGQRGGYFEMTNIPPRTVEEIYKVASIALSPNVSAQIFMGLMVSPPKPGDISYDQFVRESKGILESLRRRARMMTDGFNSCKNVVCNFTEGAMYSFPQIKLPSKAIQAAKQAGKVPDVFYCLKLLEATGISTVPGSGFGQKEGVFHLRTTILPAEEEMPEIMDSFKKFNDEFMSQYADNFGYSRM

SEQ ID NO: 73201 - protein, 339 aa, Arabidopsis thaliana
  peptide (1)..(339): Ceres Seq. ID no. 4960488
  misc_feature (1)..(323): Pfam Name: Aminotransferase class I and II Pfam Description: Aminotransferase class I and II
  misc_feature (1)..(339): Homolog of NCBI NO: 15223186 NR Description: putative alanine aminotransferase; protein id: supported by cDNA: 120310., supported by cDNA: gi_14334913, by cDNA: gi_17104534 [Arabidopsis thaliana]
  misc_feature (1)..(339): Homolog of NCBI NO: 21537112 NR Description: putative alanine aminotransferase [Arabidopsis
  misc_feature (1)..(339): Homolog of NCBI NO: 30688330 NR Description: alanine aminotransferase -related [Arabidopsis
  misc_feature (1)..(339): Homolog of NCBI NO: 16604499 NR Description: At1g23310/F26F24_4 [Arabidopsis thaliana]
  misc_feature (1)..(339): Homolog of NCBI NO: 13430566 NR Description: putative alanine aminotransferase [Arabidopsis
  misc_feature (1)..(339): Homolog of NCBI NO: 29569153 NR Description: alanine aminotransferase [Oryza sativa (indica
  misc_feature (1)..(339): Homolog of NCBI NO: 34899390 NR Description: putative alanine aminotransferase [Oryza sativa
  misc_feature (1)..(339): Homolog of NCBI NO: 14596229 NR Description: alanine aminotransferase-like protein
  misc_feature (1)..(331): Homolog of NCBI NO: 7434113 NR Description: alanine transaminase (EC 2.6.1.2) - Chlamydomonas
  misc_feature (1)..(332): Homolog of NCBI NO: 37533928 NR Description: putative alanine aminotransferase [Oryza sativa
MQILNCVIRGQKDGMILVPVPQYPLYSATISLLGGTLVPYYLEESENWGLDVNNLRQSVAQARSQGITVRAMVIINPGNPTGQCLSEANIREILRFCCDERLVLLGDEVYQQNIYQDERPFISSKKVLMDMGAPISKEVQLISFHTVSKGYWGECGQRGGYFEMTNIPPRTVEEIYKVASIALSPNVSAQIFMGLMVSPPKPGDISYDQFVRESKGILESLRRRARMMTDGFNSCKNVVCNFTEGAMYSFPQIKLPSKAIQAAKQAGKVPDVFYCLKLLEATGISTVPGSGFGQKEGVFHLRTTILPAEEEMPEIMDSFKKFNDEFMSQYADNFGYSRM

SEQ ID NO: 73202 - DNA, 893 bp, Arabidopsis thaliana
  misc_feature (1)..(893): Ceres Seq. ID no. 4960512
  misc_feature: MA Experiment ID: 20000184 Result: Down-regulated in Transcription
  misc_feature: MA Experiment 20000184 PARAMETER Experiment Name: At_Shoots__P Parameter: Age (day) Value: 7
  misc_feature: MA Experiment 20000184 PARAMETER Experiment Name: At_Shoots__P Parameter: Tissue Value: Shoots vs. Whole Plant
  misc_feature: MA Experiment ID: 20000185 Result: Down-regulated in Transcription
  misc_feature: MA Experiment 20000185 PARAMETER Experiment Name: At_Roots__P Parameter: Age (day) Value: 7 vs. 21
  misc_feature: MA Experiment 20000185 PARAMETER Experiment Name: At_Roots__P Parameter: Organism Value: A. thaliana
  misc_feature: MA Experiment 20000185 PARAMETER Experiment Name: At_Roots__P Parameter: Tissue Value: Roots vs. Whole Plant
  misc_feature: MA Experiment ID: 20000264 Result: Up-regulated in Transcription
  misc_feature: MA Experiment 20000264 PARAMETER Experiment Name: At_Open_Flower_P Parameter: Age (day) Value: 21
  misc_feature: MA Experiment 20000264 PARAMETER Experiment Name: At_Open_Flower_P Parameter: Plant Line Value: WS
  misc_feature: MA Experiment 20000264 PARAMETER Experiment Name: At_Open_Flower_P Parameter: Tissue Value: Open Flower vs. Whole Plant
  misc_feature: MA Experiment ID: 20000265 Result: Down-regulated in Transcription
  misc_feature: MA Experiment 20000265 PARAMETER Experiment Name: At_Open_Flower_P Parameter: Age (day) Value: 21
  misc_feature: MA Experiment 20000265 PARAMETER Experiment Name: At_Open_Flower_P Parameter: Plant Line Value: WS
  misc_feature: MA Experiment 20000265 PARAMETER Experiment Name: At_Open_Flower_P Parameter: Tissue Value: Closed Flower vs. Whole Plant
  misc_feature: MA Experiment ID: 20000438 Result: Down-regulated in Transcription
  misc_feature: MA Experiment 20000438 PARAMETER Experiment Name: At_Shoots__P Parameter: Age (day) Value: 14
  misc_feature: MA Experiment 20000438 PARAMETER Experiment Name: At_Shoots__P Parameter: Tissue Value: Shoots vs. Whole Plant
  misc_feature: MA Experiment ID: 20000439 Result: Down-regulated in Transcription
  misc_feature: MA Experiment 20000439 PARAMETER Experiment Name: At_Roots__P Parameter: Age (day) Value: 14 vs. 21
  misc_feature: MA Experiment 20000439 PARAMETER Experiment Name: At_Roots__P Parameter: Organism Value: A. thaliana
  misc_feature: MA Experiment 20000439 PARAMETER Experiment Name: At_Roots__P Parameter: Tissue Value: Roots vs. Whole Plant
  misc_feature: MA Experiment ID: 20000794 Result: Up-regulated in Transcription
  misc_feature: MA Experiment 20000794 PARAMETER Experiment Name: At_Petals_P Parameter: Age (day) Value: 23-25 days
  misc_feature: MA Experiment 20000794 PARAMETER Experiment Name: At_Petals_P Parameter: Plant Line Value: WS
  misc_feature: MA Experiment 20000794 PARAMETER Experiment Name: At_Petals_P Parameter: Tissue Value: Petals vs. Whole plant
  misc_feature: MA Experiment ID: 20001555 Result: Up-regulated in Transcription
  misc_feature: MA Experiment 20001555 PARAMETER Experiment Name: At_Drought_Soil_Dry_P Parameter: Age (day) Value: 24
  misc_feature: MA Experiment 20001555 PARAMETER Experiment Name: At_Drought_Soil_Dry_P Parameter: Organism Value: A. thaliana
  misc_feature: MA Experiment 20001555 PARAMETER Experiment Name: At_Drought_Soil_Dry_P Parameter: Plant Line Value: WS
  misc_feature: MA Experiment 20001555 PARAMETER Experiment Name: At_Drought_Soil_Dry_P Parameter: Post Timepoint (hr) Value: None
  misc_feature: MA Experiment 20001555 PARAMETER Experiment Name: At_Drought_Soil_Dry_P Parameter: Post-Treatment Value: None
  misc_feature: MA Experiment 20001555 PARAMETER Experiment Name: At_Drought_Soil_Dry_P Parameter: Timepoint (day) Value: 10
  misc_feature: MA Experiment 20001555 PARAMETER Experiment Name: At_Drought_Soil_Dry_P Parameter: Treatment Value: Drought vs. No Drought
  misc_feature: MA Experiment ID: 20001556 Result: Up-regulated in Transcription
  misc_feature: MA Experiment 20001556 PARAMETER Experiment Name: At_Drought_Soil_Dry_P Parameter: Age (day) Value: 26
  misc_feature: MA Experiment 20001556 PARAMETER Experiment Name: At_Drought_Soil_Dry_P Parameter: Organism Value: A. thaliana
  misc_feature: MA Experiment 20001556 PARAMETER Experiment Name: At_Drought_Soil_Dry_P Parameter: Plant Line Value: WS
  misc_feature: MA Experiment 20001556 PARAMETER Experiment Name: At_Drought_Soil_Dry_P Parameter: Post Timepoint (hr) Value: None
  misc_feature: MA Experiment 20001556 PARAMETER Experiment Name: At_Drought_Soil_Dry_P Parameter: Post-Treatment Value: None
  misc_feature: MA Experiment 20001556 PARAMETER Experiment Name: At_Drought_Soil_Dry_P Parameter: Timepoint (day) Value: 12
  misc_feature: MA Experiment 20001556 PARAMETER Experiment Name: At_Drought_Soil_Dry_P Parameter: Treatment Value: Drought vs. No Drought
  misc_feature: MA Experiment ID: 20001904 Result: Up-regulated in Transcription
  misc_feature: MA Experiment 20001904 PARAMETER Experiment Name: At_Drought_Reproduction_P Parameter: Age (day) Value: 37
  misc_feature: MA Experiment 20001904 PARAMETER Experiment Name: At_Drought_Reproduction_P Parameter: Organism Value: A. thaliana
  misc_feature: MA Experiment 20001904 PARAMETER Experiment Name: At_Drought_Reproduction_P Parameter: Plant Line Value: WS
  misc_feature: MA Experiment 20001904 PARAMETER Experiment Name: At_Drought_Reproduction_P Parameter: Timepoint (day) Value: 7
  misc_feature: MA Experiment 20001904 PARAMETER Experiment Name: At_Drought_Reproduction_P Parameter: Tissue Value: Rosettes
  misc_feature: MA Experiment 20001904 PARAMETER Experiment Name: At_Drought_Reproduction_P Parameter: Treatment Value: Drought vs. No Drought
  misc_feature: MA Experiment ID: 20001905 Result: Up-regulated in Transcription
  misc_feature: MA Experiment 20001905 PARAMETER Experiment Name: At_Drought_Reproduction_P Parameter: Age (day) Value: 40
  misc_feature: MA Experiment 20001905 PARAMETER Experiment Name: At_Drought_Reproduction_P Parameter: Organism Value: A. thaliana
  misc_feature: MA Experiment 20001905 PARAMETER Experiment Name: At_Drought_Reproduction_P Parameter: Plant Line Value: WS
  misc_feature: MA Experiment 20001905 PARAMETER Experiment Name: At_Drought_Reproduction_P Parameter: Timepoint (day) Value: 10
  misc_feature: MA Experiment 20001905 PARAMETER Experiment Name: At_Drought_Reproduction_P Parameter: Tissue Value: Rosettes
  misc_feature: MA Experiment 20001905 PARAMETER Experiment Name: At_Drought_Reproduction_P Parameter: Treatment Value: Drought vs. No Drought
  misc_feature: MA Experiment ID: 20001911 Result: Down-regulated in Transcription
  misc_feature: MA Experiment 20001911 PARAMETER Experiment Name: At_Drought_Reproduction_P Parameter: Age (day) Value: 40
  misc_feature: MA Experiment 20001911 PARAMETER Experiment Name: At_Drought_Reproduction_P Parameter: Organism Value: A. thaliana
  misc_feature: MA Experiment 20001911 PARAMETER Experiment Name: At_Drought_Reproduction_P Parameter: Plant Line Value: WS
  misc_feature: MA Experiment 20001911 PARAMETER Experiment Name: At_Drought_Reproduction_P Parameter: Timepoint (day) Value: 10
  misc_feature: MA Experiment 20001911 PARAMETER Experiment Name: At_Drought_Reproduction_P Parameter: Tissue Value: Flowers
  misc_feature: MA Experiment 20001911 PARAMETER Experiment Name: At_Drought_Reproduction_P Parameter: Treatment Value: Drought vs. No Drought
gagtatttatcacattaattattatcatacaataacagcgtttcaccattctcttttcaatattttcagttactttctataagaaccattcacttattcttttttctctctatctgtgattatggcttcctctatttccgctgctgaagtgaaagttgtcccagaagagtataatttcttgcaaaaacatgtcgccttcttcgacagaaacaaagatggtatcgtttatccctcggagacatttcaaggatttagagcaatcggatgtggatatttgttgtcaacattcgctgctgttttcatcaacatcagtctcagcagcaaaactcgtccggggaaaggattctcattctcgtttccgatagaggttaagaatgtccgcctagggatacatagcagcgattcaggcgtttacgacaaggatggacggtttgtggcttcaaagttcgaggagatatttgcgaagcatgctcacacacatcgcgatgctttgaccagcaaggaacttaaagaacttctcaaggcaaacagagaacctaatgattgtaaaggagggattttagcgtttggggagtggaaggtattgtataatttgtgcaaagacaagagtggtttgctacacaaggagatagtgagagccgtctatgatggttctcttttcgaacaactcgagaaacaaagatcttctaaaactccttagaatcatcaaaaaaaaaatcctaatgtaaattcattgttatgctcgtgaatctgttttagttaaatctttagtagttacagtaatctatggtgtgaagattgggatgtgtttgattttcaagaattatagtttatttgtgtaagtacttgtgtgattgtatcttattcaaataaaagattatatgatttttttt

SEQ ID NO: 73203 - protein, 192 aa, Arabidopsis thaliana; identical to SEQ ID NO: 28252
  peptide (1)..(192): Ceres Seq. ID no. 4960513
  misc_feature (12)..(185): Pfam Name: Caleosin related protein Pfam Description: Caleosin related protein
  misc_feature (1)..(192): Homolog of NCBI NO: 18409651 NR Description: Ca2+-binding EF-hand common family protein, protein id: At1g70680.1, supported by cDNA: 9200. [Arabidopsis
  misc_feature (1)..(192): Homolog of NCBI NO: 21617961 NR Description: unknown [Arabidopsis thaliana]
  misc_feature (1)..(192): Homolog of NCBI NO: 18409649 NR Description: Ca2+-binding EF-hand common family protein, protein id: At1g70670.1, supported by cDNA: 5143., supported by gi_15810176 [Arabidopsis thaliana] >gi|25406062|pir||A96731
  misc_feature (1)..(192): Homolog of NCBI NO: 21593851 NR Description: unknown [Arabidopsis thaliana]
  misc_feature (20)..(192): Homolog of NCBI NO: 15220687 NR Description: pollen coat EF-hand protein; protein id: supported by cDNA: 16644. [Arabidopsis thaliana]
  misc_feature (1)..(192): Homolog of NCBI NO: 9295714 NR Description: F26F24.9 [Arabidopsis thaliana]
  misc_feature (12)..(189): Homolog of NCBI NO: 37652831 NR Description: calcium binding protein [Fagus sylvatica]
  misc_feature (20)..(189): Homolog of NCBI NO: 34902470 NR Description: Putative abscisic acid-induced protein - rice
  misc_feature (42)..(192): Homolog of NCBI NO: 15220688 NR Description: Ca2+-binding EF-hand common family protein,
  misc_feature (20)..(187): Homolog of NCBI NO: 32488447 NR Description: OSJNBa0004N05.4 [Oryza sativa (japonica

SEQ ID NO: 73204 - DNA, 619 bp, Arabidopsis thaliana
  misc_feature (1)..(619): Ceres Seq. ID no. 4960596
  misc_feature: MA Experiment ID: 20000179 Result: Up-regulated in Transcription
  misc_feature: MA Experiment 20000179 PARAMETER Experiment Name: At_Germinating_Seeds_P Parameter: Age (hr) Value: 6 vs. 0
  misc_feature: MA Experiment 20000179 PARAMETER Experiment Name: At_Germinating_Seeds_P Parameter: Tissue Value: Germinating Seeds
  misc_feature: MA Experiment ID: 20000184 Result: Down-regulated in Transcription
  misc_feature: MA Experiment 20000184 PARAMETER Experiment Name: At_Shoots__P Parameter: Age (day) Value: 7
  misc_feature: MA Experiment 20000184 PARAMETER Experiment Name: At_Shoots__P Parameter: Tissue Value: Shoots vs. Whole Plant
  misc_feature: MA Experiment ID: 20000438 Result: Down-regulated in Transcription
  misc_feature: MA Experiment 20000438 PARAMETER Experiment Name: At_Shoots__P Parameter: Age (day) Value: 14
  misc_feature: MA Experiment 20000438 PARAMETER Experiment Name: At_Shoots__P Parameter: Tissue Value: Shoots vs. Whole Plant
  misc_feature: MA Experiment ID: 20000451 Result: Down-regulated in Transcription
  misc_feature: MA Experiment 20000451 PARAMETER Experiment Name: At_CS6879_Shoots-Roots_P Parameter: Age (day) Value: 14
  misc_feature: MA Experiment 20000451 PARAMETER Experiment Name: At_CS6879_Shoots-Roots_P Parameter: Organism Value: A. thaliana
  misc_feature: MA Experiment 20000451 PARAMETER Experiment Name: At_CS6879_Shoots-Roots_P Parameter: Plant Line Value: CS6879 vs. WS
  misc_feature: MA Experiment 20000451 PARAMETER Experiment Name: At_CS6879_Shoots-Roots_P Parameter: Tissue Value: Roots
  misc_feature: MA Experiment ID: 20000794 Result: Up-regulated in Transcription
  misc_feature: MA Experiment 20000794 PARAMETER Experiment Name: At_Petals_P Parameter: Age (day) Value: 23-25 days
  misc_feature: MA Experiment 20000794 PARAMETER Experiment Name: At_Petals_P Parameter: Plant Line Value: WS
  misc_feature: MA Experiment 20000794 PARAMETER Experiment Name: At_Petals_P Parameter: Tissue Value: Petals vs. Whole plant
  misc_feature: MA Experiment ID: 20001248 Result: Up-regulated in Transcription
  misc_feature: MA Experiment 20001248 PARAMETER Experiment Name: At_Far-red-induction_P Parameter: Age (day) Value: 7
  misc_feature: MA Experiment 20001248 PARAMETER Experiment Name: At_Far-red-induction_P Parameter: Light Value: Far-red vs. White
  misc_feature: MA Experiment 20001248 PARAMETER Experiment Name: At_Far-red-induction_P Parameter: Organism Value: A. thaliana
  misc_feature: MA Experiment 20001248 PARAMETER Experiment Name: At_Far-red-induction_P Parameter: Plant Line Value: Columbia
  misc_feature: MA Experiment 20001248 PARAMETER Experiment Name: At_Far-red-induction_P Parameter: Timepoint (hr) Value: 4
  misc_feature: MA Experiment 20001248 PARAMETER Experiment Name: At_Far-red-induction_P Parameter: Tissue Value: Whole Plant
tgtttttgataacaaagtggagtggggaatcgacttggcctcagagcatgaaagatacttgacagaggttgagtttgatcaaaagccaataattgtgtataactacccgaaaggaatcaaagctttttacatgagacttaacgatgatgagaagacagttgctgccatggatgtccttgttccaaagattaattaggttggagaactcattggtggaagccaaagggaagaacgatatgatgttatcaaacagaggatcgaggagatgggtctaccaatggagccatatgagtggtacctagacttgcgtcgttatggaacagtgaagcattgtggatttggacttggcttcgaacgtatgattcagttcgctacaggaattgataacatcagagatgttattcctttccctcgctatcctggaaaagctgatctctgattcctctctagacacacaattctggtctggtctcgacatggttttagtttccttttaaattggttaaatgaaaattgtattgatttttatctatactctgtttctcaagctgtgagagctaatatgaagggaaacaaagttatatgaagggaaacaaagttatacttttgggttagcttc

SEQ ID NO: 73205 - protein, 64 aa, Arabidopsis thaliana; identical to SEQ ID NO: 40450
  peptide (1)..(64): Ceres Seq. ID no. 4960597
  misc_feature (1)..(64): Pfam Name: tRNA synthetases class II (D, K and N) Pfam Description: tRNA synthetases class II (D, K and N)
  misc_feature (1)..(64): Homolog of NCBI NO: 15223302 NR Description: asparaginyl-tRNA synthetase(SYNC1) protein id: At1g70980.1 [Arabidopsis thaliana]
  misc_feature (2)..(64): Homolog of NCBI NO: 15241897 NR Description: SYNC1 protein (gb|AAD46681.1); protein id:
  misc_feature (2)..(64): Homolog of NCBI NO: 34914792 NR Description: putative asparaginyl-tRNA synthetase [Oryza
  misc_feature (2)..(64): Homolog of NCBI NO: 22300015 NR Description: asparaginyl-tRNA synthetase [Thermosynechococcus
  misc_feature (2)..(64): Homolog of NCBI NO: 22775674 NR Description: putative asparaginyl-tRNA synthetase,
  misc_feature (2)..(64): Homolog of NCBI NO: 2664210 NR Description: asparaginyl-tRNA synthetase [Arabidopsis thaliana]
  misc_feature (2)..(64): Homolog of NCBI NO: 15236037 NR Description: asparagine--tRNA ligase; protein id: At4g17300.1, by cDNA: gi_19310457 [Arabidopsis thaliana]
  misc_feature (2)..(64): Homolog of NCBI NO: 20139977 NR Description: Asparaginyl-tRNA synthetase,
  misc_feature (2)..(64): Homolog of NCBI NO: 37525688 NR Description: asparaginyl-tRNA synthetase [Photorhabdus
  misc_feature (2)..(64): Homolog of NCBI NO: 23466786 NR Description: hypothetical protein [Haemophilus somnus 129PT]

SEQ ID NO: 73206 - protein, 57 aa, Arabidopsis thaliana
  peptide (1)..(57): Ceres Seq. ID no. 4960598
  misc_feature (1)..(53): Pfam Name: tRNA synthetases class II (D, K and N) Pfam Description: tRNA synthetases class II (D, K and N)
  misc_feature (1)..(57): Homolog of NCBI NO: 15223302 NR Description: asparaginyl-tRNA synthetase(SYNC1) protein id: At1g70980.1 [Arabidopsis thaliana]
  misc_feature (1)..(57): Homolog of NCBI NO: 15241897 NR Description: SYNC1 protein (gb|AAD46681.1); protein id:
  misc_feature (1)..(57): Homolog of NCBI NO: 34914792 NR Description: putative asparaginyl-tRNA synthetase [Oryza
  misc_feature (1)..(56): Homolog of NCBI NO: 22300015 NR Description: asparaginyl-tRNA synthetase [Thermosynechococcus
  misc_feature (1)..(56): Homolog of NCBI NO: 22775674 NR Description: putative asparaginyl-tRNA synthetase,
  misc_feature (1)..(56): Homolog of NCBI NO: 2664210 NR Description: asparaginyl-tRNA synthetase [Arabidopsis thaliana]
  misc_feature (1)..(56): Homolog of NCBI NO: 15236037 NR Description: asparagine--tRNA ligase; protein id: At4g17300.1, by cDNA: gi_19310457 [Arabidopsis thaliana]
  misc_feature (1)..(56): Homolog of NCBI NO: 20139977 NR Description: Asparaginyl-tRNA synthetase,
  misc_feature (1)..(56): Homolog of NCBI NO: 37525688 NR Description: asparaginyl-tRNA synthetase [Photorhabdus
  misc_feature (1)..(56): Homolog of NCBI NO: 23466786 NR Description: hypothetical protein [Haemophilus somnus 129PT]
MGLPMEPYEWYLDLRRYGTVKHCGFGLGFERMIQFATGIDNIRDVIPFPRYPGKADL

SEQ ID NO: 73207 - protein, 53 aa, Arabidopsis thaliana; identical to SEQ ID NO: 40452
  peptide (1)..(53): Ceres Seq. ID no. 4960599
  misc_feature (1)..(53): Homolog of NCBI NO: 15223302 NR Description: asparaginyl-tRNA synthetase(SYNC1) protein id: At1g70980.1 [Arabidopsis thaliana]
  misc_feature (1)..(53): Homolog of NCBI NO: 15241897 NR Description: SYNC1 protein (gb|AAD46681.1); protein id:
  misc_feature (1)..(53): Homolog of NCBI NO: 34914792 NR Description: putative asparaginyl-tRNA synthetase [Oryza
  misc_feature (1)..(52): Homolog of NCBI NO: 22300015 NR Description: asparaginyl-tRNA synthetase [Thermosynechococcus
  misc_feature (1)..(52): Homolog of NCBI NO: 22775674 NR Description: putative asparaginyl-tRNA synthetase,
  misc_feature (1)..(52): Homolog of NCBI NO: 2664210 NR Description: asparaginyl-tRNA synthetase [Arabidopsis thaliana]
  misc_feature (1)..(52): Homolog of NCBI NO: 20139977 NR Description: Asparaginyl-tRNA synthetase,
  misc_feature (1)..(52): Homolog of NCBI NO: 15236037 NR Description: asparagine--tRNA ligase; protein id: At4g17300.1, by cDNA: gi_19310457 [Arabidopsis thaliana]
  misc_feature (1)..(52): Homolog of NCBI NO: 37525688 NR Description: asparaginyl-tRNA synthetase [Photorhabdus
  misc_feature (1)..(52): Homolog of NCBI NO: 23466786 NR Description: hypothetical protein [Haemophilus somnus 129PT]

SEQ ID NO: 73208 - DNA, 3357 bp, Arabidopsis thaliana
  misc_feature (1)..(3357): Ceres Seq. ID no. 4960709
  misc_feature: MA Experiment ID: 20000169 Result: Up-regulated in Transcription
  misc_feature: MA Experiment 20000169 PARAMETER Experiment Name: At_100uM_ABA_P Parameter: Age (day) Value: 14
  misc_feature: MA Experiment 20000169 PARAMETER Experiment Name: At_100uM_ABA_P Parameter: Organism Value: A. thaliana
  misc_feature: MA Experiment 20000169 PARAMETER Experiment Name: At_100uM_ABA_P Parameter: Plant Line Value: WS
  misc_feature: MA Experiment 20000169 PARAMETER Experiment Name: At_100uM_ABA_P Parameter: Timepoint (hr) Value: 6
  misc_feature: MA Experiment 20000169 PARAMETER Experiment Name: At_100uM_ABA_P Parameter: Tissue Value: Aerial
  misc_feature: MA Experiment 20000169 PARAMETER Experiment Name: At_100uM_ABA_P Parameter: Treatment Value: 100uM ABA vs. No Treatment
  misc_feature: MA Experiment ID: 20000180 Result: Up-regulated in Transcription
  misc_feature: MA Experiment 20000180 PARAMETER Experiment Name: At_Germinating_Seeds_P Parameter: Age (hr) Value: 24 vs. 0
  misc_feature: MA Experiment 20000180 PARAMETER Experiment Name: At_Germinating_Seeds_P Parameter: Tissue Value: Germinating Seeds
  misc_feature: MA Experiment ID: 20000182 Result: Up-regulated in Transcription
  misc_feature: MA Experiment 20000182 PARAMETER Experiment Name: At_2mM_SA_P Parameter: Age (day) Value: 14
  misc_feature: MA Experiment 20000182 PARAMETER Experiment Name: At_2mM_SA_P Parameter: Organism Value: A. thaliana
  misc_feature: MA Experiment 20000182 PARAMETER Experiment Name: At_2mM_SA_P Parameter: Plant Line Value: WS
  misc_feature: MA Experiment 20000182 PARAMETER Experiment Name: At_2mM_SA_P Parameter: Timepoint (hr) Value: 6
  misc_feature: MA Experiment 20000182 PARAMETER Experiment Name: At_2mM_SA_P Parameter: Tissue Value: Aerial
  misc_feature: MA Experiment 20000182 PARAMETER Experiment Name: At_2mM_SA_P Parameter: Treatment Value: 2mM SA vs. No Treatment
  misc_feature: MA Experiment ID: 20000438 Result: Down-regulated in Transcription
  misc_feature: MA Experiment 20000438 PARAMETER Experiment Name: At_Shoots__P Parameter: Age (day) Value: 14
  misc_feature: MA Experiment 20000438 PARAMETER Experiment Name: At_Shoots__P Parameter: Tissue Value: Shoots vs. Whole Plant
  misc_feature: MA Experiment ID: 20000439 Result: Up-regulated in Transcription
  misc_feature: MA Experiment 20000439 PARAMETER Experiment Name: At_Roots__P Parameter: Age (day) Value: 14 vs. 21
  misc_feature: MA Experiment 20000439 PARAMETER Experiment Name: At_Roots__P Parameter: Organism Value: A. thaliana
  misc_feature: MA Experiment 20000439 PARAMETER Experiment Name: At_Roots__P Parameter: Tissue Value: Roots vs. Whole Plant
  misc_feature: MA Experiment ID: 20000453 Result: Up-regulated in Transcription
  misc_feature: MA Experiment 20000453 PARAMETER Experiment Name: At_100uM_ABA_P Parameter: Age (day) Value: 15
  misc_feature: MA Experiment 20000453 PARAMETER Experiment Name: At_100uM_ABA_P Parameter: Organism Value: A. thaliana
  misc_feature: MA Experiment 20000453 PARAMETER Experiment Name: At_100uM_ABA_P Parameter: Plant Line Value: WS
  misc_feature: MA Experiment 20000453 PARAMETER Experiment Name: At_100uM_ABA_P Parameter: Timepoint (hr) Value: 24
  misc_feature: MA Experiment 20000453 PARAMETER Experiment Name: At_100uM_ABA_P Parameter: Tissue Value: Aerial
  misc_feature: MA Experiment 20000453 PARAMETER Experiment Name: At_100uM_ABA_P Parameter: Treatment Value: 100uM ABA vs. No Treatment
  misc_feature: MA Experiment ID: 20000527 Result: Down-regulated in Transcription
  misc_feature: MA Experiment 20000527 PARAMETER Experiment Name: At_10percent_PEG_P Parameter: Age (day) Value: 20
  misc_feature: MA Experiment 20000527 PARAMETER Experiment Name: At_10percent_PEG_P Parameter: Organism Value: A. thaliana
  misc_feature: MA Experiment 20000527 PARAMETER Experiment Name: At_10percent_PEG_P Parameter: Plant Line Value: WS
  misc_feature: MA Experiment 20000527 PARAMETER Experiment Name: At_10percent_PEG_P Parameter: Timepoint (day) Value: 20
  misc_feature: MA Experiment 20000527 PARAMETER Experiment Name: At_10percent_PEG_P Parameter: Tissue Value: Whole Plant
  misc_feature: MA Experiment 20000527 PARAMETER Experiment Name: At_10percent_PEG_P Parameter: Treatment Value: 10percent PEG vs. No Treatment
  misc_feature: MA Experiment ID: 20000794 Result: Up-regulated in Transcription
  misc_feature: MA Experiment 20000794 PARAMETER Experiment Name: At_Petals_P Parameter: Age (day) Value: 23-25 days
  misc_feature: MA Experiment 20000794 PARAMETER Experiment Name: At_Petals_P Parameter: Plant Line Value: WS
  misc_feature: MA Experiment 20000794 PARAMETER Experiment Name: At_Petals_P Parameter: Tissue Value: Petals vs. Whole plant
  misc_feature: MA Experiment ID: 20001904 Result: Up-regulated in Transcription
  misc_feature: MA Experiment 20001904 PARAMETER Experiment Name: At_Drought_Reproduction_P Parameter: Age (day) Value: 37
  misc_feature: MA Experiment 20001904 PARAMETER Experiment Name: At_Drought_Reproduction_P Parameter: Organism Value: A. thaliana
  misc_feature: MA Experiment 20001904 PARAMETER Experiment Name: At_Drought_Reproduction_P Parameter: Plant Line Value: WS
  misc_feature: MA Experiment 20001904 PARAMETER Experiment Name: At_Drought_Reproduction_P Parameter: Timepoint (day) Value: 7
  misc_feature: MA Experiment 20001904 PARAMETER Experiment Name: At_Drought_Reproduction_P Parameter: Tissue Value: Rosettes
  misc_feature: MA Experiment 20001904 PARAMETER Experiment Name: At_Drought_Reproduction_P Parameter: Treatment Value: Drought vs. No Drought
  misc_feature: MA Experiment ID: 20001905 Result: Up-regulated in Transcription
  misc_feature: MA Experiment 20001905 PARAMETER Experiment Name: At_Drought_Reproduction_P Parameter: Age (day) Value: 40
  misc_feature: MA Experiment 20001905 PARAMETER Experiment Name: At_Drought_Reproduction_P Parameter: Organism Value: A. thaliana
  misc_feature: MA Experiment 20001905 PARAMETER Experiment Name: At_Drought_Reproduction_P Parameter: Plant Line Value: WS
  misc_feature: MA Experiment 20001905 PARAMETER Experiment Name: At_Drought_Reproduction_P Parameter: Timepoint (day) Value: 10
  misc_feature: MA Experiment 20001905 PARAMETER Experiment Name: At_Drought_Reproduction_P Parameter: Tissue Value: Rosettes
  misc_feature: MA Experiment 20001905 PARAMETER Experiment Name: At_Drought_Reproduction_P Parameter: Treatment Value: Drought vs. No Drought
  misc_feature: MA Experiment ID: 20001906 Result: Up-regulated in Transcription
  misc_feature: MA Experiment 20001906 PARAMETER Experiment Name: At_Drought_Reproduction_P Parameter: Age (day) Value: 35
  misc_feature: MA Experiment 20001906 PARAMETER Experiment Name: At_Drought_Reproduction_P Parameter: Organism Value: A. thaliana
  misc_feature: MA Experiment 20001906 PARAMETER Experiment Name: At_Drought_Reproduction_P Parameter: Plant Line Value: WS
  misc_feature: MA Experiment 20001906 PARAMETER Experiment Name: At_Drought_Reproduction_P Parameter: Timepoint (day) Value: 5
  misc_feature: MA Experiment 20001906 PARAMETER Experiment Name: At_Drought_Reproduction_P Parameter: Tissue Value: Siliques
  misc_feature: MA Experiment 20001906 PARAMETER Experiment Name: At_Drought_Reproduction_P Parameter: Treatment Value: Drought vs. No Drought
  misc_feature: MA Experiment ID: 20001911 Result: Up-regulated in Transcription
  misc_feature: MA Experiment 20001911 PARAMETER Experiment Name: At_Drought_Reproduction_P Parameter: Age (day) Value: 40
  misc_feature: MA Experiment 20001911 PARAMETER Experiment Name: At_Drought_Reproduction_P Parameter: Organism Value: A. thaliana
  misc_feature: MA Experiment 20001911 PARAMETER Experiment Name: At_Drought_Reproduction_P Parameter: Plant Line Value: WS
  misc_feature: MA Experiment 20001911 PARAMETER Experiment Name: At_Drought_Reproduction_P Parameter: Timepoint (day) Value: 10
  misc_feature: MA Experiment 20001911 PARAMETER Experiment Name: At_Drought_Reproduction_P Parameter: Tissue Value: Flowers
  misc_feature: MA Experiment 20001911 PARAMETER Experiment Name: At_Drought_Reproduction_P Parameter: Treatment Value: Drought vs. No Drought
atgacgactacttcagaaatttctcttcaagaagaatacgtcaccgacgccgttgaccaccgtggacttgccgccagaagatccaataccggtagatggagagccgccttgttcataatcggtgtggaggtggctgagaggttcgcttactatggaatcggatcaaacttaataagctacttgactggaccacttggtgaatccacggctgtagccgccgctaatgtcaacgcgtggtcaggaattgccactcttcttcctgttcttggagcttttgtcgccgacgcatttctcggtcgttaccgaacaattatcatctcttctcttatctacgtcctgggattggcgtttctgactttatctgcgtttctgattcccaatactactgaagtgacatcttcaacttcttcttttctcaatgtactcttcttcttctctctgtatttggtggctattggacaaagtggacacaagccttgtgttcaagcttttggtgctgaccagtttgatgaaaaagactctcaagagaaatctgacagaagctccttcttcaactggtggtaccttagtctgtctgcaggaatctgctttgcgattttagttgttgtatacatccaggaagagttcagctgggcttttgggtttggaatcccatgtgtgttcatggtgatctctcttgttcttttcgtgtcagggagaaggatttataggtacagtaaaagaagacatgaagaggaaataaacccttttacgaggataggtagagtcttctttgtagcactcaagaaccaaagattgagttcatcagacttgtgcaaagttgagctagaggcaaatacatccccagagaaacagagttttttcaacaaagcattgcttgtacccaatgattcttctcaaggagaaaacgcatccaagtctagtgatgttgaagatgccacagctcttatcaggctaattccagtatggtttacgactctggcttacgcgataccctacgcgcaatacatgacatttttcactaagcaaggcgtcacaatggatagaacaattcttcctggtgttaagatcccacctgcttctcttcaggtctttatcggcatatcaatagtcctctttgtccccatctacgaccgagttttcgtccccatcgccaggttaataaccaaagaaccttgtggcatcacaaccctcaaaagaattggaactggaattgtactgtcgactatcactatggtaattgcagctctggttgagttcaagcggctcgagactgcgaaagaacacgggcttatagaccaaccggaagcaactcttccaatgtcgatatggtggttaatccctcagtacttgttgctgggattggctgacgtatatactttagtgggaatgcaagagttcttctacagccaagtccctactgagctgagaagcatcggtctcgcgctttacttaagcgcgttgggcgtgggaagcttattaagcagcttactcatctctctgatagacttggccactggaggagacgcaggaaacagctggtttaacagtaatctgaacagagctcatcttgattacttctattggttactagcgattgttagcgccgttgggttctttacgttcttgttcatttccaagtcgtacatctatcgtcgagtggatcgaaaaatgacgacgacttccaaaacttctcttcaagaagaatacgtcatcgacgccgttgaccaccgtggcttttccgccagaaggtctattaccggtagatggagagctgcatggttcattatcggtgtggaggtggcggagaggttcgcgaactacgggatcggatcaaacctgataagctacttgactggaccacttggtcaatctacggcggtcgccgccgctaatgtcaacgcttggtctggaatttccactattcttcctcttcttggagcttttgtcgccgacgcttttcttggtcgctacataacaattatcatcgcttcttttatctatgtcctgggactggcgtttctgactttatctgcgtttctgattcccaacaatactgaagtgacctcgtcaccttcttcttttctcaatgcactcttcttcttctctctttatttggtggctattggacaaagtggacacaagccttgtgttcaggcttttggtgcagatcagtttgatgagaagaacccgcaagagaatagtgatagaagctctttcttcaactggtggtaccttagtatgtgtgcaggaatcggcctagcgattttagtggttgtgtacatccaagaaaatgtaagctgggcacttgggtttggaatcccatgtgtgttcatggtgatctctcttgttcttttcgttttagggagaaagagttataggtttagtaaaacaagacaagaagaggaaacaaacccgtttacgagaataggtagagtcttctttgtagcattcaagaaccagagattgaattcatcagacttgtgcaaagttgagctaatagaggcaaatcgatctcaagaatctccagaggagctgagttttctcaacaaagcattgcttgtcccaaatgattctgatgaaggagaagtggcatgcaagtctagagatgtcgaagatgctacagctcttgtcaggcttattccagtatggcttacaactttggcttacgcgatacctttcgcgcagtacatgactttctttacaaagcaaggtgtcacaatggaaagaacaatatttccaggtgtagagatcccacctgcttctcttcaggttcttatcagcatatcaattgttctctttgtccccatctatgaccgtgttttggtcccaatcggaaggtcaataactaaagatccttgtggcatcacaactctcaaaagaattggaaccggaatggtactagcaactctcactatggtggtggctgctttggttgagtcaaagcggctcgagactgcaaaagaatacggacttatagaccaaccgaaaacaactcttccaatgtcgatatggtggttattccctcagtatatgttactgggattggctgacgtacacactttagtaggaatgcaagagttcttctacagccaagtccccactgagctgagaagcctcggtctcgcgatttacttaagtgcaatgggcgttggaagcttattaagcagcttactcatctatctgatcgatttggccactggaggagacgccggaaacagctggttcaacagtaatctgaacagagcccatctagattacttctattggttacttgcggttgttagtgccgttgggttctttacgttcttgttcatctccaagtcctatatatatcgccgggtggacgtagtgtag

SEQ ID NO: 73209 - protein, 1118 aa, Arabidopsis thaliana
  peptide (1)..(1118): Ceres Seq. ID no. 4960710
  misc_feature (658)..(1049): Pfam Name: POT family Pfam Description: POT family
  misc_feature (1)..(556): Homolog of NCBI NO: 18086410 NR Description: At1g72120/F28P5_2 [Arabidopsis thaliana]
  misc_feature (558)..(1118): Homolog of NCBI NO: 18086410 NR Description: At1g72120/F28P5_2 [Arabidopsis thaliana]
  misc_feature (1)..(555): Homolog of NCBI NO: 15218352 NR Description: oligopeptide transporter, putative; protein id: [Arabidopsis thaliana] >gi|25406146|pir||E96744 probable
  misc_feature (558)..(1116): Homolog of NCBI NO: 15218352 NR Description: oligopeptide transporter, putative; protein id: [Arabidopsis thaliana] >gi|25406146|pir||E96744 probable
  misc_feature (23)..(549): Homolog of NCBI NO: 25406147 NR Description: probable peptide transporter PTR2-B T9N14.15 - Arabidopsis thaliana >gi|12323655|gb|AAG51788.1|AC067754_4
  misc_feature (594)..(882): Homolog of NCBI NO: 25406147 NR Description: probable peptide transporter PTR2-B T9N14.15 - Arabidopsis thaliana >gi|12323655|gb|AAG51788.1|AC067754_4
  misc_feature (23)..(538): Homolog of NCBI NO: 12322195 NR Description: oligopeptide transporter, putative [Arabidopsis
  misc_feature (620)..(882): Homolog of NCBI NO: 12322195 NR Description: oligopeptide transporter, putative [Arabidopsis
  misc_feature (6)..(556): Homolog of NCBI NO: 15219905 NR Description: peptide transporter, putative; protein id: [Arabidopsis thaliana] >gi|25402971|pir||G86358 protein Similar
  misc_feature (6)..(556): Homolog of NCBI NO: 28416707 NR Description: At1g22550 [Arabidopsis thaliana]
MTTTSEISLQEEYVTDAVDHRGLAARRSNTGRWRAALFIIGVEVAERFAYYGIGSNLISYLTGPLGESTAVAAANVNAWSGIATLLPVLGAFVADAFLGRYRTIIISSLIYVLGLAFLTLSAFLIPNTTEVTSSTSSFLNVLFFFSLYLVAIGQSGHKPCVQAFGADQFDEKDSQEKSDRSSFFNWWYLSLSAGICFAILVVVYIQEEFSWAFGFGIPCVFMVISLVLFVSGRRIYRYSKRRHEEEINPFTRIGRVFFVALKNQRLSSSDLCKVELEANTSPEKQSFFNKALLVPNDSSQGENASKSSDVEDATALIRLIPVWFTTLAYAIPYAQYMTFFTKQGVTMDRTILPGVKIPPASLQVFIGISIVLFVPIYDRVFVPIARLITKEPCGITTLKRIGTGIVLSTITMVIAALVEFKRLETAKEHGLIDQPEATLPMSIWWLIPQYLLLGLADVYTLVGMQEFFYSQVPTELRSIGLALYLSALGVGSLLSSLLISLIDLATGGDAGNSWFNSNLNRAHLDYFYWLLAIVSAVGFFTFLFISKSYIYRRVDRKMTTTSKTSLQEEYVIDAVDHRGFSARRSITGRWRAAWFIIGVEVAERFANYGIGSNLISYLTGPLGQSTAVAAANVNAWSGISTILPLLGAFVADAFLGRYITIIIASFIYVLGLAFLTLSAFLIPNNTEVTSSPSSFLNALFFFSLYLVAIGQSGHKPCVQAFGADQFDEKNPQENSDRSSFFNWWYLSMCAGIGLAILVVVYIQENVSWALGFGIPCVFMVISLVLFVLGRKSYRFSKTRQEEETNPFTRIGRVFFVAFKNQRLNSSDLCKVELIEANRSQESPEELSFLNKALLVPNDSDEGEVACKSRDVEDATALVRLIPVWLTTLAYAIPFAQYMTFFTKQGVTMERTIFPGVEIPPASLQVLISISIVLFVPIYDRVLVPIGRSITKDPCGITTLKRIGTGMVLATLTMVVAALVESKRLETAKEYGLIDQPKTTLPMSIWWLFPQYMLLGLADVHTLVGMQEFFYSQVPTELRSLGLAIYLSAMGVGSLLSSLLIYLIDLATGGDAGNSWFNSNLNRAHLDYFYWLLAVVSAVGFFTFLFISKSYIYRRVDVV

SEQ ID NO: 73210 - protein, 897 aa, Arabidopsis thaliana
  peptide (1)..(897): Ceres Seq. ID no. 4960711
  misc_feature (437)..(828): Pfam Name: POT family Pfam Description: POT family
  misc_feature (1)..(335): Homolog of NCBI NO: 18086410 NR Description: At1g72120/F28P5_2 [Arabidopsis thaliana]
  misc_feature (337)..(897): Homolog of NCBI NO: 18086410 NR Description: At1g72120/F28P5_2 [Arabidopsis thaliana]
  misc_feature (1)..(334): Homolog of NCBI NO: 15218352 NR Description: oligopeptide transporter, putative; protein id: [Arabidopsis thaliana] >gi|25406146|pir||E96744 probable
  misc_feature (337)..(895): Homolog of NCBI NO: 15218352 NR Description: oligopeptide transporter, putative; protein id: [Arabidopsis thaliana] >gi|25406146|pir||E96744 probable
  misc_feature (1)..(328): Homolog of NCBI NO: 25406147 NR Description: probable peptide transporter PTR2-B T9N14.15 - Arabidopsis thaliana >gi|12323655|gb|AAG51788.1|AC067754_4
  misc_feature (373)..(661): Homolog of NCBI NO: 25406147 NR Description: probable peptide transporter PTR2-B T9N14.15 - Arabidopsis thaliana >gi|12323655|gb|AAG51788.1|AC067754_4
  misc_feature (1)..(317): Homolog of NCBI NO: 12322195 NR Description: oligopeptide transporter, putative [Arabidopsis
  misc_feature (399)..(661): Homolog of NCBI NO: 12322195 NR Description: oligopeptide transporter, putative [Arabidopsis
  misc_feature (1)..(335): Homolog of NCBI NO: 15219905 NR Description: peptide transporter, putative; protein id: [Arabidopsis thaliana] >gi|25402971|pir||G86358 protein Similar
  misc_feature (1)..(335): Homolog of NCBI NO: 28416707 NR Description: At1g22550 [Arabidopsis thaliana]
MVISLVLFVSGRRIYRYSKRRHEEEINPFTRIGRVFFVALKNQRLSSSDLCKVELEANTSPEKQSFFNKALLVPNDSSQGENASKSSDVEDATALIRLIPVWFTTLAYAIPYAQYMTFFTKQGVTMDRTILPGVKIPPASLQVFIGISIVLFVPIYDRVFVPIARLITKEPCGITTLKRIGTGIVLSTITMVIAALVEFKRLETAKEHGLIDQPEATLPMSIWWLIPQYLLLGLADVYTLVGMQEFFYSQVPTELRSIGLALYLSALGVGSLLSSLLISLIDLATGGDAGNSWFNSNLNRAHLDYFYWLLAIVSAVGFFTFLFISKSYIYRRVDRKMTTTSKTSLQEEYVIDAVDHRGFSARRSITGRWRAAWFIIGVEVAERFANYGIGSNLISYLTGPLGQSTAVAAANVNAWSGISTILPLLGAFVADAFLGRYITIIIASFIYVLGLAFLTLSAFLIPNNTEVTSSPSSFLNALFFFSLYLVAIGQSGHKPCVQAFGADQFDEKNPQENSDRSSFFNWWYLSMCAGIGLAILVVVYIQENVSWALGFGIPCVFMVISLVLFVLGRKSYRFSKTRQEEETNPFTRIGRVFFVAFKNQRLNSSDLCKVELIEANRSQESPEELSFLNKALLVPNDSDEGEVACKSRDVEDATALVRLIPVWLTTLAYAIPFAQYMTFFTKQGVTMERTIFPGVEIPPASLQVLISISIVLFVPIYDRVLVPIGRSITKDPCGITTLKRIGTGMVLATLTMVVAALVESKRLETAKEYGLIDQPKTTLPMSIWWLFPQYMLLGLADVHTLVGMQEFFYSQVPTELRSLGLAIYLSAMGVGSLLSSLLIYLIDLATGGDAGNSWFNSNLNRAHLDYFYWLLAVVSAVGFFTFLFISKSYIYRRVDVV

SEQ ID NO: 73211 - protein, 782 aa, Arabidopsis thaliana
  peptide (1)..(782): Ceres Seq. ID no. 4960712
  misc_feature (322)..(713): Pfam Name: POT family Pfam Description: POT family
  misc_feature (1)..(220): Homolog of NCBI NO: 18086410 NR Description: At1g72120/F28P5_2 [Arabidopsis thaliana]
  misc_feature (222)..(782): Homolog of NCBI NO: 18086410 NR Description: At1g72120/F28P5_2 [Arabidopsis thaliana]
  misc_feature (1)..(219): Homolog of NCBI NO: 15218352 NR Description: oligopeptide transporter, putative; protein id: [Arabidopsis thaliana] >gi|25406146|pir||E96744 probable
  misc_feature (222)..(780): Homolog of NCBI NO: 15218352 NR Description: oligopeptide transporter, putative; protein id: [Arabidopsis thaliana] >gi|25406146|pir||E96744 probable
  misc_feature (1)..(213): Homolog of NCBI NO: 25406147 NR Description: probable peptide transporter PTR2-B T9N14.15 - Arabidopsis thaliana >gi|12323655|gb|AAG51788.1|AC067754_4
  misc_feature (258)..(546): Homolog of NCBI NO: 25406147 NR Description: probable peptide transporter PTR2-B T9N14.15 - Arabidopsis thaliana >gi|12323655|gb|AAG51788.1|AC067754_4
  misc_feature (1)..(202): Homolog of NCBI NO: 12322195 NR Description: oligopeptide transporter, putative [Arabidopsis
  misc_feature (284)..(546): Homolog of NCBI NO: 12322195 NR Description: oligopeptide transporter, putative [Arabidopsis
  misc_feature (1)..(220): Homolog of NCBI NO: 15219905 NR Description: peptide transporter, putative; protein id: [Arabidopsis thaliana] >gi|25402971|pir||G86358 protein Similar
  misc_feature (1)..(220): Homolog of NCBI NO: 28416707 NR Description: At1g22550 [Arabidopsis thaliana]
MTFFTKQGVTMDRTILPGVKIPPASLQVFIGISIVLFVPIYDRVFVPIARLITKEPCGITTLKRIGTGIVLSTITMVIAALVEFKRLETAKEHGLIDQPEATLPMSIWWLIPQYLLLGLADVYTLVGMQEFFYSQVPTELRSIGLALYLSALGVGSLLSSLLISLIDLATGGDAGNSWFNSNLNRAHLDYFYWLLAIVSAVGFFTFLFISKSYIYRRVDRKMTTTSKTSLQEEYVIDAVDHRGFSARRSITGRWRAAWFIIGVEVAERFANYGIGSNLISYLTGPLGQSTAVAAANVNAWSGISTILPLLGAFVADAFLGRYITIIIASFIYVLGLAFLTLSAFLIPNNTEVTSSPSSFLNALFFFSLYLVAIGQSGHKPCVQAFGADQFDEKNPQENSDRSSFFNWWYLSMCAGIGLAILVVVYIQENVSWALGFGIPCVFMVISLVLFVLGRKSYRFSKTRQEEETNPFTRIGRVFFVAFKNQRLNSSDLCKVELIEANRSQESPEELSFLNKALLVPNDSDEGEVACKSRDVEDATALVRLIPVWLTTLAYAIPFAQYMTFFTKQGVTMERTIFPGVEIPPASLQVLISISIVLFVPIYDRVLVPIGRSITKDPCGITTLKRIGTGMVLATLTMVVAALVESKRLETAKEYGLIDQPKTTLPMSIWWLFPQYMLLGLADVHTLVGMQEFFYSQVPTELRSLGLAIYLSAMGVGSLLSSLLIYLIDLATGGDAGNSWFNSNLNRAHLDYFYWLLAVVSAVGFFTFLFISKSYIYRRVDVV

SEQ ID NO: 73212 - DNA, 332 bp, Arabidopsis thaliana
  misc_feature (1)..(332): Ceres Seq. ID no. 4960749
  misc_feature: MA Experiment ID: 20000111 Result: Down-regulated in Transcription
  misc_feature: MA Experiment 20000111 PARAMETER Experiment Name: At_42deg_Heat_cDNA_P Parameter: Temperature (deg C) Value: 42 vs. 22
  misc_feature: MA Experiment 20000111 PARAMETER Experiment Name: At_42deg_Heat_cDNA_P Parameter: Timepoint (hr) Value: 6
  misc_feature: MA Experiment 20000111 PARAMETER Experiment Name: At_42deg_Heat_cDNA_P Parameter: Tissue Value: Aerial
  misc_feature: Pfam Name: Sec6 Pfam Description: Exocyst complex component Sec6
atttcagaattaagatatggtcttctgtccaacttaattctcaaatggtgcgagggacaggttaccgagtacctcgtggcaactttcggtgattatttcacagatgtgaaaatgtatgtcgaagaaagatcatttagaagatttgtcgaagcatgtttggaagaaacagtcgttgtctatgttgaccatctcctaactcagaaaaactacatcaaggaagaaactattgaacggatgaggctagatgaagaggttctcatggatttctttagggagtatataagtgcatctaaagtggagagcagaatcagaataatgagcgatctgagaga

SEQ ID NO: 73213 - protein, 110 aa, Arabidopsis thaliana
  peptide (1)..(110): Ceres Seq. ID no. 4960750
  misc_feature: Pfam Name: Sec6 Pfam Description: Exocyst complex component Sec6
  misc_feature (8)..(109): Homolog of NCBI NO: 25406122 NR Description: hypothetical protein F14O23.20 [imported] - thaliana >gi|7239509|gb|AAF43235.1|AC012654_19 EST gb|AA712174
  misc_feature (8)..(109): Homolog of NCBI NO: 18409922 NR Description: expressed protein; protein id: At1g71820.1, by cDNA: gi_15028128, supported by cDNA: gi_19387171 [Arabidopsis >gi|15028129|gb|AAK76688.1| unknown protein [Arabidopsis
  misc_feature (8)..(109): Homolog of NCBI NO: 19387172 NR Description: SEC6 [Arabidopsis thaliana]
ISELRYGLLSNLILKWCEGQVTEYLVATFGDYFTDVKMYVEERSFRRFVEACLEETVVVYVDHLLTQKNYIKEETIERMRLDEEVLMDFFREYISASKVESRIRIMSDLR

SEQ ID NO: 73214 - protein, 73 aa, Arabidopsis thaliana
  peptide (1)..(73): Ceres Seq. ID no. 4960751
  misc_feature: Pfam Name: Sec6 Pfam Description: Exocyst complex component Sec6
  misc_feature (1)..(72): Homolog of NCBI NO: 25406122 NR Description: hypothetical protein F14O23.20 [imported] - thaliana >gi|7239509|gb|AAF43235.1|AC012654_19 EST gb|AA712174
  misc_feature (1)..(72): Homolog of NCBI NO: 18409922 NR Description: expressed protein; protein id: At1g71820.1, by cDNA: gi_15028128, supported by cDNA: gi_19387171 [Arabidopsis >gi|15028129|gb|AAK76688.1| unknown protein [Arabidopsis
  misc_feature (1)..(72): Homolog of NCBI NO: 19387172 NR Description: SEC6 [Arabidopsis thaliana]
MYVEERSFRRFVEACLEETVVVYVDHLLTQKNYIKEETIERMRLDEEVLMDFFREYISASKVESRIRIMSDLR

SEQ ID NO: 73215 - DNA, 1674 bp, Arabidopsis thaliana
  misc_feature (1)..(1674): Ceres Seq. ID no. 4960840
  misc_feature: MA Experiment ID: 108434 Result: Down-regulated in Transcription
  misc_feature: MA Experiment 108434 PARAMETER Experiment Name: At_Root_Tips_cDNA_P Parameter: Tissue Value: Root Tips
  misc_feature: MA Experiment ID: 108462 Result: Down-regulated in Transcription
  misc_feature: MA Experiment 108462 PARAMETER Experiment Name: At_Germinating_Seeds_cDNA_P Parameter: Age (day) Value: 2 vs. 0
  misc_feature: MA Experiment 108462 PARAMETER Experiment Name: At_Germinating_Seeds_cDNA_P Parameter: Tissue Value: Germinating Seeds
  misc_feature: MA Experiment ID: 108464 Result: Down-regulated in Transcription
  misc_feature: MA Experiment 108464 PARAMETER Experiment Name: At_Germinating_Seeds_cDNA_P Parameter: Age (day) Value: 4 vs. 0
  misc_feature: MA Experiment 108464 PARAMETER Experiment Name: At_Germinating_Seeds_cDNA_P Parameter: Tissue Value: Germinating Seeds
  misc_feature: MA Experiment ID: 108573 Result: Up-regulated in Transcription
  misc_feature: MA Experiment 108573 PARAMETER Experiment Name: At_Drought_cDNA_P Parameter: Timepoint (hr) Value: 6
  misc_feature: MA Experiment 108573 PARAMETER Experiment Name: At_Drought_cDNA_P Parameter: Tissue Value: Aerial
  misc_feature: MA Experiment 108573 PARAMETER Experiment Name: At_Drought_cDNA_P Parameter: Treatment Value: Drought vs. No Drought
  misc_feature: MA Experiment ID: 20000070 Result: Up-regulated in Transcription
  misc_feature: MA Experiment 20000070 PARAMETER Experiment Name: At_100uM_ABA_Mutants_cDNA_P Parameter: Plant Line Value: CS24
  misc_feature: MA Experiment 20000070 PARAMETER Experiment Name: At_100uM_ABA_Mutants_cDNA_P Parameter: Timepoint (hr) Value: 6
  misc_feature: MA Experiment 20000070 PARAMETER Experiment Name: At_100uM_ABA_Mutants_cDNA_P Parameter: Tissue Value: Aerial
  misc_feature: MA Experiment 20000070 PARAMETER Experiment Name: At_100uM_ABA_Mutants_cDNA_P Parameter: Treatment Value: 100uM ABA vs. No Treatment
  misc_feature: MA Experiment ID: 20000071 Result: Up-regulated in Transcription
  misc_feature: MA Experiment 20000071 PARAMETER Experiment Name: At_100uM_ABA_Mutants_cDNA_P Parameter: Plant Line Value: CS8104
  misc_feature: MA Experiment 20000071 PARAMETER Experiment Name: At_100uM_ABA_Mutants_cDNA_P Parameter: Timepoint (hr) Value: 6
  misc_feature: MA Experiment 20000071 PARAMETER Experiment Name: At_100uM_ABA_Mutants_cDNA_P Parameter: Tissue Value: Aerial
  misc_feature: MA Experiment 20000071 PARAMETER Experiment Name: At_100uM_ABA_Mutants_cDNA_P Parameter: Treatment Value: 100uM ABA vs. No Treatment
  misc_feature: MA Experiment ID: 20000072 Result: Up-regulated in Transcription
  misc_feature: MA Experiment 20000072 PARAMETER Experiment Name: At_100uM_ABA_Mutants_cDNA_P Parameter: Plant Line Value: CS8105
  misc_feature: MA Experiment 20000072 PARAMETER Experiment Name: At_100uM_ABA_Mutants_cDNA_P Parameter: Timepoint (hr) Value: 6
  misc_feature: MA Experiment 20000072 PARAMETER Experiment Name: At_100uM_ABA_Mutants_cDNA_P Parameter: Tissue Value: Aerial
  misc_feature: MA Experiment 20000072 PARAMETER Experiment Name: At_100uM_ABA_Mutants_cDNA_P Parameter: Treatment Value: 100uM ABA vs. No Treatment
  misc_feature: MA Experiment ID: 20000086 Result: Up-regulated in Transcription
  misc_feature: MA Experiment 20000086 PARAMETER Experiment Name: At_100uM_ABA_Mutants_cDNA_P Parameter: Plant Line Value: CS22
  misc_feature: MA Experiment 20000086 PARAMETER Experiment Name: At_100uM_ABA_Mutants_cDNA_P Parameter: Timepoint (hr) Value: 6
  misc_feature: MA Experiment 20000086 PARAMETER Experiment Name: At_100uM_ABA_Mutants_cDNA_P Parameter: Tissue Value: Aerial
  misc_feature: MA Experiment 20000086 PARAMETER Experiment Name: At_100uM_ABA_Mutants_cDNA_P Parameter: Treatment Value: 100uM ABA vs. No Treatment
  misc_feature: MA Experiment ID: 20000087 Result: Up-regulated in Transcription
  misc_feature: MA Experiment 20000087 PARAMETER Experiment Name: At_100uM_ABA_Mutants_cDNA_P Parameter: Plant Line Value: WS
  misc_feature: MA Experiment 20000087 PARAMETER Experiment Name: At_100uM_ABA_Mutants_cDNA_P Parameter: Timepoint (hr) Value: 6
  misc_feature: MA Experiment 20000087 PARAMETER Experiment Name: At_100uM_ABA_Mutants_cDNA_P Parameter: Tissue Value: Aerial
  misc_feature: MA Experiment 20000087 PARAMETER Experiment Name: At_100uM_ABA_Mutants_cDNA_P Parameter: Treatment Value: 100uM ABA vs. No Treatment
  misc_feature: MA Experiment ID: 20000088 Result: Up-regulated in Transcription
  misc_feature: MA Experiment 20000088 PARAMETER Experiment Name: At_100uM_ABA_Mutants_cDNA_P Parameter: Plant Line Value: Landsberg
  misc_feature: MA Experiment 20000088 PARAMETER Experiment Name: At_100uM_ABA_Mutants_cDNA_P Parameter: Timepoint (hr) Value: 6
  misc_feature: MA Experiment 20000088 PARAMETER Experiment Name: At_100uM_ABA_Mutants_cDNA_P Parameter: Tissue Value: Aerial
  misc_feature: MA Experiment 20000088 PARAMETER Experiment Name: At_100uM_ABA_Mutants_cDNA_P Parameter: Treatment Value: 100uM ABA vs. No Treatment
  misc_feature: MA Experiment ID: 20000117 Result: Up-regulated in Transcription
  misc_feature: MA Experiment 20000117 PARAMETER Experiment Name: At_100uM_ABA_Mutants_cDNA_P Parameter: Plant Line Value: Columbia
  misc_feature: MA Experiment 20000117 PARAMETER Experiment Name: At_100uM_ABA_Mutants_cDNA_P Parameter: Timepoint (hr) Value: 6
  misc_feature: MA Experiment 20000117 PARAMETER Experiment Name: At_100uM_ABA_Mutants_cDNA_P Parameter: Tissue Value: Aerial
  misc_feature: MA Experiment 20000117 PARAMETER Experiment Name: At_100uM_ABA_Mutants_cDNA_P Parameter: Treatment Value: 100uM ABA vs. No Treatment
  misc_feature: MA Experiment ID: 20000180 Result: Down-regulated in Transcription
  misc_feature: MA Experiment 20000180 PARAMETER Experiment Name: At_Germinating_Seeds_P Parameter: Age (hr) Value: 24 vs. 0
  misc_feature: MA Experiment 20000180 PARAMETER Experiment Name: At_Germinating_Seeds_P Parameter: Tissue Value: Germinating Seeds
  misc_feature: MA Experiment ID: 20000185 Result: Down-regulated in Transcription
  misc_feature: MA Experiment 20000185 PARAMETER Experiment Name: At_Roots__P Parameter: Age (day) Value: 7 vs. 21
  misc_feature: MA Experiment 20000185 PARAMETER Experiment Name: At_Roots__P Parameter: Organism Value: A. thaliana
  misc_feature: MA Experiment 20000185 PARAMETER Experiment Name: At_Roots__P Parameter: Tissue Value: Roots vs. Whole Plant
  misc_feature: MA Experiment ID: 20000264 Result: Up-regulated in Transcription
  misc_feature: MA Experiment 20000264 PARAMETER Experiment Name: At_Open_Flower_P Parameter: Age (day) Value: 21
  misc_feature: MA Experiment 20000264 PARAMETER Experiment Name: At_Open_Flower_P Parameter: Plant Line Value: WS
  misc_feature: MA Experiment 20000264 PARAMETER Experiment Name: At_Open_Flower_P Parameter: Tissue Value: Open Flower vs. Whole Plant
  misc_feature: MA Experiment ID: 20000438 Result: Down-regulated in Transcription
  misc_feature: MA Experiment 20000438 PARAMETER Experiment Name: At_Shoots__P Parameter: Age (day) Value: 14
  misc_feature: MA Experiment 20000438 PARAMETER Experiment Name: At_Shoots__P Parameter: Tissue Value: Shoots vs. Whole Plant
  misc_feature: MA Experiment ID: 20000439 Result: Down-regulated in Transcription
  misc_feature: MA Experiment 20000439 PARAMETER Experiment Name: At_Roots__P Parameter: Age (day) Value: 14 vs. 21
  misc_feature: MA Experiment 20000439 PARAMETER Experiment Name: At_Roots__P Parameter: Organism Value: A. thaliana
  misc_feature: MA Experiment 20000439 PARAMETER Experiment Name: At_Roots__P Parameter: Tissue Value: Roots vs. Whole Plant
  misc_feature: MA Experiment ID: 20000451 Result: Down-regulated in Transcription
  misc_feature: MA Experiment 20000451 PARAMETER Experiment Name: At_CS6879_Shoots-Roots_P Parameter: Age (day) Value: 14
  misc_feature: MA Experiment 20000451 PARAMETER Experiment Name: At_CS6879_Shoots-Roots_P Parameter: Organism Value: A. thaliana
  misc_feature: MA Experiment 20000451 PARAMETER Experiment Name: At_CS6879_Shoots-Roots_P Parameter: Plant Line Value: CS6879 vs. WS
  misc_feature: MA Experiment 20000451 PARAMETER Experiment Name: At_CS6879_Shoots-Roots_P Parameter: Tissue Value: Roots
  misc_feature: MA Experiment ID: 20000709 Result: Up-regulated in Transcription
  misc_feature: MA Experiment 20000709 PARAMETER Experiment Name: At_15mM_NH4NO3_L-to-H_P Parameter: Age (hr) Value: 14
  misc_feature: MA Experiment 20000709 PARAMETER Experiment Name: At_15mM_NH4NO3_L-to-H_P Parameter: Organism Value: A. thaliana
  misc_feature: MA Experiment 20000709 PARAMETER Experiment Name: At_15mM_NH4NO3_L-to-H_P Parameter: Plant Line Value: WS
  misc_feature: MA Experiment 20000709 PARAMETER Experiment Name: At_15mM_NH4NO3_L-to-H_P Parameter: Timepoint (hr) Value: 4
  misc_feature: MA Experiment 20000709 PARAMETER Experiment Name: At_15mM_NH4NO3_L-to-H_P Parameter: Tissue Value: Aerial
  misc_feature: MA Experiment 20000709 PARAMETER Experiment Name: At_15mM_NH4NO3_L-to-H_P Parameter: Treatment Value: 15mM NH4NO3 vs. 30mM Mannitol
  misc_feature: MA Experiment ID: 20000794 Result: Up-regulated in Transcription
  misc_feature: MA Experiment 20000794 PARAMETER Experiment Name: At_Petals_P Parameter: Age (day) Value: 23-25 days
  misc_feature: MA Experiment 20000794 PARAMETER Experiment Name: At_Petals_P Parameter: Plant Line Value: WS
  misc_feature: MA Experiment 20000794 PARAMETER Experiment Name: At_Petals_P Parameter: Tissue Value: Petals vs. Whole plant
  misc_feature: MA Experiment ID: 20001247 Result: Down-regulated in Transcription
  misc_feature: MA Experiment 20001247 PARAMETER Experiment Name: At_Far-red-induction_P Parameter: Age (day) Value: 7
  misc_feature: MA Experiment 20001247 PARAMETER Experiment Name: At_Far-red-induction_P Parameter: Light Value: Far-red vs. White
  misc_feature: MA Experiment 20001247 PARAMETER Experiment Name: At_Far-red-induction_P Parameter: Organism Value: A. thaliana
  misc_feature: MA Experiment 20001247 PARAMETER Experiment Name: At_Far-red-induction_P Parameter: Plant Line Value: Columbia
  misc_feature: MA Experiment 20001247 PARAMETER Experiment Name: At_Far-red-induction_P Parameter: Timepoint (hr) Value: 1
  misc_feature: MA Experiment 20001247 PARAMETER Experiment Name: At_Far-red-induction_P Parameter: Tissue Value: Whole Plant
  misc_feature: MA Experiment ID: 20001248 Result: Up-regulated in Transcription
  misc_feature: MA Experiment 20001248 PARAMETER Experiment Name: At_Far-red-induction_P Parameter: Age (day) Value: 7
  misc_feature: MA Experiment 20001248 PARAMETER Experiment Name: At_Far-red-induction_P Parameter: Light Value: Far-red vs. White
  misc_feature: MA Experiment 20001248 PARAMETER Experiment Name: At_Far-red-induction_P Parameter: Organism Value: A. thaliana
  misc_feature: MA Experiment 20001248 PARAMETER Experiment Name: At_Far-red-induction_P Parameter: Plant Line Value: Columbia
  misc_feature: MA Experiment 20001248 PARAMETER Experiment Name: At_Far-red-induction_P Parameter: Timepoint (hr) Value: 4
  misc_feature: MA Experiment 20001248 PARAMETER Experiment Name: At_Far-red-induction_P Parameter: Tissue Value: Whole Plant
  misc_feature: MA Experiment ID: 20001557 Result: Up-regulated in Transcription
  misc_feature: MA Experiment 20001557 PARAMETER Experiment Name: At_Drought_Soil_Dry_P Parameter: Age (day) Value: 27
  misc_feature: MA Experiment 20001557 PARAMETER Experiment Name: At_Drought_Soil_Dry_P Parameter: Organism Value: A. thaliana
  misc_feature: MA Experiment 20001557 PARAMETER Experiment Name: At_Drought_Soil_Dry_P Parameter: Plant Line Value: WS
  misc_feature: MA Experiment 20001557 PARAMETER Experiment Name: At_Drought_Soil_Dry_P Parameter: Post Timepoint (hr) Value: 3
  misc_feature: MA Experiment 20001557 PARAMETER Experiment Name: At_Drought_Soil_Dry_P Parameter: Post-Treatment Value: Re-Water vs. No Drought
  misc_feature: MA Experiment 20001557 PARAMETER Experiment Name: At_Drought_Soil_Dry_P Parameter: Timepoint (day) Value: 13
  misc_feature: MA Experiment 20001557 PARAMETER Experiment Name: At_Drought_Soil_Dry_P Parameter: Treatment Value: Drought vs. No Drought
  misc_feature: MA Experiment ID: 20001910 Result: Up-regulated in Transcription
  misc_feature: MA Experiment 20001910 PARAMETER Experiment Name: At_Drought_Reproduction_P Parameter: Age (day) Value: 37
  misc_feature: MA Experiment 20001910 PARAMETER Experiment Name: At_Drought_Reproduction_P Parameter: Organism Value: A. thaliana
  misc_feature: MA Experiment 20001910 PARAMETER Experiment Name: At_Drought_Reproduction_P Parameter: Plant Line Value: WS
  misc_feature: MA Experiment 20001910 PARAMETER Experiment Name: At_Drought_Reproduction_P Parameter: Timepoint (day) Value: 7
  misc_feature: MA Experiment 20001910 PARAMETER Experiment Name: At_Drought_Reproduction_P Parameter: Tissue Value: Flowers
  misc_feature: MA Experiment 20001910 PARAMETER Experiment Name: At_Drought_Reproduction_P Parameter: Treatment Value: Drought vs. No Drought
aacatcaccacaaaagtccaagctttctctctcctcaacctcgtccccttgcttcttctcctcctgctctgtctcgtttcttctcttctacttcggagatgtctgcttctgattccacttcttctcttcccgttactcttgactccatcaatcccaaggttctgaaatgtgagtatgctgttcgaggagaaattgtcaacattgctcagaagttacaagaagacttgaagactaataaggatgcttatccctttgatgagataatctattgcaacattgggaatcctcaatctcttggtcagctgcctataaagttcttccgtgaggttctcgcattgtgtgaccacgcaagtcttttggatgagtctgaaacccatggtttgttcagtaccgattcaattgaccgagcatggaggattttggaccatattcccggaagagcaactggggcttacagtcatagccagggtatcaagggtttacgtgatgtaattgcagctggaatcgaagcacgtgatggtttccctgctgatccaaatgatattttcttgactgatggtgcaagtccagcggttcacatgatgatgcaacttctcttgagctcagagaaagatggtattctttccccgattcctcagtatccattgtactcggcttcaattgcccttcatggtggatctttggttccgtactatcttgatgaagcaacaggatggggactggaaatatctgaccttaagaagcaactagaggaagctaggtccaagggcatctctgtaagggccttggttgtcataaaccccggtaacccaactgggcaggttcttgcggaagaaaaccagcgtgacattgttaatttctgcaagcaagagggtttggttcttttagctgatgaagtctaccaagaaaatgtttacgtccctgacaaaaagttccattctttcaagaaagtggctcggtctttgggctatggagaaaaagatatctcgttagtctcgttccaatcagtctccaaaggatattatggagaatgtggaaaaagaggaggttacatggaggttactggattcacttctgatgtaagagaacagatatacaaaatggcttctgtgaatctttgttctaacatctctggtcaaattcttgctagccttgtcatgagcccacccaagaaagagatggaattctctcatccatggctaaacgtgcaaagactttggaagacgctctcaacagtttagaaggtgttacatgtaacagagccgaaggagcaatgtatctcttcccgcgaattaaccttcctcaaaaggctatcgaagctgctgaggctgaaaaaactgcaccagatgcgttctactgcaaacgccttctcaatgctactggtgtagttgtagtccctggttctggctttggacaggttcctggaacatggcactttagatgcacaatacttccacaagaagacaagattccagcgatagtgaatcgtctgacagagttccacaagagcttcatggacgagttccgcaactaaaaggacctgaccatgaagatgaacttaaagacccttttgaagaaaagtgtgatcagtttgagttattaaaaaaaagaaaacttgtgttttgaatttgatcaggcaattgtgatcagctaatttaattttagaatattttg

SEQ ID NO: 73216 - protein, 412 aa, Arabidopsis thaliana
  peptide (1)..(412): Ceres Seq. ID no. 4960841
  misc_feature (172)..(390): Pfam Name: Aminotransferase class I and II Pfam Description: Aminotransferase class I and II
  misc_feature (1)..(390): Homolog of NCBI NO: 30698866 NR Description: alanine aminotransferase, putative [Arabidopsis >gi|25287211|pir||B96747 probable alanine aminotransferase
  misc_feature (1)..(390): Homolog of NCBI NO: 21954069 NR Description: putative alanine aminotransferase [Arabidopsis
  misc_feature (1)..(390): Homolog of NCBI NO: 9082270 NR Description: alanine aminotransferase [Arabidopsis thaliana]
  misc_feature (1)..(390): Homolog of NCBI NO: 21954071 NR Description: putative alanine aminotransferase [Arabidopsis
  misc_feature (53)..(390): Homolog of NCBI NO: 25287212 NR Description: hypothetical protein T13M22.3 [imported] - thaliana >gi|8778976|gb|AAF79891.1|AC026479_3 Strong similarity alanine aminotransferase from Zea mays gb|AF055898. It contains
  misc_feature (33)..(390): Homolog of NCBI NO: 34906732 NR Description: alanine aminotransferase [Oryza sativa (japonica
  misc_feature (44)..(390): Homolog of NCBI NO: 461498 NR Description: ALANINE AMINOTRANSFERASE 2 (GPT)
  misc_feature (44)..(394): Homolog of NCBI NO: 1703227 NR Description: ALANINE AMINOTRANSFERASE 2 (GPT)
  misc_feature (44)..(390): Homolog of NCBI NO: 4730884 NR Description: alanine aminotransferase [Oryza sativa]
  misc_feature (44)..(390): Homolog of NCBI NO: 37533928 NR Description: putative alanine aminotransferase [Oryza sativa
HHHKSPSFLSPQPRPLASSPPALSRFFSSTSEMSASDSTSSLPVTLDSINPKVLKCEYAVRGEIVNIAQKLQEDLKTNKDAYPFDEIIYCNIGNPQSLGQLPIKFFREVLALCDHASLLDESETHGLFSTDSIDRAWRILDHIPGRATGAYSHSQGIKGLRDVIAAGIEARDGFPADPNDIFLTDGASPAVHMMMQLLLSSEKDGILSPIPQYPLYSASIALHGGSLVPYYLDEATGWGLEISDLKKQLEEARSKGISVRALVVINPGNPTGQVLAEENQRDIVNFCKQEGLVLLADEVYQENVYVPDKKFHSFKKVARSLGYGEKDISLVSFQSVSKGYYGECGKRGGYMEVTGFTSDVREQIYKMASVNLCSNISGQILASLVMSPPKKEMEFSHPWLNVQRLWKTLSTV

SEQ ID NO: 73217 - protein, 380 aa, Arabidopsis thaliana
  peptide (1)..(380): Ceres Seq. ID no. 4960842
  misc_feature (140)..(358): Pfam Name: Aminotransferase class I and II Pfam Description: Aminotransferase class I and II
  misc_feature (1)..(358): Homolog of NCBI NO: 30698866 NR Description: alanine aminotransferase, putative [Arabidopsis >gi|25287211|pir||B96747 probable alanine aminotransferase
  misc_feature (1)..(358): Homolog of NCBI NO: 21954069 NR Description: putative alanine aminotransferase [Arabidopsis
  misc_feature (1)..(358): Homolog of NCBI NO: 9082270 NR Description: alanine aminotransferase [Arabidopsis thaliana]
  misc_feature (1)..(358): Homolog of NCBI NO: 21954071 NR Description: putative alanine aminotransferase [Arabidopsis
  misc_feature (21)..(358): Homolog of NCBI NO: 25287212 NR Description: hypothetical protein T13M22.3 [imported] - thaliana >gi|8778976|gb|AAF79891.1|AC026479_3 Strong similarity alanine aminotransferase from Zea mays gb|AF055898. It contains
  misc_feature (1)..(358): Homolog of NCBI NO: 34906732 NR Description: alanine aminotransferase [Oryza sativa (japonica
  misc_feature (12)..(358): Homolog of NCBI NO: 461498 NR Description: ALANINE AMINOTRANSFERASE 2 (GPT)
  misc_feature (12)..(362): Homolog of NCBI NO: 1703227 NR Description: ALANINE AMINOTRANSFERASE 2 (GPT)
  misc_feature (12)..(358): Homolog of NCBI NO: 4730884 NR Description: alanine aminotransferase [Oryza sativa]
  misc_feature (12)..(358): Homolog of NCBI NO: 37533928 NR Description: putative alanine aminotransferase [Oryza sativa
MSASDSTSSLPVTLDSINPKVLKCEYAVRGEIVNIAQKLQEDLKTNKDAYPFDEIIYCNIGNPQSLGQLPIKFFREVLALCDHASLLDESETHGLFSTDSIDRAWRILDHIPGRATGAYSHSQGIKGLRDVIAAGIEARDGFPADPNDIFLTDGASPAVHMMMQLLLSSEKDGILSPIPQYPLYSASIALHGGSLVPYYLDEATGWGLEISDLKKQLEEARSKGISVRALVVINPGNPTGQVLAEENQRDIVNFCKQEGLVLLADEVYQENVYVPDKKFHSFKKVARSLGYGEKDISLVSFQSVSKGYYGECGKRGGYMEVTGFTSDVREQIYKMASVNLCSNISGQILASLVMSPPKKEMEFSHPWLNVQRLWKTLSTV

SEQ ID NO: 73218 - protein, 220 aa, Arabidopsis thaliana
  peptide (1)..(220): Ceres Seq. ID no. 4960843
  misc_feature (1)..(198): Pfam Name: Aminotransferase class I and II Pfam Description: Aminotransferase class I and II
  misc_feature (1)..(198): Homolog of NCBI NO: 30698866 NR Description: alanine aminotransferase, putative [Arabidopsis >gi|25287211|pir||B96747 probable alanine aminotransferase
  misc_feature (1)..(198): Homolog of NCBI NO: 21954069 NR Description: putative alanine aminotransferase [Arabidopsis
  misc_feature (1)..(198): Homolog of NCBI NO: 9082270 NR Description: alanine aminotransferase [Arabidopsis thaliana]
  misc_feature (1)..(198): Homolog of NCBI NO: 21954071 NR Description: putative alanine aminotransferase [Arabidopsis
  misc_feature (1)..(198): Homolog of NCBI NO: 25287212 NR Description: hypothetical protein T13M22.3 [imported] - thaliana >gi|8778976|gb|AAF79891.1|AC026479_3 Strong similarity alanine aminotransferase from Zea mays gb|AF055898. It contains
  misc_feature (1)..(198): Homolog of NCBI NO: 34906732 NR Description: alanine aminotransferase [Oryza sativa (japonica
  misc_feature (1)..(198): Homolog of NCBI NO: 461498 NR Description: ALANINE AMINOTRANSFERASE 2 (GPT)
  misc_feature (1)..(202): Homolog of NCBI NO: 1703227 NR Description: ALANINE AMINOTRANSFERASE 2 (GPT)
  misc_feature (1)..(198): Homolog of NCBI NO: 4730884 NR Description: alanine aminotransferase [Oryza sativa]
  misc_feature (1)..(198): Homolog of NCBI NO: 37533928 NR Description: putative alanine aminotransferase [Oryza sativa
MMMQLLLSSEKDGILSPIPQYPLYSASIALHGGSLVPYYLDEATGWGLEISDLKKQLEEARSKGISVRALVVINPGNPTGQVLAEENQRDIVNFCKQEGLVLLADEVYQENVYVPDKKFHSFKKVARSLGYGEKDISLVSFQSVSKGYYGECGKRGGYMEVTGFTSDVREQIYKMASVNLCSNISGQILASLVMSPPKKEMEFSHPWLNVQRLWKTLSTV

SEQ ID NO: 73219 - DNA, 2073 bp, Arabidopsis thaliana
  misc_feature (1)..(2073): Ceres Seq. ID no. 4961339
  misc_feature: MA Experiment ID: 20000315 Result: Down-regulated in Transcription
  misc_feature: MA Experiment 20000315 PARAMETER Experiment Name: At_14day_Shoots-Roots_Sub_P Parameter: Age (day) Value: 14
  misc_feature: MA Experiment 20000315 PARAMETER Experiment Name: At_14day_Shoots-Roots_Sub_P Parameter: Organism Value: A. thaliana
  misc_feature: MA Experiment 20000315 PARAMETER Experiment Name: At_14day_Shoots-Roots_Sub_P Parameter: Plant Line Value: WS
  misc_feature: MA Experiment 20000315 PARAMETER Experiment Name: At_14day_Shoots-Roots_Sub_P Parameter: Tissue Value: Shoots vs. Whole Plant
  misc_feature: MA Experiment ID: 20000327 Result: Down-regulated in Transcription
  misc_feature: MA Experiment 20000327 PARAMETER Experiment Name: At_42deg_Heat_Sub_P Parameter: Age (day) Value: 14
  misc_feature: MA Experiment 20000327 PARAMETER Experiment Name: At_42deg_Heat_Sub_P Parameter: Organism Value: A. thaliana
  misc_feature: MA Experiment 20000327 PARAMETER Experiment Name: At_42deg_Heat_Sub_P Parameter: Plant Line Value: WS
  misc_feature: MA Experiment 20000327 PARAMETER Experiment Name: At_42deg_Heat_Sub_P Parameter: Temperature (deg C) Value: 42 vs. 22
  misc_feature: MA Experiment 20000327 PARAMETER Experiment Name: At_42deg_Heat_Sub_P Parameter: Timepoint (hr) Value: 1
  misc_feature: MA Experiment 20000327 PARAMETER Experiment Name: At_42deg_Heat_Sub_P Parameter: Tissue Value: Aerial
  misc_feature: MA Experiment ID: 20000328 Result: Down-regulated in Transcription
  misc_feature: MA Experiment 20000328 PARAMETER Experiment Name: At_42deg_Heat_Sub_P Parameter: Age (day) Value: 14
  misc_feature: MA Experiment 20000328 PARAMETER Experiment Name: At_42deg_Heat_Sub_P Parameter: Organism Value: A. thaliana
  misc_feature: MA Experiment 20000328 PARAMETER Experiment Name: At_42deg_Heat_Sub_P Parameter: Plant Line Value: WS
  misc_feature: MA Experiment 20000328 PARAMETER Experiment Name: At_42deg_Heat_Sub_P Parameter: Temperature (deg C) Value: 42 vs. 22
  misc_feature: MA Experiment 20000328 PARAMETER Experiment Name: At_42deg_Heat_Sub_P Parameter: Timepoint (hr) Value: 6
  misc_feature: MA Experiment 20000328 PARAMETER Experiment Name: At_42deg_Heat_Sub_P Parameter: Tissue Value: Aerial
  misc_feature: MA Experiment ID: 20000332 Result: Down-regulated in Transcription
  misc_feature: MA Experiment 20000332 PARAMETER Experiment Name: At_4deg_Cold_Sub_P Parameter: Age (day) Value: 14
  misc_feature: MA Experiment 20000332 PARAMETER Experiment Name: At_4deg_Cold_Sub_P Parameter: Organism Value: A. thaliana
  misc_feature: MA Experiment 20000332 PARAMETER Experiment Name: At_4deg_Cold_Sub_P Parameter: Plant Line Value: WS
  misc_feature: MA Experiment 20000332 PARAMETER Experiment Name: At_4deg_Cold_Sub_P Parameter: Temperature (deg C) Value: 4 vs. 22
  misc_feature: MA Experiment 20000332 PARAMETER Experiment Name: At_4deg_Cold_Sub_P Parameter: Timepoint (hr) Value: 2
  misc_feature: MA Experiment 20000332 PARAMETER Experiment Name: At_4deg_Cold_Sub_P Parameter: Tissue Value: Aerial
  misc_feature: MA Experiment ID: 20000440 Result: Down-regulated in Transcription
  misc_feature: MA Experiment 20000440 PARAMETER Experiment Name: At_Closed-Flower__Sub_P Parameter: Tissue Value: Closed Flower vs. Whole Plant
  misc_feature: Pfam Name: Pkinase Pfam Description: Protein kinase domain
atggctcatgagcagcaacacctccaaatagtaattcttcaagctcttgtaacagaacctttggaggaatctcaatcccgttcccatttggaatcggcgggaaggattgctatctcaatagttggtacgaggttgtctgtaacagcaccacttccgggtcctgcaaaactgatcaacagggaagtggtgaacatatctcttccaaaatctgacttcttcagcccttacggagtagttcacatcaaaggtcctgtgacttcgttgggttgttctagtaatattagtcaaggacttcaaaaaacactaccagatttgaacatcacaggcaggggtagtccatattttctaacagatgagaaccgccttgtggcggttggttgtggtacgaaggcgttaatgaccgatatagaatcggagatcttaggttgtgaatcaagctgcaaagacacaaagagtaatgaagtaggtaactcgctttgtaacggttacaaatgttgccaagcgaggttacccgtagagcgtccgcaagcagtaggtgtcaacatagagagcaataacgatacaagaggagaagggtgcaaagctgcgttcttgacaagtatgaagtatttcccgtcaaatatcaccaaaccagaatggttccaggccgatggctacgctgtagtagaactaggatggtattttgatacttcagattctcgctttaggaaccctttgggttgcacaaacttgacccgttctagtggctcttacttcttaaccgacatttgcctttgccgttacggttacttttccagaatgagttatagaagctgttattgcggcagtggctacagaggaaacccatacatacgaggtggatgcatcgacattgatgaatgcgaagtacccaacaagtgtggagaagacacttgtgtgaacatggctggaaggtacagttgcgtgccaaagataaccaagcctgccaaactcgctcatgtgcttcgagggatttttgggttatacaaatttatcagaaagcgaaggcggatcatccgtagcatgaagttcttcaaacgtaatggaggcctattgttgaaacaacagttaacaacaaaggacggcagtgtcgagatgtcaaaaatattcagctcgagagagttggagaaagccactgataacttcagcatagatagagtgcttgggcaaggcggtcaaggcactgtgtacaaaagaatgcttgtagatgggagtattgttgcggttaaaagatccaaagttgtggatgaagacaaaatggaagagtttatcaatgagattgttcttctgtcacaaatcaatcaccgcaacattgtgaaactcttgggatgttgcttggagacagaagttccaatcttggtgtacgaatatattcccaatggagatctgttcaagcggcttcatgatgaatatgatgattacatgatgacttgggaagtgcgacttcgcatagccgtagagatagcaggagctctttcgtacatgcactcagctgcatcttttccaatattccatagagatatcaaaactaccaatatactgttggatgagaaatacagagcaaaaatatctgatttcggaacttcaagatcggtagcgactgatcaaactcacttaacaacattagttgcaggaacttttgggtacatggatccagagtacttcctgtcgagccaatacactcacaaaagcgatgtatatagtttcggtgttgtgttggtggagctcataacgggagaaaaaccaatgtcacgtgtccggtctgaagaaggcataggtttggcaacttatttcctcgaggcaatgaaagagaacagagctgttgacataattgatattaggatcaaagacgaaagcaagcaagtaatggcggtagcaaaactcgccagaagatgtcttaatcgaaaagggaataagcggccaaacatgagagaggtttcaataaagctagagaggatccgttcatcacccaaagatttagatgtccataccgaaaacgaagaagaagaagaagaggatcaacttatggaaatcaatagaatatatgattcttga

SEQ ID NO: 73220 - protein, 690 aa, Arabidopsis thaliana
  peptide (1)..(690): Ceres Seq. ID no. 4961340
  misc_feature: Pfam Name: Pkinase Pfam Description: Protein kinase domain
  misc_feature (58)..(686): Homolog of NCBI NO: 15219143 NR Description: WAK-like kinase (WLK); protein id: At1g16160.1
  misc_feature (46)..(685): Homolog of NCBI NO: 15219132 NR Description: WAK-like kinase (WLK); protein id: At1g16120.1
  misc_feature (330)..(685): Homolog of NCBI NO: 15219140 NR Description: WAK-like kinase (WLK); protein id: At1g16150.1
  misc_feature (46)..(330): Homolog of NCBI NO: 15219140 NR Description: WAK-like kinase (WLK); protein id: At1g16150.1
  misc_feature (58)..(685): Homolog of NCBI NO: 15219445 NR Description: WAK-like kinase (WLK); protein id: At1g79670.1, by cDNA: gi_19310446 [Arabidopsis thaliana]
  misc_feature (58)..(593): Homolog of NCBI NO: 15219130 NR Description: WAK-like kinase (WLK); protein id: At1g16110.1
  misc_feature (58)..(593): Homolog of NCBI NO: 25518691 NR Description: hypothetical protein T24D18.19 - Arabidopsis >gi|6587815|gb|AAF18506.1|AC010924_19 Similar to gb|U44028 thaliana transcription factor CKC and contains a PF|00069
  misc_feature (58)..(593): Homolog of NCBI NO: 26451262 NR Description: unknown protein [Arabidopsis thaliana]
  misc_feature (324)..(685): Homolog of NCBI NO: 25405037 NR Description: protein F20B17.10 [imported] - Arabidopsis >gi|7715604|gb|AAF68122.1|AC010793_17 F20B17.10 [Arabidopsis
  misc_feature (58)..(359): Homolog of NCBI NO: 25405037 NR Description: protein F20B17.10 [imported] - Arabidopsis >gi|7715604|gb|AAF68122.1|AC010793_17 F20B17.10 [Arabidopsis
MAHEQQHLQIVILQALVTEPLEESQSRSHLESAGRIAISIVGTRLSVTAPLPGPAKLINREVVNISLPKSDFFSPYGVVHIKGPVTSLGCSSNISQGLQKTLPDLNITGRGSPYFLTDENRLVAVGCGTKALMTDIESEILGCESSCKDTKSNEVGNSLCNGYKCCQARLPVERPQAVGVNIESNNDTRGEGCKAAFLTSMKYFPSNITKPEWFQADGYAVVELGWYFDTSDSRFRNPLGCTNLTRSSGSYFLTDICLCRYGYFSRMSYRSCYCGSGYRGNPYIRGGCIDIDECEVPNKCGEDTCVNMAGRYSCVPKITKPAKLAHVLRGIFGLYKFIRKRRRIIRSMKFFKRNGGLLLKQQLTTKDGSVEMSKIFSSRELEKATDNFSIDRVLGQGGQGTVYKRMLVDGSIVAVKRSKVVDEDKMEEFINEIVLLSQINHRNIVKLLGCCLETEVPILVYEYIPNGDLFKRLHDEYDDYMMTWEVRLRIAVEIAGALSYMHSAASFPIFHRDIKTTNILLDEKYRAKISDFGTSRSVATDQTHLTTLVAGTFGYMDPEYFLSSQYTHKSDVYSFGVVLVELITGEKPMSRVRSEEGIGLATYFLEAMKENRAVDIIDIRIKDESKQVMAVAKLARRCLNRKGNKRPNMREVSIKLERIRSSPKDLDVHTENEEEEEEDQLMEINRIYDS

SEQ ID NO: 73221 - protein, 558 aa, Arabidopsis thaliana
  peptide (1)..(558): Ceres Seq. ID no. 4961341
  misc_feature: Pfam Name: Pkinase Pfam Description: Protein kinase domain
  misc_feature (1)..(554): Homolog of NCBI NO: 15219143 NR Description: WAK-like kinase (WLK); protein id: At1g16160.1
  misc_feature (1)..(553): Homolog of NCBI NO: 15219132 NR Description: WAK-like kinase (WLK); protein id: At1g16120.1
  misc_feature (198)..(553): Homolog of NCBI NO: 15219140 NR Description: WAK-like kinase (WLK); protein id: At1g16150.1
  misc_feature (1)..(198): Homolog of NCBI NO: 15219140 NR Description: WAK-like kinase (WLK); protein id: At1g16150.1
  misc_feature (1)..(553): Homolog of NCBI NO: 15219445 NR Description: WAK-like kinase (WLK); protein id: At1g79670.1, by cDNA: gi_19310446 [Arabidopsis thaliana]
  misc_feature (1)..(461): Homolog of NCBI NO: 15219130 NR Description: WAK-like kinase (WLK); protein id: At1g16110.1
  misc_feature (1)..(461): Homolog of NCBI NO: 25518691 NR Description: hypothetical protein T24D18.19 - Arabidopsis >gi|6587815|gb|AAF18506.1|AC010924_19 Similar to gb|U44028 thaliana transcription factor CKC and contains a PF|00069
  misc_feature (1)..(461): Homolog of NCBI NO: 26451262 NR Description: unknown protein [Arabidopsis thaliana]
  misc_feature (192)..(553): Homolog of NCBI NO: 25405037 NR Description: protein F20B17.10 [imported] - Arabidopsis >gi|7715604|gb|AAF68122.1|AC010793_17 F20B17.10 [Arabidopsis
  misc_feature (1)..(227): Homolog of NCBI NO: 25405037 NR Description: protein F20B17.10 [imported] - Arabidopsis >gi|7715604|gb|AAF68122.1|AC010793_17 F20B17.10 [Arabidopsis
MTDIESEILGCESSCKDTKSNEVGNSLCNGYKCCQARLPVERPQAVGVNIESNNDTRGEGCKAAFLTSMKYFPSNITKPEWFQADGYAVVELGWYFDTSDSRFRNPLGCTNLTRSSGSYFLTDICLCRYGYFSRMSYRSCYCGSGYRGNPYIRGGCIDIDECEVPNKCGEDTCVNMAGRYSCVPKITKPAKLAHVLRGIFGLYKFIRKRRRIIRSMKFFKRNGGLLLKQQLTTKDGSVEMSKIFSSRELEKATDNFSIDRVLGQGGQGTVYKRMLVDGSIVAVKRSKVVDEDKMEEFINEIVLLSQINHRNIVKLLGCCLETEVPILVYEYIPNGDLFKRLHDEYDDYMMTWEVRLRIAVEIAGALSYMHSAASFPIFHRDIKTTNILLDEKYRAKISDFGTSRSVATDQTHLTTLVAGTFGYMDPEYFLSSQYTHKSDVYSFGVVLVELITGEKPMSRVRSEEGIGLATYFLEAMKENRAVDIIDIRIKDESKQVMAVAKLARRCLNRKGNKRPNMREVSIKLERIRSSPKDLDVHTENEEEEEEDQLMEINRIYDS

SEQ ID NO: 73222 - protein, 490 aa, Arabidopsis thaliana
  peptide (1)..(490): Ceres Seq. ID no. 4961342
  misc_feature: Pfam Name: Pkinase Pfam Description: Protein kinase domain
  misc_feature (1)..(486): Homolog of NCBI NO: 15219143 NR Description: WAK-like kinase (WLK); protein id: At1g16160.1
  misc_feature (1)..(485): Homolog of NCBI NO: 15219132 NR Description: WAK-like kinase (WLK); protein id: At1g16120.1
  misc_feature (130)..(485): Homolog of NCBI NO: 15219140 NR Description: WAK-like kinase (WLK); protein id: At1g16150.1
  misc_feature (1)..(130): Homolog of NCBI NO: 15219140 NR Description: WAK-like kinase (WLK); protein id: At1g16150.1
  misc_feature (1)..(485): Homolog of NCBI NO: 15219445 NR Description: WAK-like kinase (WLK); protein id: At1g79670.1, by cDNA: gi_19310446 [Arabidopsis thaliana]
  misc_feature (1)..(393): Homolog of NCBI NO: 15219130 NR Description: WAK-like kinase (WLK); protein id: At1g16110.1
  misc_feature (1)..(393): Homolog of NCBI NO: 25518691 NR Description: hypothetical protein T24D18.19 - Arabidopsis >gi|6587815|gb|AAF18506.1|AC010924_19 Similar to gb|U44028 thaliana transcription factor CKC and contains a PF|00069
  misc_feature (1)..(393): Homolog of NCBI NO: 26451262 NR Description: unknown protein [Arabidopsis thaliana]
  misc_feature (124)..(485): Homolog of NCBI NO: 25405037 NR Description: protein F20B17.10 [imported] - Arabidopsis >gi|7715604|gb|AAF68122.1|AC010793_17 F20B17.10 [Arabidopsis
  misc_feature (1)..(159): Homolog of NCBI NO: 25405037 NR Description: protein F20B17.10 [imported] - Arabidopsis >gi|7715604|gb|AAF68122.1|AC010793_17 F20B17.10 [Arabidopsis
MKYFPSNITKPEWFQADGYAVVELGWYFDTSDSRFRNPLGCTNLTRSSGSYFLTDICLCRYGYFSRMSYRSCYCGSGYRGNPYIRGGCIDIDECEVPNKCGEDTCVNMAGRYSCVPKITKPAKLAHVLRGIFGLYKFIRKRRRIIRSMKFFKRNGGLLLKQQLTTKDGSVEMSKIFSSRELEKATDNFSIDRVLGQGGQGTVYKRMLVDGSIVAVKRSKVVDEDKMEEFINEIVLLSQINHRNIVKLLGCCLETEVPILVYEYIPNGDLFKRLHDEYDDYMMTWEVRLRIAVEIAGALSYMHSAASFPIFHRDIKTTNILLDEKYRAKISDFGTSRSVATDQTHLTTLVAGTFGYMDPEYFLSSQYTHKSDVYSFGVVLVELITGEKPMSRVRSEEGIGLATYFLEAMKENRAVDIIDIRIKDESKQVMAVAKLARRCLNRKGNKRPNMREVSIKLERIRSSPKDLDVHTENEEEEEEDQLMEINRIYDS

SEQ ID NO: 73223 - DNA, 1518 bp, Arabidopsis thaliana
  misc_feature (1)..(1518): Ceres Seq. ID no. 4961402
  misc_feature: MA Experiment ID: 20000184 Result: Down-regulated in Transcription
  misc_feature: MA Experiment 20000184 PARAMETER Experiment Name: At_Shoots__P Parameter: Age (day) Value: 7
  misc_feature: MA Experiment 20000184 PARAMETER Experiment Name: At_Shoots__P Parameter: Tissue Value: Shoots vs. Whole Plant
  misc_feature: MA Experiment ID: 20000185 Result: Up-regulated in Transcription
  misc_feature: MA Experiment 20000185 PARAMETER Experiment Name: At_Roots__P Parameter: Age (day) Value: 7 vs. 21
  misc_feature: MA Experiment 20000185 PARAMETER Experiment Name: At_Roots__P Parameter: Organism Value: A. thaliana
  misc_feature: MA Experiment 20000185 PARAMETER Experiment Name: At_Roots__P Parameter: Tissue Value: Roots vs. Whole Plant
  misc_feature: MA Experiment ID: 20000227 Result: Down-regulated in Transcription
  misc_feature: MA Experiment 20000227 PARAMETER Experiment Name: At_Root-Tips-vs-Tops_P Parameter: Tissue Value: Root Tips vs. Root Tops
  misc_feature: MA Experiment ID: 20000439 Result: Up-regulated in Transcription
  misc_feature: MA Experiment 20000439 PARAMETER Experiment Name: At_Roots__P Parameter: Age (day) Value: 14 vs. 21
  misc_feature: MA Experiment 20000439 PARAMETER Experiment Name: At_Roots__P Parameter: Organism Value: A. thaliana
  misc_feature: MA Experiment 20000439 PARAMETER Experiment Name: At_Roots__P Parameter: Tissue Value: Roots vs. Whole Plant
  misc_feature: MA Experiment ID: 20000794 Result: Up-regulated in Transcription
  misc_feature: MA Experiment 20000794 PARAMETER Experiment Name: At_Petals_P Parameter: Age (day) Value: 23-25 days
  misc_feature: MA Experiment 20000794 PARAMETER Experiment Name: At_Petals_P Parameter: Plant Line Value: WS
  misc_feature: MA Experiment 20000794 PARAMETER Experiment Name: At_Petals_P Parameter: Tissue Value: Petals vs. Whole plant
atggaggatattgggttggttaagcaaggttggaaatggatgcaatctcagaaacatatgtgctccgatgcttgttctgcgatgcgatgctttggggagatgataggagggcttgtggagcgtcactggccattgggagctgctgcagctgttgttctgaacttgggttgcactcctgggctctttatcgtaggactatttggaattttgattttatggatgtatgcaaacttttggatcactggaacattgtttatagtcggaggctatttattctccttaaatcatgctcgcgtggtggttcttgtggcgggcttatatgcgatgtattgtgtcaaagtcagacttggatggcttggtcttttcctctcaataaatcttgctttcttgtccaacgatatattaaattgtcttcttcaatggtgtgacaatctaagtgaaaaaccacaacacgaggaaccaaagaaaccgaaagaaacaatcatagaagaagactattcaagggaatttgagtatccttcagttcctgtcgaagatgaaaccgagacaaagattcacgagaataagtcttctgctaaaccaactgcgccttctactgttgttaataccgtaaaggaaatttctagtgttaaaatagtcaaaatagaagagtcaagttcagctgatgaaatgaagagaatactgaatagtttgaatcattatgaagcattgggggtccctcggcataaaaagatcgatgctgcggtgcttaagaaagagtataggaagaaggcaatgttggttcatcctgataaaaatatggggagtccattggcaagtgaatcattcaagaaacttcaaagtgcttacgaggttctatctgatttcgtaaagaagagagattacgatgagcaactacgaaaagaagaatctaggactaggagtgtttgtcagacatctcatgcttcttcgcatcagatgagtcaaggcggatacactgtacaaaatgtggtaattcacacatatggatatgtaccaataggacaaaagcaaaggcaagatggtgccaggattgtggccaatatcatcaagcaaaagatggagatggatgggtcgaactcaaagggacattacccttcgagagagcacataagtatcctcagctcaatcactttctttttcatgtccattaagattgaaataccgcgtgcttttgtttgcgcggagagcaaaatatttgacgtctcagaatgggccatttgtcagggaatggcttgtagaccaaacacgcatagaccaagctttcatgtgaacatggttgggttagaaaagacaacacagagatcaaactcaagtaggttcccatgggatctagatgtggagatgatggatgaggacgaagaagagtttgagctatggcttcaacaagctcttgcttcaggtctcttctgcgaaacctcaaaacgtagaaaaagctggagccctttcaagttgggccagatgaaaagcaagaaacagtggcgaagaacttccacttga

SEQ ID NO: 73224 - protein, 505 aa, Arabidopsis thaliana
  peptide (1)..(505): Ceres Seq. ID no. 4961403
  misc_feature (232)..(299): Pfam Name: DnaJ domain Pfam Description: DnaJ domain
  misc_feature (45)..(319): Homolog of NCBI NO: 7487909 NR Description: hypothetical protein YUP8H12R.35 - Arabidopsis >gi|3152572|gb|AAC17053.1| Contains homology to DNAJ heatshock
  misc_feature (391)..(505): Homolog of NCBI NO: 7487909 NR Description: hypothetical protein YUP8H12R.35 - Arabidopsis >gi|3152572|gb|AAC17053.1| Contains homology to DNAJ heatshock
  misc_feature (1)..(45): Homolog of NCBI NO: 7487909 NR Description: hypothetical protein YUP8H12R.35 - Arabidopsis >gi|3152572|gb|AAC17053.1| Contains homology to DNAJ heatshock
  misc_feature (1)..(415): Homolog of NCBI NO: 30699386 NR Description: S-locus protein, putative [Arabidopsis thaliana]
  misc_feature (106)..(505): Homolog of NCBI NO: 25518299 NR Description: hypothetical protein F19K19.3 - Arabidopsis >gi|9989051|gb|AAG10814.1|AC011808_2 Similar to DNAJ proteins
  misc_feature (38)..(505): Homolog of NCBI NO: 15219309 NR Description: S-locus protein, putative; protein id:
  misc_feature (391)..(505): Homolog of NCBI NO: 6069485 NR Description: S-locus protein 5 [Brassica rapa]
  misc_feature (381)..(499): Homolog of NCBI NO: 15240510 NR Description: putative protein; protein id: At5g49580.1 thaliana] >gi|10177624|dbj|BAB10771.1| contains similarity to
  misc_feature (47)..(157): Homolog of NCBI NO: 15240510 NR Description: putative protein; protein id: At5g49580.1 thaliana] >gi|10177624|dbj|BAB10771.1| contains similarity to
  misc_feature (217)..(303): Homolog of NCBI NO: 15240510 NR Description: putative protein; protein id: At5g49580.1 thaliana] >gi|10177624|dbj|BAB10771.1| contains similarity to
MEDIGLVKQGWKWMQSQKHMCSDACSAMRCFGEMIGGLVERHWPLGAAAAVVLNLGCTPGLFIVGLFGILILWMYANFWITGTLFIVGGYLFSLNHARVVVLVAGLYAMYCVKVRLGWLGLFLSINLAFLSNDILNCLLQWCDNLSEKPQHEEPKKPKETIIEEDYSREFEYPSVPVEDETETKIHENKSSAKPTAPSTVVNTVKEISSVKIVKIEESSSADEMKRILNSLNHYEALGVPRHKKIDAAVLKKEYRKKAMLVHPDKNMGSPLASESFKKLQSAYEVLSDFVKKRDYDEQLRKEESRTRSVCQTSHASSHQMSQGGYTVQNVVIHTYGYVPIGQKQRQDGARIVANIIKQKMEMDGSNSKGHYPSREHISILSSITFFFMSIKIEIPRAFVCAESKIFDVSEWAICQGMACRPNTHRPSFHVNMVGLEKTTQRSNSSRFPWDLDVEMMDEDEEEFELWLQQALASGLFCETSKRRKSWSPFKLGQMKSKKQWRRTST

SEQ ID NO: 73225 - protein, 492 aa, Arabidopsis thaliana
  peptide (1)..(492): Ceres Seq. ID no. 4961404
  misc_feature (219)..(286): Pfam Name: DnaJ domain Pfam Description: DnaJ domain
  misc_feature (32)..(306): Homolog of NCBI NO: 7487909 NR Description: hypothetical protein YUP8H12R.35 - Arabidopsis >gi|3152572|gb|AAC17053.1| Contains homology to DNAJ heatshock
  misc_feature (378)..(492): Homolog of NCBI NO: 7487909 NR Description: hypothetical protein YUP8H12R.35 - Arabidopsis >gi|3152572|gb|AAC17053.1| Contains homology to DNAJ heatshock
  misc_feature (1)..(32): Homolog of NCBI NO: 7487909 NR Description: hypothetical protein YUP8H12R.35 - Arabidopsis >gi|3152572|gb|AAC17053.1| Contains homology to DNAJ heatshock
  misc_feature (1)..(402): Homolog of NCBI NO: 30699386 NR Description: S-locus protein, putative [Arabidopsis thaliana]
  misc_feature (93)..(492): Homolog of NCBI NO: 25518299 NR Description: hypothetical protein F19K19.3 - Arabidopsis >gi|9989051|gb|AAG10814.1|AC011808_2 Similar to DNAJ proteins
  misc_feature (25)..(492): Homolog of NCBI NO: 15219309 NR Description: S-locus protein, putative; protein id:
  misc_feature (378)..(492): Homolog of NCBI NO: 6069485 NR Description: S-locus protein 5 [Brassica rapa]
  misc_feature (368)..(486): Homolog of NCBI NO: 15240510 NR Description: putative protein; protein id: At5g49580.1 thaliana] >gi|10177624|dbj|BAB10771.1| contains similarity to
  misc_feature (34)..(144): Homolog of NCBI NO: 15240510 NR Description: putative protein; protein id: At5g49580.1 thaliana] >gi|10177624|dbj|BAB10771.1| contains similarity to
  misc_feature (204)..(290): Homolog of NCBI NO: 15240510 NR Description: putative protein; protein id: At5g49580.1 thaliana] >gi|10177624|dbj|BAB10771.1| contains similarity to
MQSQKHMCSDACSAMRCFGEMIGGLVERHWPLGAAAAVVLNLGCTPGLFIVGLFGILILWMYANFWITGTLFIVGGYLFSLNHARVVVLVAGLYAMYCVKVRLGWLGLFLSINLAFLSNDILNCLLQWCDNLSEKPQHEEPKKPKETIIEEDYSREFEYPSVPVEDETETKIHENKSSAKPTAPSTVVNTVKEISSVKIVKIEESSSADEMKRILNSLNHYEALGVPRHKKIDAAVLKKEYRKKAMLVHPDKNMGSPLASESFKKLQSAYEVLSDFVKKRDYDEQLRKEESRTRSVCQTSHASSHQMSQGGYTVQNVVIHTYGYVPIGQKQRQDGARIVANIIKQKMEMDGSNSKGHYPSREHISILSSITFFFMSIKIEIPRAFVCAESKIFDVSEWAICQGMACRPNTHRPSFHVNMVGLEKTTQRSNSSRFPWDLDVEMMDEDEEEFELWLQQALASGLFCETSKRRKSWSPFKLGQMKSKKQWRRTST

SEQ ID NO: 73226 - protein, 486 aa, Arabidopsis thaliana
  peptide (1)..(486): Ceres Seq. ID no. 4961405
  misc_feature (213)..(280): Pfam Name: DnaJ domain Pfam Description: DnaJ domain
  misc_feature (26)..(300): Homolog of NCBI NO: 7487909 NR Description: hypothetical protein YUP8H12R.35 - Arabidopsis >gi|3152572|gb|AAC17053.1| Contains homology to DNAJ heatshock
  misc_feature (372)..(486): Homolog of NCBI NO: 7487909 NR Description: hypothetical protein YUP8H12R.35 - Arabidopsis >gi|3152572|gb|AAC17053.1| Contains homology to DNAJ heatshock
  misc_feature (1)..(26): Homolog of NCBI NO: 7487909 NR Description: hypothetical protein YUP8H12R.35 - Arabidopsis >gi|3152572|gb|AAC17053.1| Contains homology to DNAJ heatshock
  misc_feature (1)..(396): Homolog of NCBI NO: 30699386 NR Description: S-locus protein, putative [Arabidopsis thaliana]
  misc_feature (87)..(486): Homolog of NCBI NO: 25518299 NR Description: hypothetical protein F19K19.3 - Arabidopsis >gi|9989051|gb|AAG10814.1|AC011808_2 Similar to DNAJ proteins
  misc_feature (19)..(486): Homolog of NCBI NO: 15219309 NR Description: S-locus protein, putative; protein id:
  misc_feature (372)..(486): Homolog of NCBI NO: 6069485 NR Description: S-locus protein 5 [Brassica rapa]
  misc_feature (362)..(480): Homolog of NCBI NO: 15240510 NR Description: putative protein; protein id: At5g49580.1 thaliana] >gi|10177624|dbj|BAB10771.1| contains similarity to
  misc_feature (28)..(138): Homolog of NCBI NO: 15240510 NR Description: putative protein; protein id: At5g49580.1 thaliana] >gi|10177624|dbj|BAB10771.1| contains similarity to
  misc_feature (198)..(284): Homolog of NCBI NO: 15240510 NR Description: putative protein; protein id: At5g49580.1 thaliana] >gi|10177624|dbj|BAB10771.1| contains similarity to
MCSDACSAMRCFGEMIGGLVERHWPLGAAAAVVLNLGCTPGLFIVGLFGILILWMYANFWITGTLFIVGGYLFSLNHARVVVLVAGLYAMYCVKVRLGWLGLFLSINLAFLSNDILNCLLQWCDNLSEKPQHEEPKKPKETIIEEDYSREFEYPSVPVEDETETKIHENKSSAKPTAPSTVVNTVKEISSVKIVKIEESSSADEMKRILNSLNHYEALGVPRHKKIDAAVLKKEYRKKAMLVHPDKNMGSPLASESFKKLQSAYEVLSDFVKKRDYDEQLRKEESRTRSVCQTSHASSHQMSQGGYTVQNVVIHTYGYVPIGQKQRQDGARIVANIIKQKMEMDGSNSKGHYPSREHISILSSITFFFMSIKIEIPRAFVCAESKIFDVSEWAICQGMACRPNTHRPSFHVNMVGLEKTTQRSNSSRFPWDLDVEMMDEDEEEFELWLQQALASGLFCETSKRRKSWSPFKLGQMKSKKQWRRTST

SEQ ID NO: 73227 - DNA, 2082 bp, Arabidopsis thaliana
  misc_feature (1)..(2082): Ceres Seq. ID no. 4961412
  misc_feature: MA Experiment ID: 20000440 Result: Up-regulated in Transcription
  misc_feature: MA Experiment 20000440 PARAMETER Experiment Name: At_Closed-Flower__Sub_P Parameter: Tissue Value: Closed Flower vs. Whole Plant
  misc_feature: Pfam Name: Pkinase Pfam Description: Protein kinase domain
atgacgcagaagctcgtacgccttgtgatcgtctctctggctattactgtcactttacttcaagcaaaaaccgataaccaagaagtctccgcgttgaacgtaatgttcacgagcttaaattcgccgtcgaaactcaaaggttggaaagctaacggaggtgatccctgcgaagattcttgggaaggcgtcaaatgcaaaggctcttcggtcactgaattacagttatcaggctttgagctaggtggatctcgcggttatctactaagcaacctcaaatctctcacaacttttgatctcagcaaaaacaatctcaaaggaaacataccttatcaactcccacccaacattgccaatctagacttttctgaaaacgaactcgatggaaacgtgccctactcgttatctcaaatgaaaaatctccaaagcattaatcttggacaaaacaagctcaatggagaactaccagatatgtttcagaaactgtccaaactcgaaactctggacttttcgttgaataaactctctgggaaattacctcagagttttgctaatctcacaagcctcaaaaaactacacttgcaggataatcgattcacaggcgacataaacgttctcaggaaccttgccatcgatgacttgaacgtcgaagacaaccagtttgaaggatggatacctaatgagcttaaggacatagacagtttactgactggaggtaacgactggtcaactgaaactgctccaccaccaccaccgggtgttaaatatggccgaaaatcttcgggttcgaaagacggaggaggtataaccgccggaactggaatggtgatcgctggagcatgtttaggcgttcttgtgttgatcattgttttaattgcgctcgtttccaagaaaaaatcatctctctcacctcatttcatcgacgaagataacagtcatcacaccccaaagttcaaatctctcacctcgcatggatctgcgcaagagcttcgtgttgatttcggcaacgattacaaaggtatacgacacatttcaacctatcttggactaaaacattatgtttcgtcgcgtgtgatgtctttcactgataccgaatttgcgaacaagctcaatgcaaaacgaaccacttcaactcgttccgctgtggaattcgagctctctgatttgcaaagcgcaacagccaatttctcacctggaaatctactaggggaaggctcaatcggacgtgtttacagagccaaatattccgacggacgtactttggcggttaagaagatcgattcaacgttgtttgattcgggtaaatcagaaggaataacgccgattgtaatgagcctctcaaagattaggcatcaaaatatagcagagctcgtaggctattgctcagagcaaggtcacaacatgttagtctacgaatacttcaggaatggctcactccatgagttccttcatttgtcagattgcttcagtaaacccttgacttggaacacaagagtcagaatcgccttgggaaccgctcgagccgttgagtacctgcacgaggcatgttcaccttctgtgatgcataagaatatcaagtcttctaacattttgctagacgcagatctcaaccctcgtctctcagattacggcctctcaaaattctaccttgtgagcattaaaacgagtcaaaatctaggagaaggatacaatgcaccagaagccagggacccttctgcttatacaccaaagagtgacgtctacagctttggcgtcgtcatgttagagcttctcaccggtcgagttccatttgacgggtcaaagccaaggccggagagatcgttggtacggtgggcgacaccacaacttcacgacatagatgcattgtcgaatatagcggatccagctctgcacggactttacccaccaaaatcattgtcaagattcgccgacattatcgcattatgtgttcaggtggaaccggagttccgaccaccgatgtcagaagttgtggaggcgcttgtacggatggttcaacggtcaagtatgaagcttaaagatgatctttcatcgtcttatcgagcccacgacgattatgattactag

SEQ ID NO: 73228 - protein, 693 aa, Arabidopsis thaliana
  peptide (1)..(693): Ceres Seq. ID no. 4961413
  misc_feature: Pfam Name: Pkinase Pfam Description: Protein kinase domain
  misc_feature (25)..(693): Homolog of NCBI NO: 7489783 NR Description: leucine-rich repeat transmembrane protein kinase
  misc_feature (19)..(693): Homolog of NCBI NO: 15217283 NR Description: Putative leucine-rich repeat transmembrane
  misc_feature (22)..(692): Homolog of NCBI NO: 7489784 NR Description: leucine-rich repeat transmembrane protein kinase
  misc_feature (107)..(692): Homolog of NCBI NO: 29367551 NR Description: putative leucine-rich repeat transmembrane
  misc_feature (19)..(418): Homolog of NCBI NO: 37533916 NR Description: putative leucine-rich repeat transmembrane
  misc_feature (406)..(692): Homolog of NCBI NO: 37533916 NR Description: putative leucine-rich repeat transmembrane
  misc_feature (69)..(670): Homolog of NCBI NO: 18399852 NR Description: leucine-rich repeat transmembrane protein kinase,
  misc_feature (376)..(670): Homolog of NCBI NO: 30682076 NR Description: leucine rich repeat protein kinase family thaliana] >gi|20259441|gb|AAM14041.1| unknown protein thaliana] >gi|21436211|gb|AAM51393.1| unknown protein
  misc_feature (13)..(253): Homolog of NCBI NO: 30682076 NR Description: leucine rich repeat protein kinase family thaliana] >gi|20259441|gb|AAM14041.1| unknown protein thaliana] >gi|21436211|gb|AAM51393.1| unknown protein
  misc_feature (376)..(670): Homolog of NCBI NO: 25402649 NR Description: hypothetical protein [imported] - Arabidopsis >gi|5734735|gb|AAD50000.1|AC007259_13 Similar to protein kinases
MTQKLVRLVIVSLAITVTLLQAKTDNQEVSALNVMFTSLNSPSKLKGWKANGGDPCEDSWEGVKCKGSSVTELQLSGFELGGSRGYLLSNLKSLTTFDLSKNNLKGNIPYQLPPNIANLDFSENELDGNVPYSLSQMKNLQSINLGQNKLNGELPDMFQKLSKLETLDFSLNKLSGKLPQSFANLTSLKKLHLQDNRFTGDINVLRNLAIDDLNVEDNQFEGWIPNELKDIDSLLTGGNDWSTETAPPPPPGVKYGRKSSGSKDGGGITAGTGMVIAGACLGVLVLIIVLIALVSKKKSSLSPHFIDEDNSHHTPKFKSLTSHGSAQELRVDFGNDYKGIRHISTYLGLKHYVSSRVMSFTDTEFANKLNAKRTTSTRSAVEFELSDLQSATANFSPGNLLGEGSIGRVYRAKYSDGRTLAVKKIDSTLFDSGKSEGITPIVMSLSKIRHQNIAELVGYCSEQGHNMLVYEYFRNGSLHEFLHLSDCFSKPLTWNTRVRIALGTARAVEYLHEACSPSVMHKNIKSSNILLDADLNPRLSDYGLSKFYLVSIKTSQNLGEGYNAPEARDPSAYTPKSDVYSFGVVMLELLTGRVPFDGSKPRPERSLVRWATPQLHDIDALSNIADPALHGLYPPKSLSRFADIIALCVQVEPEFRPPMSEVVEALVRMVQRSSMKLKDDLSSSYRAHDDYDY

SEQ ID NO: 73229 - protein, 659 aa, Arabidopsis thaliana
  peptide (1)..(659): Ceres Seq. ID no. 4961414
  misc_feature: Pfam Name: Pkinase Pfam Description: Protein kinase domain
  misc_feature (1)..(659): Homolog of NCBI NO: 7489783 NR Description: leucine-rich repeat transmembrane protein kinase
  misc_feature (1)..(659): Homolog of NCBI NO: 15217283 NR Description: Putative leucine-rich repeat transmembrane
  misc_feature (1)..(658): Homolog of NCBI NO: 7489784 NR Description: leucine-rich repeat transmembrane protein kinase
  misc_feature (73)..(658): Homolog of NCBI NO: 29367551 NR Description: putative leucine-rich repeat transmembrane
  misc_feature (1)..(384): Homolog of NCBI NO: 37533916 NR Description: putative leucine-rich repeat transmembrane
  misc_feature (372)..(658): Homolog of NCBI NO: 37533916 NR Description: putative leucine-rich repeat transmembrane
  misc_feature (35)..(636): Homolog of NCBI NO: 18399852 NR Description: leucine-rich repeat transmembrane protein kinase,
  misc_feature (342)..(636): Homolog of NCBI NO: 30682076 NR Description: leucine rich repeat protein kinase family thaliana] >gi|20259441|gb|AAM14041.1| unknown protein thaliana] >gi|21436211|gb|AAM51393.1| unknown protein
  misc_feature (1)..(219): Homolog of NCBI NO: 30682076 NR Description: leucine rich repeat protein kinase family thaliana] >gi|20259441|gb|AAM14041.1| unknown protein thaliana] >gi|21436211|gb|AAM51393.1| unknown protein
  misc_feature (342)..(636): Homolog of NCBI NO: 25402649 NR Description: hypothetical protein [imported] - Arabidopsis >gi|5734735|gb|AAD50000.1|AC007259_13 Similar to protein kinases
MFTSLNSPSKLKGWKANGGDPCEDSWEGVKCKGSSVTELQLSGFELGGSRGYLLSNLKSLTTFDLSKNNLKGNIPYQLPPNIANLDFSENELDGNVPYSLSQMKNLQSINLGQNKLNGELPDMFQKLSKLETLDFSLNKLSGKLPQSFANLTSLKKLHLQDNRFTGDINVLRNLAIDDLNVEDNQFEGWIPNELKDIDSLLTGGNDWSTETAPPPPPGVKYGRKSSGSKDGGGITAGTGMVIAGACLGVLVLIIVLIALVSKKKSSLSPHFIDEDNSHHTPKFKSLTSHGSAQELRVDFGNDYKGIRHISTYLGLKHYVSSRVMSFTDTEFANKLNAKRTTSTRSAVEFELSDLQSATANFSPGNLLGEGSIGRVYRAKYSDGRTLAVKKIDSTLFDSGKSEGITPIVMSLSKIRHQNIAELVGYCSEQGHNMLVYEYFRNGSLHEFLHLSDCFSKPLTWNTRVRIALGTARAVEYLHEACSPSVMHKNIKSSNILLDADLNPRLSDYGLSKFYLVSIKTSQNLGEGYNAPEARDPSAYTPKSDVYSFGVVMLELLTGRVPFDGSKPRPERSLVRWATPQLHDIDALSNIADPALHGLYPPKSLSRFADIIALCVQVEPEFRPPMSEVVEALVRMVQRSSMKLKDDLSSSYRAHDDYDY

SEQ ID NO: 73230 - protein, 557 aa, Arabidopsis thaliana
  peptide (1)..(557): Ceres Seq. ID no. 4961415
  misc_feature: Pfam Name: Pkinase Pfam Description: Protein kinase domain
  misc_feature (1)..(557): Homolog of NCBI NO: 7489783 NR Description: leucine-rich repeat transmembrane protein kinase
  misc_feature (1)..(557): Homolog of NCBI NO: 15217283 NR Description: Putative leucine-rich repeat transmembrane
  misc_feature (1)..(556): Homolog of NCBI NO: 7489784 NR Description: leucine-rich repeat transmembrane protein kinase
  misc_feature (1)..(556): Homolog of NCBI NO: 29367551 NR Description: putative leucine-rich repeat transmembrane
  misc_feature (1)..(282): Homolog of NCBI NO: 37533916 NR Description: putative leucine-rich repeat transmembrane
  misc_feature (270)..(556): Homolog of NCBI NO: 37533916 NR Description: putative leucine-rich repeat transmembrane
  misc_feature (1)..(534): Homolog of NCBI NO: 18399852 NR Description: leucine-rich repeat transmembrane protein kinase,
  misc_feature (240)..(534): Homolog of NCBI NO: 30682076 NR Description: leucine rich repeat protein kinase family thaliana] >gi|20259441|gb|AAM14041.1| unknown protein thaliana] >gi|21436211|gb|AAM51393.1| unknown protein
  misc_feature (1)..(117): Homolog of NCBI NO: 30682076 NR Description: leucine rich repeat protein kinase family thaliana] >gi|20259441|gb|AAM14041.1| unknown protein thaliana] >gi|21436211|gb|AAM51393.1| unknown protein
  misc_feature (240)..(534): Homolog of NCBI NO: 25402649 NR Description: hypothetical protein [imported] - Arabidopsis >gi|5734735|gb|AAD50000.1|AC007259_13 Similar to protein kinases
MKNLQSINLGQNKLNGELPDMFQKLSKLETLDFSLNKLSGKLPQSFANLTSLKKLHLQDNRFTGDINVLRNLAIDDLNVEDNQFEGWIPNELKDIDSLLTGGNDWSTETAPPPPPGVKYGRKSSGSKDGGGITAGTGMVIAGACLGVLVLIIVLIALVSKKKSSLSPHFIDEDNSHHTPKFKSLTSHGSAQELRVDFGNDYKGIRHISTYLGLKHYVSSRVMSFTDTEFANKLNAKRTTSTRSAVEFELSDLQSATANFSPGNLLGEGSIGRVYRAKYSDGRTLAVKKIDSTLFDSGKSEGITPIVMSLSKIRHQNIAELVGYCSEQGHNMLVYEYFRNGSLHEFLHLSDCFSKPLTWNTRVRIALGTARAVEYLHEACSPSVMHKNIKSSNILLDADLNPRLSDYGLSKFYLVSIKTSQNLGEGYNAPEARDPSAYTPKSDVYSFGVVMLELLTGRVPFDGSKPRPERSLVRWATPQLHDIDALSNIADPALHGLYPPKSLSRFADIIALCVQVEPEFRPPMSEVVEALVRMVQRSSMKLKDDLSSSYRAHDDYDY

SEQ ID NO: 73231 - DNA, 441 bp, Arabidopsis thaliana
  misc_feature (1)..(441): Ceres Seq. ID no. 4961446
  misc_feature: MA Experiment ID: 20000166 Result: Down-regulated in Transcription
  misc_feature: MA Experiment 20000166 PARAMETER Experiment Name: At_100uM_ABA_P Parameter: Age (day) Value: 14
  misc_feature: MA Experiment 20000166 PARAMETER Experiment Name: At_100uM_ABA_P Parameter: Organism Value: A. thaliana
  misc_feature: MA Experiment 20000166 PARAMETER Experiment Name: At_100uM_ABA_P Parameter: Plant Line Value: WS
  misc_feature: MA Experiment 20000166 PARAMETER Experiment Name: At_100uM_ABA_P Parameter: Timepoint (hr) Value: 1
  misc_feature: MA Experiment 20000166 PARAMETER Experiment Name: At_100uM_ABA_P Parameter: Tissue Value: Aerial
  misc_feature: MA Experiment 20000166 PARAMETER Experiment Name: At_100uM_ABA_P Parameter: Treatment Value: 100uM ABA vs. No Treatment
  misc_feature: MA Experiment ID: 20000171 Result: Down-regulated in Transcription
  misc_feature: MA Experiment 20000171 PARAMETER Experiment Name: At_42deg_Heat_P Parameter: Age (day) Value: 14
  misc_feature: MA Experiment 20000171 PARAMETER Experiment Name: At_42deg_Heat_P Parameter: Organism Value: A. thaliana
  misc_feature: MA Experiment 20000171 PARAMETER Experiment Name: At_42deg_Heat_P Parameter: Plant Line Value: WS
  misc_feature: MA Experiment 20000171 PARAMETER Experiment Name: At_42deg_Heat_P Parameter: Temperature (deg C) Value: 42 vs. 22
  misc_feature: MA Experiment 20000171 PARAMETER Experiment Name: At_42deg_Heat_P Parameter: Timepoint (hr) Value: 1
  misc_feature: MA Experiment 20000171 PARAMETER Experiment Name: At_42deg_Heat_P Parameter: Tissue Value: Aerial
  misc_feature: MA Experiment ID: 20000173 Result: Down-regulated in Transcription
  misc_feature: MA Experiment 20000173 PARAMETER Experiment Name: At_42deg_Heat_P Parameter: Age (day) Value: 14
  misc_feature: MA Experiment 20000173 PARAMETER Experiment Name: At_42deg_Heat_P Parameter: Organism Value: A. thaliana
  misc_feature: MA Experiment 20000173 PARAMETER Experiment Name: At_42deg_Heat_P Parameter: Plant Line Value: WS
  misc_feature: MA Experiment 20000173 PARAMETER Experiment Name: At_42deg_Heat_P Parameter: Temperature (deg C) Value: 42 vs. 22
  misc_feature: MA Experiment 20000173 PARAMETER Experiment Name: At_42deg_Heat_P Parameter: Timepoint (hr) Value: 6
  misc_feature: MA Experiment 20000173 PARAMETER Experiment Name: At_42deg_Heat_P Parameter: Tissue Value: Aerial
  misc_feature: MA Experiment ID: 20000184 Result: Down-regulated in Transcription
  misc_feature: MA Experiment 20000184 PARAMETER Experiment Name: At_Shoots__P Parameter: Age (day) Value: 7
  misc_feature: MA Experiment 20000184 PARAMETER Experiment Name: At_Shoots__P Parameter: Tissue Value: Shoots vs. Whole Plant
  misc_feature: MA Experiment ID: 20000185 Result: Down-regulated in Transcription
  misc_feature: MA Experiment 20000185 PARAMETER Experiment Name: At_Roots__P Parameter: Age (day) Value: 7 vs. 21
  misc_feature: MA Experiment 20000185 PARAMETER Experiment Name: At_Roots__P Parameter: Organism Value: A. thaliana
  misc_feature: MA Experiment 20000185 PARAMETER Experiment Name: At_Roots__P Parameter: Tissue Value: Roots vs. Whole Plant
  misc_feature: MA Experiment ID: 20000227 Result: Down-regulated in Transcription
  misc_feature: MA Experiment 20000227 PARAMETER Experiment Name: At_Root-Tips-vs-Tops_P Parameter: Tissue Value: Root Tips vs. Root Tops
  misc_feature: MA Experiment ID: 20000234 Result: Down-regulated in Transcription
  misc_feature: MA Experiment 20000234 PARAMETER Experiment Name: At_Siliques_P Parameter: Age (day) Value: 21
  misc_feature: MA Experiment 20000234 PARAMETER Experiment Name: At_Siliques_P Parameter: Organism Value: A. thaliana
  misc_feature: MA Experiment 20000234 PARAMETER Experiment Name: At_Siliques_P Parameter: Plant Line Value: WS
  misc_feature: MA Experiment 20000234 PARAMETER Experiment Name: At_Siliques_P Parameter: Tissue Value: Less Than 5mm Siliques vs. Whole Plant
  misc_feature: MA Experiment ID: 20000235 Result: Down-regulated in Transcription
  misc_feature: MA Experiment 20000235 PARAMETER Experiment Name: At_Siliques_P Parameter: Age (day) Value: 21
  misc_feature: MA Experiment 20000235 PARAMETER Experiment Name: At_Siliques_P Parameter: Organism Value: A. thaliana
  misc_feature: MA Experiment 20000235 PARAMETER Experiment Name: At_Siliques_P Parameter: Plant Line Value: WS
  misc_feature: MA Experiment 20000235 PARAMETER Experiment Name: At_Siliques_P Parameter: Tissue Value: 5-10mm Siliques vs. Whole Plant
  misc_feature: MA Experiment ID: 20000264 Result: Down-regulated in Transcription
  misc_feature: MA Experiment 20000264 PARAMETER Experiment Name: At_Open_Flower_P Parameter: Age (day) Value: 21
  misc_feature: MA Experiment 20000264 PARAMETER Experiment Name: At_Open_Flower_P Parameter: Plant Line Value: WS
  misc_feature: MA Experiment 20000264 PARAMETER Experiment Name: At_Open_Flower_P Parameter: Tissue Value: Open Flower vs. Whole Plant
  misc_feature: MA Experiment ID: 20000265 Result: Down-regulated in Transcription
  misc_feature: MA Experiment 20000265 PARAMETER Experiment Name: At_Open_Flower_P Parameter: Age (day) Value: 21
  misc_feature: MA Experiment 20000265 PARAMETER Experiment Name: At_Open_Flower_P Parameter: Plant Line Value: WS
  misc_feature: MA Experiment 20000265 PARAMETER Experiment Name: At_Open_Flower_P Parameter: Tissue Value: Closed Flower vs. Whole Plant
  misc_feature: MA Experiment ID: 20000267 Result: Up-regulated in Transcription
  misc_feature: MA Experiment 20000267 PARAMETER Experiment Name: At_Drought_P Parameter: Age (day) Value: 7
  misc_feature: MA Experiment 20000267 PARAMETER Experiment Name: At_Drought_P Parameter: Organism Value: A. thaliana
  misc_feature: MA Experiment 20000267 PARAMETER Experiment Name: At_Drought_P Parameter: Plant Line Value: WS
  misc_feature: MA Experiment 20000267 PARAMETER Experiment Name: At_Drought_P Parameter: Timepoint (hr) Value: 6
  misc_feature: MA Experiment 20000267 PARAMETER Experiment Name: At_Drought_P Parameter: Tissue Value: Whole Plant
  misc_feature: MA Experiment 20000267 PARAMETER Experiment Name: At_Drought_P Parameter: Treatment Value: Drought vs. No Drought
  misc_feature: MA Experiment ID: 20000286 Result: Down-regulated in Transcription
  misc_feature: MA Experiment 20000286 PARAMETER Experiment Name: At_Open_Flower_P Parameter: Age (day) Value: 21
  misc_feature: MA Experiment 20000286 PARAMETER Experiment Name: At_Open_Flower_P Parameter: Plant Line Value: WS
  misc_feature: MA Experiment 20000286 PARAMETER Experiment Name: At_Open_Flower_P Parameter: Tissue Value: Half Open vs. Whole Plant
  misc_feature: MA Experiment ID: 20000437 Result: Up-regulated in Transcription
  misc_feature: MA Experiment 20000437 PARAMETER Experiment Name: At_Drought_P Parameter: Age (day) Value: 8
  misc_feature: MA Experiment 20000437 PARAMETER Experiment Name: At_Drought_P Parameter: Organism Value: A. thaliana
  misc_feature: MA Experiment 20000437 PARAMETER Experiment Name: At_Drought_P Parameter: Plant Line Value: WS
  misc_feature: MA Experiment 20000437 PARAMETER Experiment Name: At_Drought_P Parameter: Timepoint (hr) Value: 24
  misc_feature: MA Experiment 20000437 PARAMETER Experiment Name: At_Drought_P Parameter: Tissue Value: Whole Plant
  misc_feature: MA Experiment 20000437 PARAMETER Experiment Name: At_Drought_P Parameter: Treatment Value: Drought vs. No Drought
  misc_feature: MA Experiment ID: 20000439 Result: Down-regulated in Transcription
  misc_feature: MA Experiment 20000439 PARAMETER Experiment Name: At_Roots__P Parameter: Age (day) Value: 14 vs. 21
  misc_feature: MA Experiment 20000439 PARAMETER Experiment Name: At_Roots__P Parameter: Organism Value: A. thaliana
  misc_feature: MA Experiment 20000439 PARAMETER Experiment Name: At_Roots__P Parameter: Tissue Value: Roots vs. Whole Plant
  misc_feature: MA Experiment ID: 20000441 Result: Up-regulated in Transcription
  misc_feature: MA Experiment 20000441 PARAMETER Experiment Name: At_1uM_BR-BRZ__P Parameter: Tissue Value: Shoot Apices
  misc_feature: MA Experiment 20000441 PARAMETER Experiment Name: At_1uM_BR-BRZ__P Parameter: Treatment Value: 1uM BR vs. No Treatment
  misc_feature: MA Experiment ID: 20000495 Result: Down-regulated in Transcription
  misc_feature: MA Experiment 20000495 PARAMETER Experiment Name: At_Guard_Cells_P Parameter: Harvest Date Value: 8/2/2002
  misc_feature: MA Experiment 20000495 PARAMETER Experiment Name: At_Guard_Cells_P Parameter: Organism Value: A. thaliana
  misc_feature: MA Experiment 20000495 PARAMETER Experiment Name: At_Guard_Cells_P Parameter: Tissue Value: Guard Cells vs. Leaves
  misc_feature: MA Experiment ID: 20000527 Result: Up-regulated in Transcription
  misc_feature: MA Experiment 20000527 PARAMETER Experiment Name: At_10percent_PEG_P Parameter: Age (day) Value: 20
  misc_feature: MA Experiment 20000527 PARAMETER Experiment Name: At_10percent_PEG_P Parameter: Organism Value: A. thaliana
  misc_feature: MA Experiment 20000527 PARAMETER Experiment Name: At_10percent_PEG_P Parameter: Plant Line Value: WS
  misc_feature: MA Experiment 20000527 PARAMETER Experiment Name: At_10percent_PEG_P Parameter: Timepoint (day) Value: 20
  misc_feature: MA Experiment 20000527 PARAMETER Experiment Name: At_10percent_PEG_P Parameter: Tissue Value: Whole Plant
  misc_feature: MA Experiment 20000527 PARAMETER Experiment Name: At_10percent_PEG_P Parameter: Treatment Value: 10percent PEG vs. No Treatment
  misc_feature: MA Experiment ID: 20001248 Result: Up-regulated in Transcription
  misc_feature: MA Experiment 20001248 PARAMETER Experiment Name: At_Far-red-induction_P Parameter: Age (day) Value: 7
  misc_feature: MA Experiment 20001248 PARAMETER Experiment Name: At_Far-red-induction_P Parameter: Light Value: Far-red vs. White
  misc_feature: MA Experiment 20001248 PARAMETER Experiment Name: At_Far-red-induction_P Parameter: Organism Value: A. thaliana
  misc_feature: MA Experiment 20001248 PARAMETER Experiment Name: At_Far-red-induction_P Parameter: Plant Line Value: Columbia
  misc_feature: MA Experiment 20001248 PARAMETER Experiment Name: At_Far-red-induction_P Parameter: Timepoint (hr) Value: 4
  misc_feature: MA Experiment 20001248 PARAMETER Experiment Name: At_Far-red-induction_P Parameter: Tissue Value: Whole Plant
  misc_feature: MA Experiment ID: 20001450 Result: Up-regulated in Transcription
  misc_feature: MA Experiment 20001450 PARAMETER Experiment Name: At_Far-red-induction_P Parameter: Age (day) Value: 7
  misc_feature: MA Experiment 20001450 PARAMETER Experiment Name: At_Far-red-induction_P Parameter: Light Value: Far-red vs. White
  misc_feature: MA Experiment 20001450 PARAMETER Experiment Name: At_Far-red-induction_P Parameter: Organism Value: A. thaliana
  misc_feature: MA Experiment 20001450 PARAMETER Experiment Name: At_Far-red-induction_P Parameter: Plant Line Value: Columbia
  misc_feature: MA Experiment 20001450 PARAMETER Experiment Name: At_Far-red-induction_P Parameter: Timepoint (hr) Value: 8
  misc_feature: MA Experiment 20001450 PARAMETER Experiment Name: At_Far-red-induction_P Parameter: Tissue Value: Whole Plant
  misc_feature: MA Experiment ID: 20001451 Result: Up-regulated in Transcription
  misc_feature: MA Experiment 20001451 PARAMETER Experiment Name: At_Far-red-induction_P Parameter: Age (day) Value: 7
  misc_feature: MA Experiment 20001451 PARAMETER Experiment Name: At_Far-red-induction_P Parameter: Light Value: Far-red vs. White
  misc_feature: MA Experiment 20001451 PARAMETER Experiment Name: At_Far-red-induction_P Parameter: Organism Value: A. thaliana
  misc_feature: MA Experiment 20001451 PARAMETER Experiment Name: At_Far-red-induction_P Parameter: Plant Line Value: Columbia
  misc_feature: MA Experiment 20001451 PARAMETER Experiment Name: At_Far-red-induction_P Parameter: Timepoint (hr) Value: 24
  misc_feature: MA Experiment 20001451 PARAMETER Experiment Name: At_Far-red-induction_P Parameter: Tissue Value: Whole Plant
  misc_feature: MA Experiment ID: 20001556 Result: Down-regulated in Transcription
  misc_feature: MA Experiment 20001556 PARAMETER Experiment Name: At_Drought_Soil_Dry_P Parameter: Age (day) Value: 26
  misc_feature: MA Experiment 20001556 PARAMETER Experiment Name: At_Drought_Soil_Dry_P Parameter: Organism Value: A. thaliana
  misc_feature: MA Experiment 20001556 PARAMETER Experiment Name: At_Drought_Soil_Dry_P Parameter: Plant Line Value: WS
  misc_feature: MA Experiment 20001556 PARAMETER Experiment Name: At_Drought_Soil_Dry_P Parameter: Post Timepoint (hr) Value: None
  misc_feature: MA Experiment 20001556 PARAMETER Experiment Name: At_Drought_Soil_Dry_P Parameter: Post-Treatment Value: None
  misc_feature: MA Experiment 20001556 PARAMETER Experiment Name: At_Drought_Soil_Dry_P Parameter: Timepoint (day) Value: 12
  misc_feature: MA Experiment 20001556 PARAMETER Experiment Name: At_Drought_Soil_Dry_P Parameter: Treatment Value: Drought vs. No Drought
  misc_feature: MA Experiment ID: 20001557 Result: Down-regulated in Transcription
  misc_feature: MA Experiment 20001557 PARAMETER Experiment Name: At_Drought_Soil_Dry_P Parameter: Age (day) Value: 27
  misc_feature: MA Experiment 20001557 PARAMETER Experiment Name: At_Drought_Soil_Dry_P Parameter: Organism Value: A. thaliana
  misc_feature: MA Experiment 20001557 PARAMETER Experiment Name: At_Drought_Soil_Dry_P Parameter: Plant Line Value: WS
  misc_feature: MA Experiment 20001557 PARAMETER Experiment Name: At_Drought_Soil_Dry_P Parameter: Post Timepoint (hr) Value: 3
  misc_feature: MA Experiment 20001557 PARAMETER Experiment Name: At_Drought_Soil_Dry_P Parameter: Post-Treatment Value: Re-Water vs. No Drought
  misc_feature: MA Experiment 20001557 PARAMETER Experiment Name: At_Drought_Soil_Dry_P Parameter: Timepoint (day) Value: 13
  misc_feature: MA Experiment 20001557 PARAMETER Experiment Name: At_Drought_Soil_Dry_P Parameter: Treatment Value: Drought vs. No Drought
  misc_feature: MA Experiment ID: 20001558 Result: Down-regulated in Transcription
  misc_feature: MA Experiment 20001558 PARAMETER Experiment Name: At_Drought_Soil_Dry_P Parameter: Age (day) Value: 27
  misc_feature: MA Experiment 20001558 PARAMETER Experiment Name: At_Drought_Soil_Dry_P Parameter: Organism Value: A. thaliana
  misc_feature: MA Experiment 20001558 PARAMETER Experiment Name: At_Drought_Soil_Dry_P Parameter: Plant Line Value: WS
  misc_feature: MA Experiment 20001558 PARAMETER Experiment Name: At_Drought_Soil_Dry_P Parameter: Post Timepoint (hr) Value: 6
  misc_feature: MA Experiment 20001558 PARAMETER Experiment Name: At_Drought_Soil_Dry_P Parameter: Post-Treatment Value: Re-Water vs. No Drought
  misc_feature: MA Experiment 20001558 PARAMETER Experiment Name: At_Drought_Soil_Dry_P Parameter: Timepoint (day) Value: 13
  misc_feature: MA Experiment 20001558 PARAMETER Experiment Name: At_Drought_Soil_Dry_P Parameter: Treatment Value: Drought vs. No Drought
  misc_feature: MA Experiment ID: 20001560 Result: Down-regulated in Transcription
  misc_feature: MA Experiment 20001560 PARAMETER Experiment Name: At_Drought_Soil_Dry_P Parameter: Age (day) Value: 28
  misc_feature: MA Experiment 20001560 PARAMETER Experiment Name: At_Drought_Soil_Dry_P Parameter: Organism Value: A. thaliana
  misc_feature: MA Experiment 20001560 PARAMETER Experiment Name: At_Drought_Soil_Dry_P Parameter: Plant Line Value: WS
  misc_feature: MA Experiment 20001560 PARAMETER Experiment Name: At_Drought_Soil_Dry_P Parameter: Post Timepoint (hr) Value: None
  misc_feature: MA Experiment 20001560 PARAMETER Experiment Name: At_Drought_Soil_Dry_P Parameter: Post-Treatment Value: None
  misc_feature: MA Experiment 20001560 PARAMETER Experiment Name: At_Drought_Soil_Dry_P Parameter: Timepoint (day) Value: 14
  misc_feature: MA Experiment 20001560 PARAMETER Experiment Name: At_Drought_Soil_Dry_P Parameter: Treatment Value: Drought vs. No Drought
  misc_feature: MA Experiment ID: 20001904 Result: Down-regulated in Transcription
  misc_feature: MA Experiment 20001904 PARAMETER Experiment Name: At_Drought_Reproduction_P Parameter: Age (day) Value: 37
  misc_feature: MA Experiment 20001904 PARAMETER Experiment Name: At_Drought_Reproduction_P Parameter: Organism Value: A. thaliana
  misc_feature: MA Experiment 20001904 PARAMETER Experiment Name: At_Drought_Reproduction_P Parameter: Plant Line Value: WS
  misc_feature: MA Experiment 20001904 PARAMETER Experiment Name: At_Drought_Reproduction_P Parameter: Timepoint (day) Value: 7
  misc_feature: MA Experiment 20001904 PARAMETER Experiment Name: At_Drought_Reproduction_P Parameter: Tissue Value: Rosettes
  misc_feature: MA Experiment 20001904 PARAMETER Experiment Name: At_Drought_Reproduction_P Parameter: Treatment Value: Drought vs. No Drought
atgggagatgtagttttgttcatagatgaaacatatttgaaatcgagttttaatcgctgtagaatctgtcacgaagaagaagctgagagctactttgaagctccttgttcttgttcaggaaccatcaagttcgctcacagagattgcatacaacgatggtgtgatgagaaaggaaacacaatttgtgaaatttgtctccagttttcggttattttgttgataaagcatgcatttgatgcggtttatggaactgaagagtatccctatacaatattcacggctataggcatactattaccaatgctcgttatcattcgaaccatcacagctattcaaaggagtctccgatatcaaattctcgaatcagaagaagatacattgagctctgaagaagaagatcatggtttggaggaggaagagcaacaacaacatatagcttga

SEQ ID NO: 73232 - protein, 146 aa, Arabidopsis thaliana
  peptide (1)..(146): Ceres Seq. ID no. 4961447
  misc_feature (20)..(65): Pfam Name: Zinc finger, C3HC4 type (RING finger) Pfam Description: Zinc finger, C3HC4 type (RING finger)
  misc_feature (1)..(146): Homolog of NCBI NO: 15217818 NR Description: hypothetical protein; protein id: At1g02610.1
  misc_feature (56)..(146): Homolog of NCBI NO: 25518349 NR Description: hypothetical protein T14P4.10 - Arabidopsis >gi|9972376|gb|AAG10626.1|AC022521_4 Unknown protein [Arabidopsis
  misc_feature (1)..(67): Homolog of NCBI NO: 25518349 NR Description: hypothetical protein T14P4.10 - Arabidopsis >gi|9972376|gb|AAG10626.1|AC022521_4 Unknown protein [Arabidopsis
  misc_feature (56)..(146): Homolog of NCBI NO: 18411826 NR Description: Expressed protein; protein id: At4g02075.1, by cDNA: gi_4741922 [Arabidopsis thaliana]
  misc_feature (1)..(67): Homolog of NCBI NO: 18411826 NR Description: Expressed protein; protein id: At4g02075.1, by cDNA: gi_4741922 [Arabidopsis thaliana]
  misc_feature (60)..(144): Homolog of NCBI NO: 34905532 NR Description: B1146F03.23 [Oryza sativa (japonica
  misc_feature (9)..(67): Homolog of NCBI NO: 34905532 NR Description: B1146F03.23 [Oryza sativa (japonica
  misc_feature (14)..(67): Homolog of NCBI NO: 15240828 NR Description: putative protein; protein id: At5g38070.1 thaliana] >gi|8885610|dbj|BAA97540.1| contains similarity to
  misc_feature (2)..(131): Homolog of NCBI NO: 25365878 NR Description: F14L17.2 protein - Arabidopsis thaliana
  misc_feature (16)..(67): Homolog of NCBI NO: 22325409 NR Description: similar to nucleoside triphosphatase, putative;
MGDVVLFIDETYLKSSFNRCRICHEEEAESYFEAPCSCSGTIKFAHRDCIQRWCDEKGNTICEICLQFSVILLIKHAFDAVYGTEEYPYTIFTAIGILLPMLVIIRTITAIQRSLRYQILESEEDTLSSEEEDHGLEEEEQQQHIA

SEQ ID NO: 73233 - DNA, 573 bp, Arabidopsis thaliana
  misc_feature (1)..(573): Ceres Seq. ID no. 4961521
  misc_feature: MA Experiment ID: 20000307 Result: Up-regulated in Transcription
  misc_feature: MA Experiment 20000307 PARAMETER Experiment Name: At_Germinating_Seeds_Sub_P Parameter: Age (hr) Value: 24 vs. 0
  misc_feature: MA Experiment 20000307 PARAMETER Experiment Name: At_Germinating_Seeds_Sub_P Parameter: Organism Value: A. thaliana
  misc_feature: MA Experiment 20000307 PARAMETER Experiment Name: At_Germinating_Seeds_Sub_P Parameter: Plant Line Value: WS
  misc_feature: MA Experiment 20000307 PARAMETER Experiment Name: At_Germinating_Seeds_Sub_P Parameter: Tissue Value: Germinating Seeds
atggggacagctctgggaaagccatttgccggttttttccaccaagaagaatcgaggatagtgttgttcggtctcgacgctgccggaaaatcatcaataatgcacaaactcaaaaccggagaaacccttaccacaaccatgcctactattggaacggatgtggaaagtgtaaaatacaaggattcaaacttacgcttttgggaaatgggcggccaacaatgttacaagtggtttccaatgacgaaacatgacttccaagaaatagcggggcttgtgcttgtagtcgatagcacagacagagatcgaatagaagatgcgaaagattttcttaatgcggtgattgatgagatacaagggagtgtaccggacaatgtggctgttcttgtatttggaaacaagcatgaagttcctggtgctatgtctgcttctgagatcagtaacaagcttgatctcacttctcttcgtcaaaaaaactggcagagaaactggcatgtccagagctcatgtgcattctctggtgatggtttacatgaaggactcgactggctgttgaaaaatgctgaaagaatgtaa

SEQ ID NO: 73234 - protein, 190 aa, Arabidopsis thaliana
  peptide (1)..(190): Ceres Seq. ID no. 4961522
  misc_feature (4)..(187): Pfam Name: ADP-ribosylation factor family Pfam Description: ADP-ribosylation factor family
  misc_feature (1)..(190): Homolog of NCBI NO: 15217757 NR Description: ADP-ribosylation factor, putative; protein id:
  misc_feature (1)..(190): Homolog of NCBI NO: 25294175 NR Description: hypothetical protein T6A9.12 - Arabidopsis
  misc_feature (1)..(190): Homolog of NCBI NO: 18378965 NR Description: ADP-ribosylation factor, putative; protein id:
  misc_feature (34)..(157): Homolog of NCBI NO: 28466895 NR Description: At1g02430 [Arabidopsis thaliana]
  misc_feature (1)..(190): Homolog of NCBI NO: 25294176 NR Description: hypothetical protein T14P4.20 [imported] -
  misc_feature (1)..(186): Homolog of NCBI NO: 15226521 NR Description: ADP-ribosylation factor 1; protein id: supported by cDNA: 34414., supported by cDNA: gi_18650621, by cDNA: gi_553037 [Arabidopsis thaliana]
  misc_feature (1)..(186): Homolog of NCBI NO: 15228723 NR Description: ADP-ribosylation factor-like protein; protein id: supported by cDNA: 14909., supported by cDNA: gi_13926301, by cDNA: gi_16323247 [Arabidopsis thaliana]
  misc_feature (1)..(186): Homolog of NCBI NO: 25294169 NR Description: ADP-ribosylation factor [imported] - pepper
  misc_feature (1)..(186): Homolog of NCBI NO: 34900342 NR Description: ADP-ribosylation factor 1 [Oryza sativa (japonica
  misc_feature (1)..(186): Homolog of NCBI NO: 6573751 NR Description: F20B24.7 [Arabidopsis thaliana]
MGTALGKPFAGFFHQEESRIVLFGLDAAGKSSIMHKLKTGETLTTTMPTIGTDVESVKYKDSNLRFWEMGGQQCYKWFPMTKHDFQEIAGLVLVVDSTDRDRIEDAKDFLNAVIDEIQGSVPDNVAVLVFGNKHEVPGAMSASEISNKLDLTSLRQKNWQRNWHVQSSCAFSGDGLHEGLDWLLKNAERM

SEQ ID NO: 73235 - protein, 157 aa, Arabidopsis thaliana
  peptide (1)..(157): Ceres Seq. ID no. 4961523
  misc_feature (1)..(154): Pfam Name: ADP-ribosylation factor family Pfam Description: ADP-ribosylation factor family
  misc_feature (1)..(157): Homolog of NCBI NO: 15217757 NR Description: ADP-ribosylation factor, putative; protein id:
  misc_feature (1)..(157): Homolog of NCBI NO: 25294175 NR Description: hypothetical protein T6A9.12 - Arabidopsis
  misc_feature (1)..(157): Homolog of NCBI NO: 18378965 NR Description: ADP-ribosylation factor, putative; protein id:
  misc_feature (1)..(124): Homolog of NCBI NO: 28466895 NR Description: At1g02430 [Arabidopsis thaliana]
  misc_feature (1)..(157): Homolog of NCBI NO: 25294176 NR Description: hypothetical protein T14P4.20 [imported] -
  misc_feature (1)..(153): Homolog of NCBI NO: 15226521 NR Description: ADP-ribosylation factor 1; protein id: supported by cDNA: 34414., supported by cDNA: gi_18650621, by cDNA: gi_553037 [Arabidopsis thaliana]
  misc_feature (1)..(153): Homolog of NCBI NO: 25294169 NR Description: ADP-ribosylation factor [imported] - pepper
  misc_feature (1)..(153): Homolog of NCBI NO: 15228723 NR Description: ADP-ribosylation factor-like protein; protein id: supported by cDNA: 14909., supported by cDNA: gi_13926301, by cDNA: gi_16323247 [Arabidopsis thaliana]
  misc_feature (1)..(153): Homolog of NCBI NO: 34900342 NR Description: ADP-ribosylation factor 1 [Oryza sativa (japonica
  misc_feature (1)..(153): Homolog of NCBI NO: 6573751 NR Description: F20B24.7 [Arabidopsis thaliana]
MHKLKTGETLTTTMPTIGTDVESVKYKDSNLRFWEMGGQQCYKWFPMTKHDFQEIAGLVLVVDSTDRDRIEDAKDFLNAVIDEIQGSVPDNVAVLVFGNKHEVPGAMSASEISNKLDLTSLRQKNWQRNWHVQSSCAFSGDGLHEGLDWLLKNAERM

SEQ ID NO: 73236 - protein, 144 aa, Arabidopsis thaliana
  peptide (1)..(144): Ceres Seq. ID no. 4961524
  misc_feature (1)..(141): Pfam Name: ADP-ribosylation factor family Pfam Description: ADP-ribosylation factor family
  misc_feature (1)..(144): Homolog of NCBI NO: 15217757 NR Description: ADP-ribosylation factor, putative; protein id:
  misc_feature (1)..(144): Homolog of NCBI NO: 25294175 NR Description: hypothetical protein T6A9.12 - Arabidopsis
  misc_feature (1)..(144): Homolog of NCBI NO: 18378965 NR Description: ADP-ribosylation factor, putative; protein id:
  misc_feature (1)..(111): Homolog of NCBI NO: 28466895 NR Description: At1g02430 [Arabidopsis thaliana]
  misc_feature (1)..(144): Homolog of NCBI NO: 25294176 NR Description: hypothetical protein T14P4.20 [imported] -
  misc_feature (1)..(140): Homolog of NCBI NO: 15226521 NR Description: ADP-ribosylation factor 1; protein id: supported by cDNA: 34414., supported by cDNA: gi_18650621, by cDNA: gi_553037 [Arabidopsis thaliana]
  misc_feature (1)..(140): Homolog of NCBI NO: 25294169 NR Description: ADP-ribosylation factor [imported] - pepper
  misc_feature (1)..(140): Homolog of NCBI NO: 15228723 NR Description: ADP-ribosylation factor-like protein; protein id: supported by cDNA: 14909., supported by cDNA: gi_13926301, by cDNA: gi_16323247 [Arabidopsis thaliana]
  misc_feature (1)..(140): Homolog of NCBI NO: 34900342 NR Description: ADP-ribosylation factor 1 [Oryza sativa (japonica
  misc_feature (1)..(140): Homolog of NCBI NO: 6573751 NR Description: F20B24.7 [Arabidopsis thaliana]
MPTIGTDVESVKYKDSNLRFWEMGGQQCYKWFPMTKHDFQEIAGLVLVVDSTDRDRIEDAKDFLNAVIDEIQGSVPDNVAVLVFGNKHEVPGAMSASEISNKLDLTSLRQKNWQRNWHVQSSCAFSGDGLHEGLDWLLKNAERM

SEQ ID NO: 73237 - DNA, 897 bp, Arabidopsis thaliana
  misc_feature (1)..(897): Ceres Seq. ID no. 4961610
  misc_feature: MA Experiment ID: 20001451 Result: Up-regulated in Transcription
  misc_feature: MA Experiment 20001451 PARAMETER Experiment Name: At_Far-red-induction_P Parameter: Age (day) Value: 7
  misc_feature: MA Experiment 20001451 PARAMETER Experiment Name: At_Far-red-induction_P Parameter: Light Value: Far-red vs. White
  misc_feature: MA Experiment 20001451 PARAMETER Experiment Name: At_Far-red-induction_P Parameter: Organism Value: A. thaliana
  misc_feature: MA Experiment 20001451 PARAMETER Experiment Name: At_Far-red-induction_P Parameter: Plant Line Value: Columbia
  misc_feature: MA Experiment 20001451 PARAMETER Experiment Name: At_Far-red-induction_P Parameter: Timepoint (hr) Value: 24
  misc_feature: MA Experiment 20001451 PARAMETER Experiment Name: At_Far-red-induction_P Parameter: Tissue Value: Whole Plant
atgagtttgcctccaggattcaggtttcatcccactgatgaagaactggtggcttactatcttgataggaaggtcaacggccaagccattgagctcgagatcatcccagaagttgatctttataaatgcgagccatgggacttgcctgaaaagtcatttttgccgggaaacgacatggaatggtacttttacagcacaagggataagaagtatccaaatggctctaggacgaaccgtgcgacccgagcgggttactggaaggccacggggaaagatcgtacagtagaatcaaagaagatgaagatgggaatgaagaagacactggtttattatagaggaagggctcctcatggccttcgtactaattgggtcatgcatgaatatcgtctcacgcacgctccttcctcctccttgaaggagtcgtatgcattgtgccgagtgtttaagaagaacatacaaattccaaagagaaaaggggaagaagaagaagcagaagaagagagcactagtgtaggaaaagaagaggaagaagaaaaggagaagaagtggagaaaatgtgatggtaattatattgaagacgagagcttgaaaagagcatccgcggagacatcttcatcagagctaactcaaggggtccttttagacgaagcaaacagctcatccatatttgctcttcatttctcatcttctcttctggacgatcatgatcatcttttctcaaactattctcatcagcttccatatcatcctcctcttcaactccaagatttccctcaactttctatgaacgaagcagagattatgtcaatccaacaagactttcaatgcagagactctatgaacgggacacttgacgaaatcttctcttcttccgccactttccccgcttccctttga

SEQ ID NO: 73238 - protein, 298 aa, Arabidopsis thaliana
  peptide (1)..(298): Ceres Seq. ID no. 4961611
  misc_feature (3)..(131): Pfam Name: No apical meristem (NAM) protein Pfam Description: No apical meristem (NAM) protein
  misc_feature (1)..(298): Homolog of NCBI NO: 15221787 NR Description: NAM protein, putative; protein id: At1g54330.1
  misc_feature (1)..(156): Homolog of NCBI NO: 34902214 NR Description: Hypothetical protein [Oryza sativa (japonica group)] >gi|27452910|gb|AAO15294.1| Hypothetical protein [Oryza
  misc_feature (1)..(251): Homolog of NCBI NO: 15218843 NR Description: jasmonic acid, putative; protein id: At1g65910.1
  misc_feature (1)..(281): Homolog of NCBI NO: 15237939 NR Description: NAM (no apical meristem)-like protein; protein At5g17260.1 [Arabidopsis thaliana] >gi|10177071|dbj|BAB10513.1|
  misc_feature (1)..(151): Homolog of NCBI NO: 15229511 NR Description: hypothetical protein; protein id: At3g17730.1 thaliana] >gi|9294586|dbj|BAB02867.1| contains similarity to NAM
  misc_feature (1)..(150): Homolog of NCBI NO: 15228490 NR Description: NAM-like protein (no apical meristem); protein id:
  misc_feature (2)..(151): Homolog of NCBI NO: 21105751 NR Description: nam-like protein 11 [Petunia x hybrida]
  misc_feature (3)..(151): Homolog of NCBI NO: 15237469 NR Description: NAM-like; protein id: At5g46590.1 [Arabidopsis
  misc_feature (1)..(151): Homolog of NCBI NO: 37537036 NR Description: putative NAM (no apical meristem) protein [Oryza
  misc_feature (3)..(167): Homolog of NCBI NO: 15236721 NR Description: NAM (no apical meristem) - like protein; protein At4g17980.1 [Arabidopsis thaliana] >gi|7487769|pir||T05084
MSLPPGFRFHPTDEELVAYYLDRKVNGQAIELEIIPEVDLYKCEPWDLPEKSFLPGNDMEWYFYSTRDKKYPNGSRTNRATRAGYWKATGKDRTVESKKMKMGMKKTLVYYRGRAPHGLRTNWVMHEYRLTHAPSSSLKESYALCRVFKKNIQIPKRKGEEEEAEEESTSVGKEEEEEKEKKWRKCDGNYIEDESLKRASAETSSSELTQGVLLDEANSSSIFALHFSSSLLDDHDHLFSNYSHQLPYHPPLQLQDFPQLSMNEAEIMSIQQDFQCRDSMNGTLDEIFSSSATFPASL

SEQ ID NO: 73239 - protein, 240 aa, Arabidopsis thaliana
  peptide (1)..(240): Ceres Seq. ID no. 4961612
  misc_feature (1)..(73): Pfam Name: No apical meristem (NAM) protein Pfam Description: No apical meristem (NAM) protein
  misc_feature (1)..(240): Homolog of NCBI NO: 15221787 NR Description: NAM protein, putative; protein id: At1g54330.1
  misc_feature (1)..(98): Homolog of NCBI NO: 34902214 NR Description: Hypothetical protein [Oryza sativa (japonica group)] >gi|27452910|gb|AAO15294.1| Hypothetical protein [Oryza
  misc_feature (1)..(193): Homolog of NCBI NO: 15218843 NR Description: jasmonic acid, putative; protein id: At1g65910.1
  misc_feature (1)..(223): Homolog of NCBI NO: 15237939 NR Description: NAM (no apical meristem)-like protein; protein At5g17260.1 [Arabidopsis thaliana] >gi|10177071|dbj|BAB10513.1|
  misc_feature (1)..(93): Homolog of NCBI NO: 15229511 NR Description: hypothetical protein; protein id: At3g17730.1 thaliana] >gi|9294586|dbj|BAB02867.1| contains similarity to NAM
  misc_feature (1)..(92): Homolog of NCBI NO: 15228490 NR Description: NAM-like protein (no apical meristem); protein id:
  misc_feature (1)..(93): Homolog of NCBI NO: 21105751 NR Description: nam-like protein 11 [Petunia x hybrida]
  misc_feature (1)..(93): Homolog of NCBI NO: 15237469 NR Description: NAM-like; protein id: At5g46590.1 [Arabidopsis
  misc_feature (1)..(93): Homolog of NCBI NO: 37537036 NR Description: putative NAM (no apical meristem) protein [Oryza
  misc_feature (1)..(109): Homolog of NCBI NO: 15236721 NR Description: NAM (no apical meristem) - like protein; protein At4g17980.1 [Arabidopsis thaliana] >gi|7487769|pir||T05084
MEWYFYSTRDKKYPNGSRTNRATRAGYWKATGKDRTVESKKMKMGMKKTLVYYRGRAPHGLRTNWVMHEYRLTHAPSSSLKESYALCRVFKKNIQIPKRKGEEEEAEEESTSVGKEEEEEKEKKWRKCDGNYIEDESLKRASAETSSSELTQGVLLDEANSSSIFALHFSSSLLDDHDHLFSNYSHQLPYHPPLQLQDFPQLSMNEAEIMSIQQDFQCRDSMNGTLDEIFSSSATFPASL

SEQ ID NO: 73240 - protein, 199 aa, Arabidopsis thaliana
  peptide (1)..(199): Ceres Seq. ID no. 4961613
  misc_feature (1)..(199): Homolog of NCBI NO: 15221787 NR Description: NAM protein, putative; protein id: At1g54330.1
  misc_feature (1)..(57): Homolog of NCBI NO: 34902214 NR Description: Hypothetical protein [Oryza sativa (japonica group)] >gi|27452910|gb|AAO15294.1| Hypothetical protein [Oryza
  misc_feature (1)..(152): Homolog of NCBI NO: 15218843 NR Description: jasmonic acid, putative; protein id: At1g65910.1
  misc_feature (1)..(182): Homolog of NCBI NO: 15237939 NR Description: NAM (no apical meristem)-like protein; protein At5g17260.1 [Arabidopsis thaliana] >gi|10177071|dbj|BAB10513.1|
  misc_feature (1)..(52): Homolog of NCBI NO: 15229511 NR Description: hypothetical protein; protein id: At3g17730.1 thaliana] >gi|9294586|dbj|BAB02867.1| contains similarity to NAM
  misc_feature (1)..(51): Homolog of NCBI NO: 15228490 NR Description: NAM-like protein (no apical meristem); protein id:
  misc_feature (1)..(52): Homolog of NCBI NO: 21105751 NR Description: nam-like protein 11 [Petunia x hybrida]
  misc_feature (1)..(52): Homolog of NCBI NO: 15237469 NR Description: NAM-like; protein id: At5g46590.1 [Arabidopsis
  misc_feature (1)..(52): Homolog of NCBI NO: 37537036 NR Description: putative NAM (no apical meristem) protein [Oryza
  misc_feature (1)..(68): Homolog of NCBI NO: 15236721 NR Description: NAM (no apical meristem) - like protein; protein At4g17980.1 [Arabidopsis thaliana] >gi|7487769|pir||T05084
MKMGMKKTLVYYRGRAPHGLRTNWVMHEYRLTHAPSSSLKESYALCRVFKKNIQIPKRKGEEEEAEEESTSVGKEEEEEKEKKWRKCDGNYIEDESLKRASAETSSSELTQGVLLDEANSSSIFALHFSSSLLDDHDHLFSNYSHQLPYHPPLQLQDFPQLSMNEAEIMSIQQDFQCRDSMNGTLDEIFSSSATFPASL

SEQ ID NO: 73241 - DNA, 789 bp, Arabidopsis thaliana
  misc_feature (1)..(789): Ceres Seq. ID no. 4961622
  misc_feature: MA Experiment ID: 20000328 Result: Down-regulated in Transcription
  misc_feature: MA Experiment 20000328 PARAMETER Experiment Name: At_42deg_Heat_Sub_P Parameter: Age (day) Value: 14
  misc_feature: MA Experiment 20000328 PARAMETER Experiment Name: At_42deg_Heat_Sub_P Parameter: Organism Value: A. thaliana
  misc_feature: MA Experiment 20000328 PARAMETER Experiment Name: At_42deg_Heat_Sub_P Parameter: Plant Line Value: WS
  misc_feature: MA Experiment 20000328 PARAMETER Experiment Name: At_42deg_Heat_Sub_P Parameter: Temperature (deg C) Value: 42 vs. 22
  misc_feature: MA Experiment 20000328 PARAMETER Experiment Name: At_42deg_Heat_Sub_P Parameter: Timepoint (hr) Value: 6
  misc_feature: MA Experiment 20000328 PARAMETER Experiment Name: At_42deg_Heat_Sub_P Parameter: Tissue Value: Aerial
  misc_feature: Pfam Name: Mito_carr Pfam Description: Mitochondrial carrier protein
atgtcaggactcgatatctatcctcacgatccttcttcttcttcttcgaccagctctatcgatctatccaatgaagctttcttcagcaccggtggtctgtttctcgaaccaccaggcgtttcctcttccttcttcgactctatctcctccaaatgctccgactcagagccactgcatttccccggttactggagaaacaaaacccgtctccgctccggtaagaactttatgttcctgtccgtgagcttgagtaaagacagatctgagcagcaatgtaagaaggctttggcgcaaaacgacgaaattcccggcaaggataatcgaaaacgaagtgttatcggtggcgtgaggagacgcgggaccatgaacacaaggaagcatctctgggctggtgctgtagctgccatggtttcaaaaacattcttagctccacttgagagactaaagcttgaatatacagttcgtggtgaacagaggaacttgttggtggttgctaagtcaattgcaactacacagggcttgactggattctggaaaggtaatttgctcaatgttcttcgaactgctcctttcaaagccgtcaatttttgtgcctatgatacctatagaaagcaattgcttaaaatcgctgggaatcaagaagcaaccaactttgaaagattcgttgctggtgccgctgctgggattactgctactgtgctctgcttgccactcgacactgtattgccttcggcttcaataagttactttgtctacgagtgtatgaagatagtacttaaagtagaataa

SEQ ID NO: 73242 - protein, 262 aa, Arabidopsis thaliana
  peptide (1)..(262): Ceres Seq. ID no. 4961623
  misc_feature: Pfam Name: Mito_carr Pfam Description: Mitochondrial carrier protein
  misc_feature (1)..(262): Homolog of NCBI NO: 22330713 NR Description: mitochondrial carrier protein family; protein id:
  misc_feature (1)..(241): Homolog of NCBI NO: 25406546 NR Description: hypothetical protein T11I11.12 [imported] - thaliana >gi|12324250|gb|AAG52097.1|AC012680_8 putative
  misc_feature (1)..(241): Homolog of NCBI NO: 15238315 NR Description: mitochondrial carrier protein family; protein id:
  misc_feature (241)..(262): Homolog of NCBI NO: 15238315 NR Description: mitochondrial carrier protein family; protein id:
  misc_feature (126)..(262): Homolog of NCBI NO: 6841066 NR Description: calcium-binding transporter [Homo sapiens]
  misc_feature (126)..(262): Homolog of NCBI NO: 27369998 NR Description: calcium-binding transporter [Mus musculus]
  misc_feature (126)..(262): Homolog of NCBI NO: 33286910 NR Description: Calcium-binding transporter [Mus musculus]
  misc_feature (126)..(262): Homolog of NCBI NO: 33598954 NR Description: calcium-binding transporter [Homo sapiens]
  misc_feature (126)..(262): Homolog of NCBI NO: 11360341 NR Description: peroxisomal Ca-dependent solute carrier
  misc_feature (99)..(252): Homolog of NCBI NO: 4138581 NR Description: mitochondrial energy transfer protein [Solanum
MSGLDIYPHDPSSSSSTSSIDLSNEAFFSTGGLFLEPPGVSSSFFDSISSKCSDSEPLHFPGYWRNKTRLRSGKNFMFLSVSLSKDRSEQQCKKALAQNDEIPGKDNRKRSVIGGVRRRGTMNTRKHLWAGAVAAMVSKTFLAPLERLKLEYTVRGEQRNLLVVAKSIATTQGLTGFWKGNLLNVLRTAPFKAVNFCAYDTYRKQLLKIAGNQEATNFERFVAGAAAGITATVLCLPLDTVLPSASISYFVYECMKIVLKVE

SEQ ID NO: 73243 - protein, 186 aa, Arabidopsis thaliana
  peptide (1)..(186): Ceres Seq. ID no. 4961624
  misc_feature: Pfam Name: Mito_carr Pfam Description: Mitochondrial carrier protein
  misc_feature (1)..(186): Homolog of NCBI NO: 22330713 NR Description: mitochondrial carrier protein family; protein id:
  misc_feature (1)..(165): Homolog of NCBI NO: 25406546 NR Description: hypothetical protein T11I11.12 [imported] - thaliana >gi|12324250|gb|AAG52097.1|AC012680_8 putative
  misc_feature (1)..(165): Homolog of NCBI NO: 15238315 NR Description: mitochondrial carrier protein family; protein id:
  misc_feature (165)..(186): Homolog of NCBI NO: 15238315 NR Description: mitochondrial carrier protein family; protein id:
  misc_feature (50)..(186): Homolog of NCBI NO: 6841066 NR Description: calcium-binding transporter [Homo sapiens]
  misc_feature (50)..(186): Homolog of NCBI NO: 27369998 NR Description: calcium-binding transporter [Mus musculus]
  misc_feature (50)..(186): Homolog of NCBI NO: 33286910 NR Description: Calcium-binding transporter [Mus musculus]
  misc_feature (50)..(186): Homolog of NCBI NO: 33598954 NR Description: calcium-binding transporter [Homo sapiens]
  misc_feature (50)..(186): Homolog of NCBI NO: 11360341 NR Description: peroxisomal Ca-dependent solute carrier
  misc_feature (23)..(176): Homolog of NCBI NO: 4138581 NR Description: mitochondrial energy transfer protein [Solanum
MFLSVSLSKDRSEQQCKKALAQNDEIPGKDNRKRSVIGGVRRRGTMNTRKHLWAGAVAAMVSKTFLAPLERLKLEYTVRGEQRNLLVVAKSIATTQGLTGFWKGNLLNVLRTAPFKAVNFCAYDTYRKQLLKIAGNQEATNFERFVAGAAAGITATVLCLPLDTVLPSASISYFVYECMKIVLKVE

SEQ ID NO: 73244 - protein, 141 aa, Arabidopsis thaliana
  peptide (1)..(141): Ceres Seq. ID no. 4961625
  misc_feature: Pfam Name: Mito_carr Pfam Description: Mitochondrial carrier protein
  misc_feature (1)..(141): Homolog of NCBI NO: 22330713 NR Description: mitochondrial carrier protein family; protein id:
  misc_feature (1)..(120): Homolog of NCBI NO: 25406546 NR Description: hypothetical protein T11I11.12 [imported] - thaliana >gi|12324250|gb|AAG52097.1|AC012680_8 putative
  misc_feature (1)..(120): Homolog of NCBI NO: 15238315 NR Description: mitochondrial carrier protein family; protein id:
  misc_feature (120)..(141): Homolog of NCBI NO: 15238315 NR Description: mitochondrial carrier protein family; protein id:
  misc_feature (5)..(141): Homolog of NCBI NO: 6841066 NR Description: calcium-binding transporter [Homo sapiens]
  misc_feature (5)..(141): Homolog of NCBI NO: 27369998 NR Description: calcium-binding transporter [Mus musculus]
  misc_feature (5)..(141): Homolog of NCBI NO: 33286910 NR Description: Calcium-binding transporter [Mus musculus]
  misc_feature (5)..(141): Homolog of NCBI NO: 33598954 NR Description: calcium-binding transporter [Homo sapiens]
  misc_feature (5)..(141): Homolog of NCBI NO: 11360341 NR Description: peroxisomal Ca-dependent solute carrier
  misc_feature (1)..(131): Homolog of NCBI NO: 4138581 NR Description: mitochondrial energy transfer protein [Solanum
MNTRKHLWAGAVAAMVSKTFLAPLERLKLEYTVRGEQRNLLVVAKSIATTQGLTGFWKGNLLNVLRTAPFKAVNFCAYDTYRKQLLKIAGNQEATNFERFVAGAAAGITATVLCLPLDTVLPSASISYFVYECMKIVLKVE

SEQ ID NO: 73245 - DNA, 2736 bp, Arabidopsis thaliana
  misc_feature (1)..(2736): Ceres Seq. ID no. 4961715
  misc_feature: MA Experiment ID: 20000180 Result: Down-regulated in Transcription
  misc_feature: MA Experiment 20000180 PARAMETER Experiment Name: At_Germinating_Seeds_P Parameter: Age (hr) Value: 24 vs. 0
  misc_feature: MA Experiment 20000180 PARAMETER Experiment Name: At_Germinating_Seeds_P Parameter: Tissue Value: Germinating Seeds
  misc_feature: MA Experiment ID: 20000182 Result: Up-regulated in Transcription
  misc_feature: MA Experiment 20000182 PARAMETER Experiment Name: At_2mM_SA_P Parameter: Age (day) Value: 14
  misc_feature: MA Experiment 20000182 PARAMETER Experiment Name: At_2mM_SA_P Parameter: Organism Value: A. thaliana
  misc_feature: MA Experiment 20000182 PARAMETER Experiment Name: At_2mM_SA_P Parameter: Plant Line Value: WS
  misc_feature: MA Experiment 20000182 PARAMETER Experiment Name: At_2mM_SA_P Parameter: Timepoint (hr) Value: 6
  misc_feature: MA Experiment 20000182 PARAMETER Experiment Name: At_2mM_SA_P Parameter: Tissue Value: Aerial
  misc_feature: MA Experiment 20000182 PARAMETER Experiment Name: At_2mM_SA_P Parameter: Treatment Value: 2mM SA vs. No Treatment
  misc_feature: MA Experiment ID: 20000436 Result: Up-regulated in Transcription
  misc_feature: MA Experiment 20000436 PARAMETER Experiment Name: At_Drought_P Parameter: Age (day) Value: 7
  misc_feature: MA Experiment 20000436 PARAMETER Experiment Name: At_Drought_P Parameter: Organism Value: A. thaliana
  misc_feature: MA Experiment 20000436 PARAMETER Experiment Name: At_Drought_P Parameter: Plant Line Value: WS
  misc_feature: MA Experiment 20000436 PARAMETER Experiment Name: At_Drought_P Parameter: Timepoint (hr) Value: 12
  misc_feature: MA Experiment 20000436 PARAMETER Experiment Name: At_Drought_P Parameter: Tissue Value: Whole Plant
  misc_feature: MA Experiment 20000436 PARAMETER Experiment Name: At_Drought_P Parameter: Treatment Value: Drought vs. No Drought
  misc_feature: MA Experiment ID: 20000437 Result: Up-regulated in Transcription
  misc_feature: MA Experiment 20000437 PARAMETER Experiment Name: At_Drought_P Parameter: Age (day) Value: 8
  misc_feature: MA Experiment 20000437 PARAMETER Experiment Name: At_Drought_P Parameter: Organism Value: A. thaliana
  misc_feature: MA Experiment 20000437 PARAMETER Experiment Name: At_Drought_P Parameter: Plant Line Value: WS
  misc_feature: MA Experiment 20000437 PARAMETER Experiment Name: At_Drought_P Parameter: Timepoint (hr) Value: 24
  misc_feature: MA Experiment 20000437 PARAMETER Experiment Name: At_Drought_P Parameter: Tissue Value: Whole Plant
  misc_feature: MA Experiment 20000437 PARAMETER Experiment Name: At_Drought_P Parameter: Treatment Value: Drought vs. No Drought
  misc_feature: MA Experiment ID: 20000573 Result: Up-regulated in Transcription
  misc_feature: MA Experiment 20000573 PARAMETER Experiment Name: At_100uM_ABA_Mutants__P Parameter: Organism Value: A. thaliana
  misc_feature: MA Experiment 20000573 PARAMETER Experiment Name: At_100uM_ABA_Mutants__P Parameter: Plant Line Value: CS22 vs. Ler wt
  misc_feature: MA Experiment 20000573 PARAMETER Experiment Name: At_100uM_ABA_Mutants__P Parameter: Timepoint (hr) Value: N/A
  misc_feature: MA Experiment 20000573 PARAMETER Experiment Name: At_100uM_ABA_Mutants__P Parameter: Tissue Value: Whole Plant
  misc_feature: MA Experiment 20000573 PARAMETER Experiment Name: At_100uM_ABA_Mutants__P Parameter: Treatment Value: None
  misc_feature: MA Experiment ID: 20001556 Result: Down-regulated in Transcription
  misc_feature: MA Experiment 20001556 PARAMETER Experiment Name: At_Drought_Soil_Dry_P Parameter: Age (day) Value: 26
  misc_feature: MA Experiment 20001556 PARAMETER Experiment Name: At_Drought_Soil_Dry_P Parameter: Organism Value: A. thaliana
  misc_feature: MA Experiment 20001556 PARAMETER Experiment Name: At_Drought_Soil_Dry_P Parameter: Plant Line Value: WS
  misc_feature: MA Experiment 20001556 PARAMETER Experiment Name: At_Drought_Soil_Dry_P Parameter: Post Timepoint (hr) Value: None
  misc_feature: MA Experiment 20001556 PARAMETER Experiment Name: At_Drought_Soil_Dry_P Parameter: Post-Treatment Value: None
  misc_feature: MA Experiment 20001556 PARAMETER Experiment Name: At_Drought_Soil_Dry_P Parameter: Timepoint (day) Value: 12
  misc_feature: MA Experiment 20001556 PARAMETER Experiment Name: At_Drought_Soil_Dry_P Parameter: Treatment Value: Drought vs. No Drought
  misc_feature: MA Experiment ID: 20001755 Result: Down-regulated in Transcription
  misc_feature: MA Experiment 20001755 PARAMETER Experiment Name: At_50mM_NH4NO3_L-to-H_P Parameter: Timepoint (hr) Value: 2
  misc_feature: MA Experiment 20001755 PARAMETER Experiment Name: At_50mM_NH4NO3_L-to-H_P Parameter: Tissue Value: Leaf
  misc_feature: MA Experiment 20001755 PARAMETER Experiment Name: At_50mM_NH4NO3_L-to-H_P Parameter: Treatment Value: 50mM NH4NO3 vs 100mM Mannitol
  misc_feature: Pfam Name: WD40 Pfam Description: WD domain, G-beta repeat
atggattgcataaagagtattggtagatccgctttcgttgccatcgcgccggaatctccgttcatagcagccggaacaatggccggagcagtagatctttcgtttagttcatccgccaatctcgagatctttgaactcgattttcagtccaacgatcgtgagctaaaactagtaggtcaatgccaaagttccgagcggtttaatcgactcgcttggggaagttatggctctggatccgatggtctcatagccggtggtctagttgacgggaacatcggtttatggaatccaattagttctgagtctggtgaaattgcgcacgttagagatttgtcaaaacacaaaggacctgttcgtggtcttgaatttaatgttaagtctccaaatcaacttgcttctggggctgatgatggtacagtttgtatttgggatttagcaaatccttcaaagccttctcattatctaaagggtactggttcttatatgcaaagtgaaatctcttctttatcatggaataaagggtttcaacatgttttagcatctacctcacacaacgggactacagtgatatgggatgtgaataacgagaagattataacagacttgaaaactaccgttaggtgctcagttttgcaatgggatcctgatcattttaatcagattttggttgcttcagatgaagatagttcaccgaatgtgaagagtggtgatacttgttatacaacaggtgtgattgcaatggagtggtgtccaagtgacagcttgtatctacttacctgtgggaaagacaaccgaactatttgttggaacacaaagacaggaaagattgtggctgagttacctactggtcaaaactggaattttgatgttcattggtatccaaagatgcctggagttatatcagcatcttcagttgatgggaaaattggcatctataaccttgaggtagctctttgcagtttcgttttggtctttctgcatagcttggccacagaaaaaagtttggtgaatcgaatttctaaatttgaagctgcattagaaaatggagagaagacttcccttaggggtttatgcgagaagaaaacagaagaggccgaatctgaggaagagaaggaaacatggggactgctgaaaattatgcttgaagaagatgggaacgcaaagacgaagttgcgtagccatcttggctttagtttaccatctgaggaaaatgatcaaactgctaatgagcctcatgctacatgttcttctacaaacgtggaagaaactcagaaagtgccagaaccagaaggagaagaagaagagagctctgatccaacatttgatgatgccatccaacgttcattgattgtgggagattacaaggaagcagtggctcagtgtttttctgcaaataagatggctgatgctttagttattgctcatgttggtggtacagaattgtgggagagtactcgtgataaatatataaggatgagcaatgctccttacatgaaggttgtttctgcaatgatgaacaatgatctaatgacctaccttcatacaagacaacctaaatcctggaaagaaactcttgctctcatctgcacttttgcagaaggagatgaatggataagcctctgcgatgctcttgcctcaaatttgatggctgctggttttactttggctgcaactctgtgttacatttgcgcaggcaatgtcgacaaaacagtagacatttggtcaatgagccttgaaaaacaaagtgctgggaaatcttatgctgagtgtgttcaagatcttatggagaaaactcttgtccttgctttgacaacttgcaacaagagagtcagtgcgtctctacgtaaactctttgaaagttatgctgagatattggctagtcaaggacttattgcaacagctatgaagttcttaaaacttctggagtctggtgatttctcacctgaactttcaatcttgcgtgatcggatttctctgtatgcagaacctgaagctgctaacacttctgcttcaacaaacactcagcctaaaatttccaatccatatcaagagaaatcttttactccagctccattaagcaatgctcagccatcaagaagtattactttttttcctttgaatcctcctcgagaactaaagaacgcggaccaatatcagcaaccaaccatggattatcattcatttaatcgatccgctggcccagcttacaatgctccacccggtcctggttcatatcgatccatccattcacaagttggtccatatataaactccaagattccccaaactgttgctcctccagtccgacctatgactccaacacaccaggtagcggtgcaaccagaacctgtagctccaccaccaactgttcagactgcagatacttccaatgtaccagcccaccagaaacctattgtggcttcattgacaaggctatttaaagagacatttgaaccattaagaggttattcaagagatactcctgccaagaagcgtgaggcagaagataattgctcaagaaagctaggagctctgttttcaaaactaaataatggggacatctcgaagaacgctgctgaaaaactcactcagctctgtcaagctctggacaaacgtgattttggtgcagcgttaaaaatacaggggcttatgacaagcaccgaatgggatgagtgcagttcttggcttccaacacttaagaaaatgatcgtcacgggaaggcaaaatgtgcggtga

SEQ ID NO: 73246 - protein, 911 aa, Arabidopsis thaliana
  peptide (1)..(911): Ceres Seq. ID no. 4961716
  misc_feature: Pfam Name: WD40 Pfam Description: WD domain, G-beta repeat
  misc_feature (411)..(754): Homolog of NCBI NO: 30695804 NR Description: conserved hypothetical protein [Arabidopsis >gi|20466472|gb|AAM20553.1| putative protein [Arabidopsis
  misc_feature (411)..(754): Homolog of NCBI NO: 30695806 NR Description: conserved hypothetical protein [Arabidopsis
  misc_feature (1)..(237): Homolog of NCBI NO: 30695804 NR Description: conserved hypothetical protein [Arabidopsis >gi|20466472|gb|AAM20553.1| putative protein [Arabidopsis
  misc_feature (1)..(237): Homolog of NCBI NO: 30695806 NR Description: conserved hypothetical protein [Arabidopsis
  misc_feature (324)..(423): Homolog of NCBI NO: 30695804 NR Description: conserved hypothetical protein [Arabidopsis >gi|20466472|gb|AAM20553.1| putative protein [Arabidopsis
  misc_feature (324)..(423): Homolog of NCBI NO: 30695806 NR Description: conserved hypothetical protein [Arabidopsis
  misc_feature (411)..(754): Homolog of NCBI NO: 11357943 NR Description: hypothetical protein MAA21.90 - Arabidopsis >gi|7573329|emb|CAB87799.1| putative protein [Arabidopsis
  misc_feature (1)..(237): Homolog of NCBI NO: 11357943 NR Description: hypothetical protein MAA21.90 - Arabidopsis >gi|7573329|emb|CAB87799.1| putative protein [Arabidopsis
  misc_feature (332)..(423): Homolog of NCBI NO: 11357943 NR Description: hypothetical protein MAA21.90 - Arabidopsis >gi|7573329|emb|CAB87799.1| putative protein [Arabidopsis
  misc_feature (98)..(315): Homolog of NCBI NO: 30695804 NR Description: conserved hypothetical protein [Arabidopsis >gi|20466472|gb|AAM20553.1| putative protein [Arabidopsis
MDCIKSIGRSAFVAIAPESPFIAAGTMAGAVDLSFSSSANLEIFELDFQSNDRELKLVGQCQSSERFNRLAWGSYGSGSDGLIAGGLVDGNIGLWNPISSESGEIAHVRDLSKHKGPVRGLEFNVKSPNQLASGADDGTVCIWDLANPSKPSHYLKGTGSYMQSEISSLSWNKGFQHVLASTSHNGTTVIWDVNNEKIITDLKTTVRCSVLQWDPDHFNQILVASDEDSSPNVKSGDTCYTTGVIAMEWCPSDSLYLLTCGKDNRTICWNTKTGKIVAELPTGQNWNFDVHWYPKMPGVISASSVDGKIGIYNLEVALCSFVLVFLHSLATEKSLVNRISKFEAALENGEKTSLRGLCEKKTEEAESEEEKETWGLLKIMLEEDGNAKTKLRSHLGFSLPSEENDQTANEPHATCSSTNVEETQKVPEPEGEEEESSDPTFDDAIQRSLIVGDYKEAVAQCFSANKMADALVIAHVGGTELWESTRDKYIRMSNAPYMKVVSAMMNNDLMTYLHTRQPKSWKETLALICTFAEGDEWISLCDALASNLMAAGFTLAATLCYICAGNVDKTVDIWSMSLEKQSAGKSYAECVQDLMEKTLVLALTTCNKRVSASLRKLFESYAEILASQGLIATAMKFLKLLESGDFSPELSILRDRISLYAEPEAANTSASTNTQPKISNPYQEKSFTPAPLSNAQPSRSITFFPLNPPRELKNADQYQQPTMDYHSFNRSAGPAYNAPPGPGSYRSIHSQVGPYINSKIPQTVAPPVRPMTPTHQVAVQPEPVAPPPTVQTADTSNVPAHQKPIVASLTRLFKETFEPLRGYSRDTPAKKREAEDNCSRKLGALFSKLNNGDISKNAAEKLTQLCQALDKRDFGAALKIQGLMTSTEWDECSSWLPTLKKMIVTGRQNVR

SEQ ID NO: 73247 - protein, 885 aa, Arabidopsis thaliana
  peptide (1)..(885): Ceres Seq. ID no. 4961717
  misc_feature: Pfam Name: WD40 Pfam Description: WD domain, G-beta repeat
  misc_feature (385)..(728): Homolog of NCBI NO: 30695804 NR Description: conserved hypothetical protein [Arabidopsis >gi|20466472|gb|AAM20553.1| putative protein [Arabidopsis
  misc_feature (385)..(728): Homolog of NCBI NO: 30695806 NR Description: conserved hypothetical protein [Arabidopsis
  misc_feature (1)..(211): Homolog of NCBI NO: 30695804 NR Description: conserved hypothetical protein [Arabidopsis >gi|20466472|gb|AAM20553.1| putative protein [Arabidopsis
  misc_feature (1)..(211): Homolog of NCBI NO: 30695806 NR Description: conserved hypothetical protein [Arabidopsis
  misc_feature (298)..(397): Homolog of NCBI NO: 30695804 NR Description: conserved hypothetical protein [Arabidopsis >gi|20466472|gb|AAM20553.1| putative protein [Arabidopsis
  misc_feature (298)..(397): Homolog of NCBI NO: 30695806 NR Description: conserved hypothetical protein [Arabidopsis
  misc_feature (385)..(728): Homolog of NCBI NO: 11357943 NR Description: hypothetical protein MAA21.90 - Arabidopsis >gi|7573329|emb|CAB87799.1| putative protein [Arabidopsis
  misc_feature (1)..(211): Homolog of NCBI NO: 11357943 NR Description: hypothetical protein MAA21.90 - Arabidopsis >gi|7573329|emb|CAB87799.1| putative protein [Arabidopsis
  misc_feature (306)..(397): Homolog of NCBI NO: 11357943 NR Description: hypothetical protein MAA21.90 - Arabidopsis >gi|7573329|emb|CAB87799.1| putative protein [Arabidopsis
  misc_feature (72)..(289): Homolog of NCBI NO: 30695804 NR Description: conserved hypothetical protein [Arabidopsis >gi|20466472|gb|AAM20553.1| putative protein [Arabidopsis
MAGAVDLSFSSSANLEIFELDFQSNDRELKLVGQCQSSERFNRLAWGSYGSGSDGLIAGGLVDGNIGLWNPISSESGEIAHVRDLSKHKGPVRGLEFNVKSPNQLASGADDGTVCIWDLANPSKPSHYLKGTGSYMQSEISSLSWNKGFQHVLASTSHNGTTVIWDVNNEKIITDLKTTVRCSVLQWDPDHFNQILVASDEDSSPNVKSGDTCYTTGVIAMEWCPSDSLYLLTCGKDNRTICWNTKTGKIVAELPTGQNWNFDVHWYPKMPGVISASSVDGKIGIYNLEVALCSFVLVFLHSLATEKSLVNRISKFEAALENGEKTSLRGLCEKKTEEAESEEEKETWGLLKIMLEEDGNAKTKLRSHLGFSLPSEENDQTANEPHATCSSTNVEETQKVPEPEGEEEESSDPTFDDAIQRSLIVGDYKEAVAQCFSANKMADALVIAHVGGTELWESTRDKYIRMSNAPYMKVVSAMMNNDLMTYLHTRQPKSWKETLALICTFAEGDEWISLCDALASNLMAAGFTLAATLCYICAGNVDKTVDIWSMSLEKQSAGKSYAECVQDLMEKTLVLALTTCNKRVSASLRKLFESYAEILASQGLIATAMKFLKLLESGDFSPELSILRDRISLYAEPEAANTSASTNTQPKISNPYQEKSFTPAPLSNAQPSRSITFFPLNPPRELKNADQYQQPTMDYHSFNRSAGPAYNAPPGPGSYRSIHSQVGPYINSKIPQTVAPPVRPMTPTHQVAVQPEPVAPPPTVQTADTSNVPAHQKPIVASLTRLFKETFEPLRGYSRDTPAKKREAEDNCSRKLGALFSKLNNGDISKNAAEKLTQLCQALDKRDFGAALKIQGLMTSTEWDECSSWLPTLKKMIVTGRQNVR

SEQ ID NO: 73248 - protein, 750 aa, Arabidopsis thaliana
  peptide (1)..(750): Ceres Seq. ID no. 4961718
  misc_feature: Pfam Name: WD40 Pfam Description: WD domain, G-beta repeat
  misc_feature (250)..(593): Homolog of NCBI NO: 30695804 NR Description: conserved hypothetical protein [Arabidopsis >gi|20466472|gb|AAM20553.1| putative protein [Arabidopsis
  misc_feature (250)..(593): Homolog of NCBI NO: 30695806 NR Description: conserved hypothetical protein [Arabidopsis
  misc_feature (1)..(76): Homolog of NCBI NO: 30695804 NR Description: conserved hypothetical protein [Arabidopsis >gi|20466472|gb|AAM20553.1| putative protein [Arabidopsis
  misc_feature (1)..(76): Homolog of NCBI NO: 30695806 NR Description: conserved hypothetical protein [Arabidopsis
  misc_feature (163)..(262): Homolog of NCBI NO: 30695804 NR Description: conserved hypothetical protein [Arabidopsis >gi|20466472|gb|AAM20553.1| putative protein [Arabidopsis
  misc_feature (163)..(262): Homolog of NCBI NO: 30695806 NR Description: conserved hypothetical protein [Arabidopsis
  misc_feature (250)..(593): Homolog of NCBI NO: 11357943 NR Description: hypothetical protein MAA21.90 - Arabidopsis >gi|7573329|emb|CAB87799.1| putative protein [Arabidopsis
  misc_feature (1)..(76): Homolog of NCBI NO: 11357943 NR Description: hypothetical protein MAA21.90 - Arabidopsis >gi|7573329|emb|CAB87799.1| putative protein [Arabidopsis
  misc_feature (171)..(262): Homolog of NCBI NO: 11357943 NR Description: hypothetical protein MAA21.90 - Arabidopsis >gi|7573329|emb|CAB87799.1| putative protein [Arabidopsis
  misc_feature (1)..(154): Homolog of NCBI NO: 30695804 NR Description: conserved hypothetical protein [Arabidopsis >gi|20466472|gb|AAM20553.1| putative protein [Arabidopsis
MQSEISSLSWNKGFQHVLASTSHNGTTVIWDVNNEKIITDLKTTVRCSVLQWDPDHFNQILVASDEDSSPNVKSGDTCYTTGVIAMEWCPSDSLYLLTCGKDNRTICWNTKTGKIVAELPTGQNWNFDVHWYPKMPGVISASSVDGKIGIYNLEVALCSFVLVFLHSLATEKSLVNRISKFEAALENGEKTSLRGLCEKKTEEAESEEEKETWGLLKIMLEEDGNAKTKLRSHLGFSLPSEENDQTANEPHATCSSTNVEETQKVPEPEGEEEESSDPTFDDAIQRSLIVGDYKEAVAQCFSANKMADALVIAHVGGTELWESTRDKYIRMSNAPYMKVVSAMMNNDLMTYLHTRQPKSWKETLALICTFAEGDEWISLCDALASNLMAAGFTLAATLCYICAGNVDKTVDIWSMSLEKQSAGKSYAECVQDLMEKTLVLALTTCNKRVSASLRKLFESYAEILASQGLIATAMKFLKLLESGDFSPELSILRDRISLYAEPEAANTSASTNTQPKISNPYQEKSFTPAPLSNAQPSRSITFFPLNPPRELKNADQYQQPTMDYHSFNRSAGPAYNAPPGPGSYRSIHSQVGPYINSKIPQTVAPPVRPMTPTHQVAVQPEPVAPPPTVQTADTSNVPAHQKPIVASLTRLFKETFEPLRGYSRDTPAKKREAEDNCSRKLGALFSKLNNGDISKNAAEKLTQLCQALDKRDFGAALKIQGLMTSTEWDECSSWLPTLKKMIVTGRQNVR

SEQ ID NO: 73249 - DNA, 588 bp, Arabidopsis thaliana
  misc_feature (1)..(588): Ceres Seq. ID no. 4961726
  misc_feature: MA Experiment ID: 20000307 Result: Up-regulated in Transcription
  misc_feature: MA Experiment 20000307 PARAMETER Experiment Name: At_Germinating_Seeds_Sub_P Parameter: Age (hr) Value: 24 vs. 0
  misc_feature: MA Experiment 20000307 PARAMETER Experiment Name: At_Germinating_Seeds_Sub_P Parameter: Organism Value: A. thaliana
  misc_feature: MA Experiment 20000307 PARAMETER Experiment Name: At_Germinating_Seeds_Sub_P Parameter: Plant Line Value: WS
  misc_feature: MA Experiment 20000307 PARAMETER Experiment Name: At_Germinating_Seeds_Sub_P Parameter: Tissue Value: Germinating Seeds
  misc_feature: MA Experiment ID: 20000314 Result: Up-regulated in Transcription
  misc_feature: MA Experiment 20000314 PARAMETER Experiment Name: At_14day_Shoots-Roots_Sub_P Parameter: Age (day) Value: 14
  misc_feature: MA Experiment 20000314 PARAMETER Experiment Name: At_14day_Shoots-Roots_Sub_P Parameter: Organism Value: A. thaliana
  misc_feature: MA Experiment 20000314 PARAMETER Experiment Name: At_14day_Shoots-Roots_Sub_P Parameter: Plant Line Value: WS
  misc_feature: MA Experiment 20000314 PARAMETER Experiment Name: At_14day_Shoots-Roots_Sub_P Parameter: Tissue Value: Roots vs. Whole Plant
  misc_feature: MA Experiment ID: 20000347 Result: Up-regulated in Transcription
  misc_feature: MA Experiment 20000347 PARAMETER Experiment Name: At_2mM_SA_Sub_P Parameter: Age (day) Value: 14
  misc_feature: MA Experiment 20000347 PARAMETER Experiment Name: At_2mM_SA_Sub_P Parameter: Organism Value: A. thaliana
  misc_feature: MA Experiment 20000347 PARAMETER Experiment Name: At_2mM_SA_Sub_P Parameter: Plant Line Value: WS
  misc_feature: MA Experiment 20000347 PARAMETER Experiment Name: At_2mM_SA_Sub_P Parameter: Timepoint (hr) Value: 6
  misc_feature: MA Experiment 20000347 PARAMETER Experiment Name: At_2mM_SA_Sub_P Parameter: Tissue Value: Aerial
  misc_feature: MA Experiment 20000347 PARAMETER Experiment Name: At_2mM_SA_Sub_P Parameter: Treatment Value: 2mM SA vs. No Treatment
atgatgtgcatgaaatgcatgataattcagccagtaggtgctagttgctcaaatatttcatgtagttcatcaatgggaaaatattactgtaaaatatgcaagttgtttgacgatgatagggaaatctatcattgtccatactgcaatctctgccggctaggaaaaggactgagcatagactactttcattgcatgaaatgtaatgcttgtatgtcgcgactcatagtagaacatgtatgcagagaaaagtgcttagaagataattgtccgatttgtcatgaatacatatttacctcaaattctccggtgaaggctcttccatgcggtcacgtgatgcattcaacatgctttcaggagtacacatgttcgcattacacatgccctatttgcagcaagtcgctcggggatatgcaggtttactttagaatgttagacgcactgcttgcagaacaaaagatgccagatgaatacttaaaccaaactcaggtaatactgtgtaatgactgtggaagaaaggggaatgctccttaccattggctctatcacaagtgttcttcttgtgcctcctacaacaccagacttttctag

SEQ ID NO: 73250 - protein, 195 aa, Arabidopsis thaliana
  peptide (1)..(195): Ceres Seq. ID no. 4961727
  misc_feature (89)..(130): Pfam Name: Zinc finger, C3HC4 type (RING finger) Pfam Description: Zinc finger, C3HC4 type (RING finger)
  misc_feature (1)..(195): Homolog of NCBI NO: 15221895 NR Description: hypothetical protein; protein id: At1g18910.1
  misc_feature (1)..(195): Homolog of NCBI NO: 25402866 NR Description: protein F14D16.3 [imported] - Arabidopsis >gi|8778297|gb|AAF79306.1|AC068602_29 F14D16.3 [Arabidopsis
  misc_feature (1)..(194): Homolog of NCBI NO: 15221379 NR Description: hypothetical protein; protein id: At1g74760.1
  misc_feature (1)..(194): Homolog of NCBI NO: 34911328 NR Description: putative zinc finger protein [Oryza sativa
  misc_feature (1)..(194): Homolog of NCBI NO: 22347790 NR Description: putative zinc finger protein [Zea mays]
  misc_feature (1)..(194): Homolog of NCBI NO: 9279663 NR Description: gb|AAD55299.1~gene_id:MIE15.8~similar to unknown
  misc_feature (1)..(194): Homolog of NCBI NO: 15229615 NR Description: zinc finger protein, putative; protein id: supported by cDNA: gi_20453198 [Arabidopsis thaliana] AT3g18290/MIE15_8 [Arabidopsis thaliana]
  misc_feature (1)..(137): Homolog of NCBI NO: 29367543 NR Description: putative zinc finger protein [Oryza sativa
  misc_feature (1)..(192): Homolog of NCBI NO: 32413120 NR Description: hypothetical protein [Neurospora crassa] conserved hypothetical protein [Neurospora crassa]
  misc_feature (1)..(192): Homolog of NCBI NO: 19115306 NR Description: hypothetical zinc-finger protein; with possible
MMCMKCMIIQPVGASCSNISCSSSMGKYYCKICKLFDDDREIYHCPYCNLCRLGKGLSIDYFHCMKCNACMSRLIVEHVCREKCLEDNCPICHEYIFTSNSPVKALPCGHVMHSTCFQEYTCSHYTCPICSKSLGDMQVYFRMLDALLAEQKMPDEYLNQTQVILCNDCGRKGNAPYHWLYHKCSSCASYNTRLF

SEQ ID NO: 73251 - protein, 194 aa, Arabidopsis thaliana
  peptide (1)..(194): Ceres Seq. ID no. 4961728
  misc_feature (88)..(129): Pfam Name: Zinc finger, C3HC4 type (RING finger) Pfam Description: Zinc finger, C3HC4 type (RING finger)
  misc_feature (1)..(194): Homolog of NCBI NO: 15221895 NR Description: hypothetical protein; protein id: At1g18910.1
  misc_feature (1)..(194): Homolog of NCBI NO: 25402866 NR Description: protein F14D16.3 [imported] - Arabidopsis >gi|8778297|gb|AAF79306.1|AC068602_29 F14D16.3 [Arabidopsis
  misc_feature (1)..(193): Homolog of NCBI NO: 15221379 NR Description: hypothetical protein; protein id: At1g74760.1
  misc_feature (1)..(193): Homolog of NCBI NO: 34911328 NR Description: putative zinc finger protein [Oryza sativa
  misc_feature (1)..(193): Homolog of NCBI NO: 22347790 NR Description: putative zinc finger protein [Zea mays]
  misc_feature (1)..(193): Homolog of NCBI NO: 9279663 NR Description: gb|AAD55299.1~gene_id:MIE15.8~similar to unknown
  misc_feature (1)..(193): Homolog of NCBI NO: 15229615 NR Description: zinc finger protein, putative; protein id: supported by cDNA: gi_20453198 [Arabidopsis thaliana] AT3g18290/MIE15_8 [Arabidopsis thaliana]
  misc_feature (1)..(136): Homolog of NCBI NO: 29367543 NR Description: putative zinc finger protein [Oryza sativa
  misc_feature (1)..(191): Homolog of NCBI NO: 32413120 NR Description: hypothetical protein [Neurospora crassa] conserved hypothetical protein [Neurospora crassa]
  misc_feature (1)..(191): Homolog of NCBI NO: 19115306 NR Description: hypothetical zinc-finger protein; with possible
MCMKCMIIQPVGASCSNISCSSSMGKYYCKICKLFDDDREIYHCPYCNLCRLGKGLSIDYFHCMKCNACMSRLIVEHVCREKCLEDNCPICHEYIFTSNSPVKALPCGHVMHSTCFQEYTCSHYTCPICSKSLGDMQVYFRMLDALLAEQKMPDEYLNQTQVILCNDCGRKGNAPYHWLYHKCSSCASYNTRLF

SEQ ID NO: 73252 - protein, 192 aa, Arabidopsis thaliana
  peptide (1)..(192): Ceres Seq. ID no. 4961729
  misc_feature (86)..(127): Pfam Name: Zinc finger, C3HC4 type (RING finger) Pfam Description: Zinc finger, C3HC4 type (RING finger)
  misc_feature (1)..(192): Homolog of NCBI NO: 15221895 NR Description: hypothetical protein; protein id: At1g18910.1
  misc_feature (1)..(192): Homolog of NCBI NO: 25402866 NR Description: protein F14D16.3 [imported] - Arabidopsis >gi|8778297|gb|AAF79306.1|AC068602_29 F14D16.3 [Arabidopsis
  misc_feature (1)..(191): Homolog of NCBI NO: 15221379 NR Description: hypothetical protein; protein id: At1g74760.1
  misc_feature (1)..(191): Homolog of NCBI NO: 34911328 NR Description: putative zinc finger protein [Oryza sativa
  misc_feature (1)..(191): Homolog of NCBI NO: 22347790 NR Description: putative zinc finger protein [Zea mays]
  misc_feature (1)..(191): Homolog of NCBI NO: 9279663 NR Description: gb|AAD55299.1~gene_id:MIE15.8~similar to unknown
  misc_feature (1)..(191): Homolog of NCBI NO: 15229615 NR Description: zinc finger protein, putative; protein id: supported by cDNA: gi_20453198 [Arabidopsis thaliana] AT3g18290/MIE15_8 [Arabidopsis thaliana]
  misc_feature (1)..(134): Homolog of NCBI NO: 29367543 NR Description: putative zinc finger protein [Oryza sativa
  misc_feature (1)..(189): Homolog of NCBI NO: 32413120 NR Description: hypothetical protein [Neurospora crassa] conserved hypothetical protein [Neurospora crassa]
  misc_feature (1)..(189): Homolog of NCBI NO: 19115306 NR Description: hypothetical zinc-finger protein; with possible
MKCMIIQPVGASCSNISCSSSMGKYYCKICKLFDDDREIYHCPYCNLCRLGKGLSIDYFHCMKCNACMSRLIVEHVCREKCLEDNCPICHEYIFTSNSPVKALPCGHVMHSTCFQEYTCSHYTCPICSKSLGDMQVYFRMLDALLAEQKMPDEYLNQTQVILCNDCGRKGNAPYHWLYHKCSSCASYNTRLF

SEQ ID NO: 73253 - DNA, 1398 bp, Arabidopsis thaliana
  misc_feature (1)..(1398): Ceres Seq. ID no. 4961993
  misc_feature: MA Experiment ID: 20000179 Result: Down-regulated in Transcription
  misc_feature: MA Experiment 20000179 PARAMETER Experiment Name: At_Germinating_Seeds_P Parameter: Age (hr) Value: 6 vs. 0
  misc_feature: MA Experiment 20000179 PARAMETER Experiment Name: At_Germinating_Seeds_P Parameter: Tissue Value: Germinating Seeds
  misc_feature: MA Experiment ID: 20000180 Result: Down-regulated in Transcription
  misc_feature: MA Experiment 20000180 PARAMETER Experiment Name: At_Germinating_Seeds_P Parameter: Age (hr) Value: 24 vs. 0
  misc_feature: MA Experiment 20000180 PARAMETER Experiment Name: At_Germinating_Seeds_P Parameter: Tissue Value: Germinating Seeds
  misc_feature: MA Experiment ID: 20000227 Result: Down-regulated in Transcription
  misc_feature: MA Experiment 20000227 PARAMETER Experiment Name: At_Root-Tips-vs-Tops_P Parameter: Tissue Value: Root Tips vs. Root Tops
  misc_feature: MA Experiment ID: 20000234 Result: Down-regulated in Transcription
  misc_feature: MA Experiment 20000234 PARAMETER Experiment Name: At_Siliques_P Parameter: Age (day) Value: 21
  misc_feature: MA Experiment 20000234 PARAMETER Experiment Name: At_Siliques_P Parameter: Organism Value: A. thaliana
  misc_feature: MA Experiment 20000234 PARAMETER Experiment Name: At_Siliques_P Parameter: Plant Line Value: WS
  misc_feature: MA Experiment 20000234 PARAMETER Experiment Name: At_Siliques_P Parameter: Tissue Value: Less Than 5mm Siliques vs. Whole Plant
  misc_feature: MA Experiment ID: 20000235 Result: Down-regulated in Transcription
  misc_feature: MA Experiment 20000235 PARAMETER Experiment Name: At_Siliques_P Parameter: Age (day) Value: 21
  misc_feature: MA Experiment 20000235 PARAMETER Experiment Name: At_Siliques_P Parameter: Organism Value: A. thaliana
  misc_feature: MA Experiment 20000235 PARAMETER Experiment Name: At_Siliques_P Parameter: Plant Line Value: WS
  misc_feature: MA Experiment 20000235 PARAMETER Experiment Name: At_Siliques_P Parameter: Tissue Value: 5-10mm Siliques vs. Whole Plant
  misc_feature: MA Experiment ID: 20000264 Result: Down-regulated in Transcription
  misc_feature: MA Experiment 20000264 PARAMETER Experiment Name: At_Open_Flower_P Parameter: Age (day) Value: 21
  misc_feature: MA Experiment 20000264 PARAMETER Experiment Name: At_Open_Flower_P Parameter: Plant Line Value: WS
  misc_feature: MA Experiment 20000264 PARAMETER Experiment Name: At_Open_Flower_P Parameter: Tissue Value: Open Flower vs. Whole Plant
  misc_feature: MA Experiment ID: 20000265 Result: Down-regulated in Transcription
  misc_feature: MA Experiment 20000265 PARAMETER Experiment Name: At_Open_Flower_P Parameter: Age (day) Value: 21
  misc_feature: MA Experiment 20000265 PARAMETER Experiment Name: At_Open_Flower_P Parameter: Plant Line Value: WS
  misc_feature: MA Experiment 20000265 PARAMETER Experiment Name: At_Open_Flower_P Parameter: Tissue Value: Closed Flower vs. Whole Plant
  misc_feature: MA Experiment ID: 20000286 Result: Down-regulated in Transcription
  misc_feature: MA Experiment 20000286 PARAMETER Experiment Name: At_Open_Flower_P Parameter: Age (day) Value: 21
  misc_feature: MA Experiment 20000286 PARAMETER Experiment Name: At_Open_Flower_P Parameter: Plant Line Value: WS
  misc_feature: MA Experiment 20000286 PARAMETER Experiment Name: At_Open_Flower_P Parameter: Tissue Value: Half Open vs. Whole Plant
  misc_feature: MA Experiment ID: 20000437 Result: Down-regulated in Transcription
  misc_feature: MA Experiment 20000437 PARAMETER Experiment Name: At_Drought_P Parameter: Age (day) Value: 8
  misc_feature: MA Experiment 20000437 PARAMETER Experiment Name: At_Drought_P Parameter: Organism Value: A. thaliana
  misc_feature: MA Experiment 20000437 PARAMETER Experiment Name: At_Drought_P Parameter: Plant Line Value: WS
  misc_feature: MA Experiment 20000437 PARAMETER Experiment Name: At_Drought_P Parameter: Timepoint (hr) Value: 24
  misc_feature: MA Experiment 20000437 PARAMETER Experiment Name: At_Drought_P Parameter: Tissue Value: Whole Plant
  misc_feature: MA Experiment 20000437 PARAMETER Experiment Name: At_Drought_P Parameter: Treatment Value: Drought vs. No Drought
  misc_feature: MA Experiment ID: 20000441 Result: Up-regulated in Transcription
  misc_feature: MA Experiment 20000441 PARAMETER Experiment Name: At_1uM_BR-BRZ__P Parameter: Tissue Value: Shoot Apices
  misc_feature: MA Experiment 20000441 PARAMETER Experiment Name: At_1uM_BR-BRZ__P Parameter: Treatment Value: 1uM BR vs. No Treatment
  misc_feature: MA Experiment ID: 20000794 Result: Down-regulated in Transcription
  misc_feature: MA Experiment 20000794 PARAMETER Experiment Name: At_Petals_P Parameter: Age (day) Value: 23-25 days
  misc_feature: MA Experiment 20000794 PARAMETER Experiment Name: At_Petals_P Parameter: Plant Line Value: WS
  misc_feature: MA Experiment 20000794 PARAMETER Experiment Name: At_Petals_P Parameter: Tissue Value: Petals vs. Whole plant
  misc_feature: MA Experiment ID: 20001247 Result: Up-regulated in Transcription
  misc_feature: MA Experiment 20001247 PARAMETER Experiment Name: At_Far-red-induction_P Parameter: Age (day) Value: 7
  misc_feature: MA Experiment 20001247 PARAMETER Experiment Name: At_Far-red-induction_P Parameter: Light Value: Far-red vs. White
  misc_feature: MA Experiment 20001247 PARAMETER Experiment Name: At_Far-red-induction_P Parameter: Organism Value: A. thaliana
  misc_feature: MA Experiment 20001247 PARAMETER Experiment Name: At_Far-red-induction_P Parameter: Plant Line Value: Columbia
  misc_feature: MA Experiment 20001247 PARAMETER Experiment Name: At_Far-red-induction_P Parameter: Timepoint (hr) Value: 1
  misc_feature: MA Experiment 20001247 PARAMETER Experiment Name: At_Far-red-induction_P Parameter: Tissue Value: Whole Plant
  misc_feature: MA Experiment ID: 20001451 Result: Up-regulated in Transcription
  misc_feature: MA Experiment 20001451 PARAMETER Experiment Name: At_Far-red-induction_P Parameter: Age (day) Value: 7
  misc_feature: MA Experiment 20001451 PARAMETER Experiment Name: At_Far-red-induction_P Parameter: Light Value: Far-red vs. White
  misc_feature: MA Experiment 20001451 PARAMETER Experiment Name: At_Far-red-induction_P Parameter: Organism Value: A. thaliana
  misc_feature: MA Experiment 20001451 PARAMETER Experiment Name: At_Far-red-induction_P Parameter: Plant Line Value: Columbia
  misc_feature: MA Experiment 20001451 PARAMETER Experiment Name: At_Far-red-induction_P Parameter: Timepoint (hr) Value: 24
  misc_feature: MA Experiment 20001451 PARAMETER Experiment Name: At_Far-red-induction_P Parameter: Tissue Value: Whole Plant
  misc_feature: MA Experiment ID: 20001557 Result: Down-regulated in Transcription
  misc_feature: MA Experiment 20001557 PARAMETER Experiment Name: At_Drought_Soil_Dry_P Parameter: Age (day) Value: 27
  misc_feature: MA Experiment 20001557 PARAMETER Experiment Name: At_Drought_Soil_Dry_P Parameter: Organism Value: A. thaliana
  misc_feature: MA Experiment 20001557 PARAMETER Experiment Name: At_Drought_Soil_Dry_P Parameter: Plant Line Value: WS
  misc_feature: MA Experiment 20001557 PARAMETER Experiment Name: At_Drought_Soil_Dry_P Parameter: Post Timepoint (hr) Value: 3
  misc_feature: MA Experiment 20001557 PARAMETER Experiment Name: At_Drought_Soil_Dry_P Parameter: Post-Treatment Value: Re-Water vs. No Drought
  misc_feature: MA Experiment 20001557 PARAMETER Experiment Name: At_Drought_Soil_Dry_P Parameter: Timepoint (day) Value: 13
  misc_feature: MA Experiment 20001557 PARAMETER Experiment Name: At_Drought_Soil_Dry_P Parameter: Treatment Value: Drought vs. No Drought
  misc_feature: MA Experiment ID: 20001558 Result: Down-regulated in Transcription
  misc_feature: MA Experiment 20001558 PARAMETER Experiment Name: At_Drought_Soil_Dry_P Parameter: Age (day) Value: 27
  misc_feature: MA Experiment 20001558 PARAMETER Experiment Name: At_Drought_Soil_Dry_P Parameter: Organism Value: A. thaliana
  misc_feature: MA Experiment 20001558 PARAMETER Experiment Name: At_Drought_Soil_Dry_P Parameter: Plant Line Value: WS
  misc_feature: MA Experiment 20001558 PARAMETER Experiment Name: At_Drought_Soil_Dry_P Parameter: Post Timepoint (hr) Value: 6
  misc_feature: MA Experiment 20001558 PARAMETER Experiment Name: At_Drought_Soil_Dry_P Parameter: Post-Treatment Value: Re-Water vs. No Drought
  misc_feature: MA Experiment 20001558 PARAMETER Experiment Name: At_Drought_Soil_Dry_P Parameter: Timepoint (day) Value: 13
  misc_feature: MA Experiment 20001558 PARAMETER Experiment Name: At_Drought_Soil_Dry_P Parameter: Treatment Value: Drought vs. No Drought
  misc_feature: MA Experiment ID: 20001911 Result: Up-regulated in Transcription
  misc_feature: MA Experiment 20001911 PARAMETER Experiment Name: At_Drought_Reproduction_P Parameter: Age (day) Value: 40
  misc_feature: MA Experiment 20001911 PARAMETER Experiment Name: At_Drought_Reproduction_P Parameter: Organism Value: A. thaliana
  misc_feature: MA Experiment 20001911 PARAMETER Experiment Name: At_Drought_Reproduction_P Parameter: Plant Line Value: WS
  misc_feature: MA Experiment 20001911 PARAMETER Experiment Name: At_Drought_Reproduction_P Parameter: Timepoint (day) Value: 10
  misc_feature: MA Experiment 20001911 PARAMETER Experiment Name: At_Drought_Reproduction_P Parameter: Tissue Value: Flowers
  misc_feature: MA Experiment 20001911 PARAMETER Experiment Name: At_Drought_Reproduction_P Parameter: Treatment Value: Drought vs. No Drought
atggttgagattcagggaagattcaaaagaattgagtcggctttcaacgtagccgcggctcgtgtacatccaccgtgtgataacagtagcggaagcgatcattcgccggatctttccgatttggtcgcatcttttatagagaaagagggacaaatagtattacgtgaagaagaagaaacttcttccgacgataacaatttggaagatgtgaatgagaggttacggaagcttctagaaggtttatcctgtggcgaagagcggatgagaatactgtcagcgacgatggaggttgctggaacgttcgtcggagatattagttcttctaagcgtcacttaatggcgtttctacgtaacaagggttttgatgcaggtctttgcaagtcgagttgggaaagattcggcaaaaacaccggcggaaaatacgagtacgtcgacgttcgttgtggcggagattataataatcggtatttcgtcgagacaaaccttgccggagagtttgagatagctagaccaacgaaaaggtacctctcaatactaagccaagtgccacgcgtcttcgtgggaacttcagaggaactgaaactgctcgtgagaatcatgtgccatgagatgagacggtcgatgaagcacgtagggatccacgtgccaccgtggaggagaaacggttacatgcaagctaagtggttcggtttctataaacgaacttcgacgaccaataactacgaaatggttaatacttatgatacgactgcgtttaagggttgcaaggaagagttttgggaagctaaaggtcttaaggttatggttggtcagctttcgattgctttcaacattagtgcgctttgccggaaaggaaccgttcatccgtcgccaccgccggcgataaagaccgacgaacagtttctatctcttctccccgtagctatcctctctctcgtggcggcgctctcggtggaggatcgtgaagttcttgcttacctcatctcaaactccggcgactcaaatcgtatctctcgtctcaagaaaaacaaagaagataatcatcactctcctctctttctttgtgattgttttagttgttacacgagttactgggtcagatgggacacgtcaccgaggcgccaactcattcacgagatcatcgatgcttacgaagatagtttggagatgaagaagaaaaagaaagatcggagaaagcgatcgggaaaagcttctggacgagttaactcgataggaacgagtcgactcagtgaattgggttcgagttcagccgagtttgctggtggtgactcggagaaagatggaaattgcggcggtgaagaggcggagaaggagaaaggctccgttggaaaggttatgagtttcattggtcagagatttttgggagtttggggataa

SEQ ID NO: 73254 - protein, 465 aa, Arabidopsis thaliana
  peptide (1)..(465): Ceres Seq. ID no. 4961994
  misc_feature (38)..(234): Pfam Name: Protein of unknown function (DUF506) Pfam Description: Protein of unknown function (DUF506)
  misc_feature (1)..(465): Homolog of NCBI NO: 15220778 NR Description: unknown protein; protein id: At1g62420.1
  misc_feature (1)..(281): Homolog of NCBI NO: 7486102 NR Description: hypothetical protein F24O1.16 - Arabidopsis >gi|7940287|gb|AAF70846.1|AC003113_13 F2401.16 [Arabidopsis >gi|26450592|dbj|BAC42408.1| unknown protein [Arabidopsis
  misc_feature (265)..(465): Homolog of NCBI NO: 7486149 NR Description: hypothetical protein F25O1.15 - Arabidopsis
  misc_feature (281)..(465): Homolog of NCBI NO: 7940288 NR Description: F2401.15 [Arabidopsis thaliana]
  misc_feature (1)..(277): Homolog of NCBI NO: 15221175 NR Description: hypothetical protein; protein id: At1g12030.1
  misc_feature (281)..(422): Homolog of NCBI NO: 15221172 NR Description: unknown protein; protein id: At1g12020.1, by cDNA: gi_18252908 [Arabidopsis thaliana]
  misc_feature (408)..(465): Homolog of NCBI NO: 15221172 NR Description: unknown protein; protein id: At1g12020.1, by cDNA: gi_18252908 [Arabidopsis thaliana]
  misc_feature (4)..(234): Homolog of NCBI NO: 15230824 NR Description: hypothetical protein; protein id: At3g25240.1 thaliana] >gi|9294181|dbj|BAB02083.1|
  misc_feature (68)..(249): Homolog of NCBI NO: 18397919 NR Description: expressed protein; protein id: At3g07350.1, by cDNA: 251012., supported by cDNA: gi_15028230, supported by gi_21280936 [Arabidopsis thaliana]
  misc_feature (68)..(249): Homolog of NCBI NO: 21554332 NR Description: unknown [Arabidopsis thaliana]
MVEIQGRFKRIESAFNVAAARVHPPCDNSSGSDHSPDLSDLVASFIEKEGQIVLREEEETSSDDNNLEDVNERLRKLLEGLSCGEERMRILSATMEVAGTFVGDISSSKRHLMAFLRNKGFDAGLCKSSWERFGKNTGGKYEYVDVRCGGDYNNRYFVETNLAGEFEIARPTKRYLSILSQVPRVFVGTSEELKLLVRIMCHEMRRSMKHVGIHVPPWRRNGYMQAKWFGFYKRTSTTNNYEMVNTYDTTAFKGCKEEFWEAKGLKVMVGQLSIAFNISALCRKGTVHPSPPPAIKTDEQFLSLLPVAILSLVAALSVEDREVLAYLISNSGDSNRISRLKKNKEDNHHSPLFLCDCFSCYTSYWVRWDTSPRRQLIHEIIDAYEDSLEMKKKKKDRRKRSGKASGRVNSIGTSRLSELGSSSAEFAGGDSEKDGNCGGEEAEKEKGSVGKVMSFIGQRFLGVWG

SEQ ID NO: 73255 - protein, 378 aa, Arabidopsis thaliana
  peptide (1)..(378): Ceres Seq. ID no. 4961995
  misc_feature (1)..(147): Pfam Name: Protein of unknown function (DUF506) Pfam Description: Protein of unknown function (DUF506)
  misc_feature (1)..(378): Homolog of NCBI NO: 15220778 NR Description: unknown protein; protein id: At1g62420.1
  misc_feature (1)..(194): Homolog of NCBI NO: 7486102 NR Description: hypothetical protein F24O1.16 - Arabidopsis >gi|7940287|gb|AAF70846.1|AC003113_13 F2401.16 [Arabidopsis >gi|26450592|dbj|BAC42408.1| unknown protein [Arabidopsis
  misc_feature (178)..(378): Homolog of NCBI NO: 7486149 NR Description: hypothetical protein F25O1.15 - Arabidopsis
  misc_feature (194)..(378): Homolog of NCBI NO: 7940288 NR Description: F2401.15 [Arabidopsis thaliana]
  misc_feature (1)..(190): Homolog of NCBI NO: 15221175 NR Description: hypothetical protein; protein id: At1g12030.1
  misc_feature (194)..(335): Homolog of NCBI NO: 15221172 NR Description: unknown protein; protein id: At1g12020.1, by cDNA: gi_18252908 [Arabidopsis thaliana]
  misc_feature (321)..(378): Homolog of NCBI NO: 15221172 NR Description: unknown protein; protein id: At1g12020.1, by cDNA: gi_18252908 [Arabidopsis thaliana]
  misc_feature (1)..(147): Homolog of NCBI NO: 15230824 NR Description: hypothetical protein; protein id: At3g25240.1 thaliana] >gi|9294181|dbj|BAB02083.1|
  misc_feature (1)..(162): Homolog of NCBI NO: 18397919 NR Description: expressed protein; protein id: At3g07350.1, by cDNA: 251012., supported by cDNA: gi_15028230, supported by gi_21280936 [Arabidopsis thaliana]
  misc_feature (1)..(162): Homolog of NCBI NO: 21554332 NR Description: unknown [Arabidopsis thaliana]
MRILSATMEVAGTFVGDISSSKRHLMAFLRNKGFDAGLCKSSWERFGKNTGGKYEYVDVRCGGDYNNRYFVETNLAGEFEIARPTKRYLSILSQVPRVFVGTSEELKLLVRIMCHEMRRSMKHVGIHVPPWRRNGYMQAKWFGFYKRTSTTNNYEMVNTYDTTAFKGCKEEFWEAKGLKVMVGQLSIAFNISALCRKGTVHPSPPPAIKTDEQFLSLLPVAILSLVAALSVEDREVLAYLISNSGDSNRISRLKKNKEDNHHSPLFLCDCFSCYTSYWVRWDTSPRRQLIHEIIDAYEDSLEMKKKKKDRRKRSGKASGRVNSIGTSRLSELGSSSAEFAGGDSEKDGNCGGEEAEKEKGSVGKVMSFIGQRFLGVWG

SEQ ID NO: 73256 - protein, 371 aa, Arabidopsis thaliana
  peptide (1)..(371): Ceres Seq. ID no. 4961996
  misc_feature (1)..(140): Pfam Name: Protein of unknown function (DUF506) Pfam Description: Protein of unknown function (DUF506)
  misc_feature (1)..(371): Homolog of NCBI NO: 15220778 NR Description: unknown protein; protein id: At1g62420.1
  misc_feature (1)..(187): Homolog of NCBI NO: 7486102 NR Description: hypothetical protein F24O1.16 - Arabidopsis >gi|7940287|gb|AAF70846.1|AC003113_13 F2401.16 [Arabidopsis >gi|26450592|dbj|BAC42408.1| unknown protein [Arabidopsis
  misc_feature (171)..(371): Homolog of NCBI NO: 7486149 NR Description: hypothetical protein F25O1.15 - Arabidopsis
  misc_feature (187)..(371): Homolog of NCBI NO: 7940288 NR Description: F2401.15 [Arabidopsis thaliana]
  misc_feature (1)..(183): Homolog of NCBI NO: 15221175 NR Description: hypothetical protein; protein id: At1g12030.1
  misc_feature (187)..(328): Homolog of NCBI NO: 15221172 NR Description: unknown protein; protein id: At1g12020.1, by cDNA: gi_18252908 [Arabidopsis thaliana]
  misc_feature (314)..(371): Homolog of NCBI NO: 15221172 NR Description: unknown protein; protein id: At1g12020.1, by cDNA: gi_18252908 [Arabidopsis thaliana]
  misc_feature (1)..(140): Homolog of NCBI NO: 15230824 NR Description: hypothetical protein; protein id: At3g25240.1 thaliana] >gi|9294181|dbj|BAB02083.1|
  misc_feature (1)..(155): Homolog of NCBI NO: 18397919 NR Description: expressed protein; protein id: At3g07350.1, by cDNA: 251012., supported by cDNA: gi_15028230, supported by gi_21280936 [Arabidopsis thaliana]
  misc_feature (1)..(155): Homolog of NCBI NO: 21554332 NR Description: unknown [Arabidopsis thaliana]
MEVAGTFVGDISSSKRHLMAFLRNKGFDAGLCKSSWERFGKNTGGKYEYVDVRCGGDYNNRYFVETNLAGEFEIARPTKRYLSILSQVPRVFVGTSEELKLLVRIMCHEMRRSMKHVGIHVPPWRRNGYMQAKWFGFYKRTSTTNNYEMVNTYDTTAFKGCKEEFWEAKGLKVMVGQLSIAFNISALCRKGTVHPSPPPAIKTDEQFLSLLPVAILSLVAALSVEDREVLAYLISNSGDSNRISRLKKNKEDNHHSPLFLCDCFSCYTSYWVRWDTSPRRQLIHEIIDAYEDSLEMKKKKKDRRKRSGKASGRVNSIGTSRLSELGSSSAEFAGGDSEKDGNCGGEEAEKEKGSVGKVMSFIGQRFLGVWG

SEQ ID NO: 73257 - DNA, 1710 bp, Arabidopsis thaliana
  misc_feature (1)..(1710): Ceres Seq. ID no. 4962173
  misc_feature: MA Experiment ID: 20000173 Result: Down-regulated in Transcription
  misc_feature: MA Experiment 20000173 PARAMETER Experiment Name: At_42deg_Heat_P Parameter: Age (day) Value: 14
  misc_feature: MA Experiment 20000173 PARAMETER Experiment Name: At_42deg_Heat_P Parameter: Organism Value: A. thaliana
  misc_feature: MA Experiment 20000173 PARAMETER Experiment Name: At_42deg_Heat_P Parameter: Plant Line Value: WS
  misc_feature: MA Experiment 20000173 PARAMETER Experiment Name: At_42deg_Heat_P Parameter: Temperature (deg C) Value: 42 vs. 22
  misc_feature: MA Experiment 20000173 PARAMETER Experiment Name: At_42deg_Heat_P Parameter: Timepoint (hr) Value: 6
  misc_feature: MA Experiment 20000173 PARAMETER Experiment Name: At_42deg_Heat_P Parameter: Tissue Value: Aerial
  misc_feature: MA Experiment ID: 20000179 Result: Up-regulated in Transcription
  misc_feature: MA Experiment 20000179 PARAMETER Experiment Name: At_Germinating_Seeds_P Parameter: Age (hr) Value: 6 vs. 0
  misc_feature: MA Experiment 20000179 PARAMETER Experiment Name: At_Germinating_Seeds_P Parameter: Tissue Value: Germinating Seeds
  misc_feature: MA Experiment ID: 20000180 Result: Up-regulated in Transcription
  misc_feature: MA Experiment 20000180 PARAMETER Experiment Name: At_Germinating_Seeds_P Parameter: Age (hr) Value: 24 vs. 0
  misc_feature: MA Experiment 20000180 PARAMETER Experiment Name: At_Germinating_Seeds_P Parameter: Tissue Value: Germinating Seeds
  misc_feature: MA Experiment ID: 20000182 Result: Up-regulated in Transcription
  misc_feature: MA Experiment 20000182 PARAMETER Experiment Name: At_2mM_SA_P Parameter: Age (day) Value: 14
  misc_feature: MA Experiment 20000182 PARAMETER Experiment Name: At_2mM_SA_P Parameter: Organism Value: A. thaliana
  misc_feature: MA Experiment 20000182 PARAMETER Experiment Name: At_2mM_SA_P Parameter: Plant Line Value: WS
  misc_feature: MA Experiment 20000182 PARAMETER Experiment Name: At_2mM_SA_P Parameter: Timepoint (hr) Value: 6
  misc_feature: MA Experiment 20000182 PARAMETER Experiment Name: At_2mM_SA_P Parameter: Tissue Value: Aerial
  misc_feature: MA Experiment 20000182 PARAMETER Experiment Name: At_2mM_SA_P Parameter: Treatment Value: 2mM SA vs. No Treatment
  misc_feature: MA Experiment ID: 20001757 Result: Up-regulated in Transcription
  misc_feature: MA Experiment 20001757 PARAMETER Experiment Name: At_50mM_NH4NO3_L-to-H_P Parameter: Timepoint (hr) Value: 6
  misc_feature: MA Experiment 20001757 PARAMETER Experiment Name: At_50mM_NH4NO3_L-to-H_P Parameter: Tissue Value: Leaf
  misc_feature: MA Experiment 20001757 PARAMETER Experiment Name: At_50mM_NH4NO3_L-to-H_P Parameter: Treatment Value: 50mM NH4NO3 vs 100mM Mannitol
  misc_feature: MA Experiment ID: 20001911 Result: Down-regulated in Transcription
  misc_feature: MA Experiment 20001911 PARAMETER Experiment Name: At_Drought_Reproduction_P Parameter: Age (day) Value: 40
  misc_feature: MA Experiment 20001911 PARAMETER Experiment Name: At_Drought_Reproduction_P Parameter: Organism Value: A. thaliana
  misc_feature: MA Experiment 20001911 PARAMETER Experiment Name: At_Drought_Reproduction_P Parameter: Plant Line Value: WS
  misc_feature: MA Experiment 20001911 PARAMETER Experiment Name: At_Drought_Reproduction_P Parameter: Timepoint (day) Value: 10
  misc_feature: MA Experiment 20001911 PARAMETER Experiment Name: At_Drought_Reproduction_P Parameter: Tissue Value: Flowers
  misc_feature: MA Experiment 20001911 PARAMETER Experiment Name: At_Drought_Reproduction_P Parameter: Treatment Value: Drought vs. No Drought
atggatccaattgaatcagtggagtacaatggctttgaaactaccaatggtaactctcacaacgacgaccatggttggaagaaagtagtgtacccaaaacgtaaccggaagcaaaaaccggcggatcaagcggcggcgacgaagaatggtgtcaccgggaatctaattcccaatggtactttatccaatggaggaggcaacgtcttccgttctcttgaggagcaagctgaaggtcgtcatctacagatcctcgccgcgaagaaagcttccgatacggcggatgtgtcggacgggggaagatctaaatggcgatctaacgggtacggcgacgaagggtatgattttgatgacagcgacagtgaaatcgcggtggggaaggagaatttgaaagcggaggaagttaagaaaccgaaggttaagaaggtgaagaagcctaaggttactttagctgaagctgctgctaagattgatgtatctaatctcgcagctttcctcgttgaagcttcgattccactttctcatattcctgaagcagtgtataagacatcagctgattggattaaccaacgtcccattgaggcacttggagcctttgtattgtggggcttggattgtattcttgctgacttggctgtacaacaaggaggtgtcaagggtggtaagaaaggagcacaacaggcttcttcgaaatctcaggttgcgatatttgtggcggtagcaatggttttgcgtaagaaacctgatgctttaactaatatattgccaactttgagggagaatcccaagtatcagggacaggataagcttccagttacagtttggatgatggctcaggcctcccaaggtgatatatcagtaggcttgtactcgtgggctcacaacttgttaccggtggtcagtagcaagagttgcaatcctcagtcaagggatctcattcttcagttggttgagaggatcttgtccaacccgaaggcccggaccatacttgtaaatggggctgttaggaagggagagcgattgattccacctccttcgtttgagatcttggttcgacttacattccctgcatcttccgcaagagtgaaggctacagagaggtttgaggcaatatatcccttgctgaaggaggtgtctcttgctggtgctcctgggagtaaggcaatgaagcaagtcacacagcaaatattcacttttgctctgaaagcagccggggaagaaaatcccttattagccaaggaagcggctgcaatcactatctgggctctcactcaaaatgttgattgctgcaagcattgggagaatctttataccgacaatttgaaagccagtgttgctgttcttaaaaagctcattggcgagtggaaggagcgttctgtcaagctgactcctgctgaaaccctcactctcaaccaaacaatgaagagcttgaggcaaaagaacgaggaagctcttactgagggaggtaatggtgtaagccagtccctatacaaagacgcagacaagtactgcaaggtgatcgctgggaaactctccagtggtggctgcatcaaaagtatagctaccactgctgcacttctagctgctactggttttgctggtgctgctgctctgtctgccaaccctgaggctatagcttacctaaagaacctggtggagtcattggacatcaacaaattcaccgagacagttatgacagcattgaagaactga

SEQ ID NO: 73258 - protein, 569 aa, Arabidopsis thaliana
  peptide (1)..(569): Ceres Seq. ID no. 4962174
  misc_feature (1)..(569): Homolog of NCBI NO: 15220663 NR Description: unknown protein; protein id: At1g23170.1
  misc_feature (165)..(568): Homolog of NCBI NO: 15223242 NR Description: unknown protein; protein id: At1g70770.1
  misc_feature (1)..(189): Homolog of NCBI NO: 15223242 NR Description: unknown protein; protein id: At1g70770.1
  misc_feature (1)..(430): Homolog of NCBI NO: 25518112 NR Description: T26J12.6 protein - Arabidopsis thaliana
  misc_feature (154)..(531): Homolog of NCBI NO: 34895518 NR Description: unnamed protein product [Oryza sativa (japonica group)] >gi|9558458|dbj|BAB03379.1| unnamed protein product
  misc_feature (24)..(169): Homolog of NCBI NO: 34895518 NR Description: unnamed protein product [Oryza sativa (japonica group)] >gi|9558458|dbj|BAB03379.1| unnamed protein product
  misc_feature (170)..(528): Homolog of NCBI NO: 6671944 NR Description: unknown protein [Arabidopsis thaliana]
  misc_feature (170)..(528): Homolog of NCBI NO: 18399392 NR Description: expressed protein; protein id: At3g11880.1, by cDNA: gi_16226859 [Arabidopsis thaliana]
  misc_feature (433)..(562): Homolog of NCBI NO: 25518112 NR Description: T26J12.6 protein - Arabidopsis thaliana
  misc_feature (4)..(105): Homolog of NCBI NO: 15227959 NR Description: hypothetical protein; protein id: At2g18070.1
MDPIESVEYNGFETTNGNSHNDDHGWKKVVYPKRNRKQKPADQAAATKNGVTGNLIPNGTLSNGGGNVFRSLEEQAEGRHLQILAAKKASDTADVSDGGRSKWRSNGYGDEGYDFDDSDSEIAVGKENLKAEEVKKPKVKKVKKPKVTLAEAAAKIDVSNLAAFLVEASIPLSHIPEAVYKTSADWINQRPIEALGAFVLWGLDCILADLAVQQGGVKGGKKGAQQASSKSQVAIFVAVAMVLRKKPDALTNILPTLRENPKYQGQDKLPVTVWMMAQASQGDISVGLYSWAHNLLPVVSSKSCNPQSRDLILQLVERILSNPKARTILVNGAVRKGERLIPPPSFEILVRLTFPASSARVKATERFEAIYPLLKEVSLAGAPGSKAMKQVTQQIFTFALKAAGEENPLLAKEAAAITIWALTQNVDCCKHWENLYTDNLKASVAVLKKLIGEWKERSVKLTPAETLTLNQTMKSLRQKNEEALTEGGNGVSQSLYKDADKYCKVIAGKLSSGGCIKSIATTAALLAATGFAGAAALSANPEAIAYLKNLVESLDINKFTETVMTALKN

SEQ ID NO: 73259 - protein, 329 aa, Arabidopsis thaliana
  peptide (1)..(329): Ceres Seq. ID no. 4962175
  misc_feature (1)..(329): Homolog of NCBI NO: 15220663 NR Description: unknown protein; protein id: At1g23170.1
  misc_feature (1)..(328): Homolog of NCBI NO: 15223242 NR Description: unknown protein; protein id: At1g70770.1
  misc_feature (1)..(190): Homolog of NCBI NO: 25518112 NR Description: T26J12.6 protein - Arabidopsis thaliana
  misc_feature (1)..(291): Homolog of NCBI NO: 34895518 NR Description: unnamed protein product [Oryza sativa (japonica group)] >gi|9558458|dbj|BAB03379.1| unnamed protein product
  misc_feature (1)..(288): Homolog of NCBI NO: 6671944 NR Description: unknown protein [Arabidopsis thaliana]
  misc_feature (1)..(288): Homolog of NCBI NO: 18399392 NR Description: expressed protein; protein id: At3g11880.1, by cDNA: gi_16226859 [Arabidopsis thaliana]
  misc_feature (193)..(322): Homolog of NCBI NO: 25518112 NR Description: T26J12.6 protein - Arabidopsis thaliana
MVLRKKPDALTNILPTLRENPKYQGQDKLPVTVWMMAQASQGDISVGLYSWAHNLLPVVSSKSCNPQSRDLILQLVERILSNPKARTILVNGAVRKGERLIPPPSFEILVRLTFPASSARVKATERFEAIYPLLKEVSLAGAPGSKAMKQVTQQIFTFALKAAGEENPLLAKEAAAITIWALTQNVDCCKHWENLYTDNLKASVAVLKKLIGEWKERSVKLTPAETLTLNQTMKSLRQKNEEALTEGGNGVSQSLYKDADKYCKVIAGKLSSGGCIKSIATTAALLAATGFAGAAALSANPEAIAYLKNLVESLDINKFTETVMTALKN

SEQ ID NO: 73260 - protein, 295 aa, Arabidopsis thaliana
  peptide (1)..(295): Ceres Seq. ID no. 4962176
  misc_feature (1)..(295): Homolog of NCBI NO: 15220663 NR Description: unknown protein; protein id: At1g23170.1
  misc_feature (1)..(294): Homolog of NCBI NO: 15223242 NR Description: unknown protein; protein id: At1g70770.1
  misc_feature (1)..(156): Homolog of NCBI NO: 25518112 NR Description: T26J12.6 protein - Arabidopsis thaliana
  misc_feature (1)..(257): Homolog of NCBI NO: 34895518 NR Description: unnamed protein product [Oryza sativa (japonica group)] >gi|9558458|dbj|BAB03379.1| unnamed protein product
  misc_feature (1)..(254): Homolog of NCBI NO: 6671944 NR Description: unknown protein [Arabidopsis thaliana]
  misc_feature (1)..(254): Homolog of NCBI NO: 18399392 NR Description: expressed protein; protein id: At3g11880.1, by cDNA: gi_16226859 [Arabidopsis thaliana]
  misc_feature (159)..(288): Homolog of NCBI NO: 25518112 NR Description: T26J12.6 protein - Arabidopsis thaliana
MMAQASQGDISVGLYSWAHNLLPVVSSKSCNPQSRDLILQLVERILSNPKARTILVNGAVRKGERLIPPPSFEILVRLTFPASSARVKATERFEAIYPLLKEVSLAGAPGSKAMKQVTQQIFTFALKAAGEENPLLAKEAAAITIWALTQNVDCCKHWENLYTDNLKASVAVLKKLIGEWKERSVKLTPAETLTLNQTMKSLRQKNEEALTEGGNGVSQSLYKDADKYCKVIAGKLSSGGCIKSIATTAALLAATGFAGAAALSANPEAIAYLKNLVESLDINKFTETVMTALKN

SEQ ID NO: 73261 - DNA, 2937 bp, Arabidopsis thaliana
  misc_feature (1)..(2937): Ceres Seq. ID no. 4962323
  misc_feature: MA Experiment ID: 20000307 Result: Up-regulated in Transcription
  misc_feature: MA Experiment 20000307 PARAMETER Experiment Name: At_Germinating_Seeds_Sub_P Parameter: Age (hr) Value: 24 vs. 0
  misc_feature: MA Experiment 20000307 PARAMETER Experiment Name: At_Germinating_Seeds_Sub_P Parameter: Organism Value: A. thaliana
  misc_feature: MA Experiment 20000307 PARAMETER Experiment Name: At_Germinating_Seeds_Sub_P Parameter: Plant Line Value: WS
  misc_feature: MA Experiment 20000307 PARAMETER Experiment Name: At_Germinating_Seeds_Sub_P Parameter: Tissue Value: Germinating Seeds
atggcgatgttgggtaatgttcttcatctctctccaatggtgttagccaccacgacgactacgaaaccatctcttctaaaccagagcaagtgtaccaaagccacgccatcgtcgttaaagaattgcaaaaccatagacgaactcaaaatgtttcatcgttcgctcacgaagcaaggacttgataatgatgtctccactataactaagcttgtagcacggagttgtgaattgggtactcgtgaaagtttgagctttgctaaagaagtgtttgagaacagtgaatcgtatggaacttgtttcatgtacaattctttgattcgaggatatgcatcttctgggttatgcaacgaagctatattgttatttcttcgaatgatgaattctgggatttctccagataagtacacgtttccttttggattgagtgcgtgtgcgaaaagcagagcgaaaggtaatgggattcagattcatgggttgattgtgaagatgggttatgcgaaagatttgtttgtgcagaactcgctggttcatttttacgccgagtgtggagagcttgatagtgcacgtaaggtgtttgatgaaatgtctgagagaaatgttgtttcttggacgagtatgatttgtggttacgcgaggcgggattttgctaaagacgctgttgatttgttttttcggatggtgagagatgaagaggtgactcctaattcggttacaatggtgtgtgtgatatcggcttgtgctaagctagaggatcttgagacgggcgagaaggtttatgcttttatccgtaattctggtattgaagttaatgatcttatggttagtgcactggttgatatgtacatgaaatgcaatgccattgatgtagcaaaacggctttttgatgaatatggtgctagtaatttggatttgtgcaatgcaatggcatcaaattatgtacggcaagggttaacgagggaggctttaggtgtttttaatctgatgatggactctggtgttagacctgataggatttcgatgttgagtgcgatttcatcttgttcacaattgagaaatatcttgtggggaaagagctgtcatgggtatgtattgaggaatgggtttgagagttgggataatatatgcaatgcgttgattgatatgtacatgaaatgtcataggcaagatactgcgtttaggatctttgatcggatgtcgaacaagacagtggtgacgtggaactcgattgttgctggctatgtagagaatggtgaggtggatgcagcctgggaaacatttgaaaccatgcctgagaaaaacattgtttcttggaatacgattatcagcggtctggtgcaaggaagtttgtttgaggaagcgattgaagttttctgttctatgcaaagccaagagggtgtcaatgcggatggtgtgacaatgatgagtattgcatctgcttgtgggcacttgggagctcttgatctagctaaatggatatattactacattgagaagaacggaattcagcttgatgtcagacttggtacaaccttagtagatatgttttctaggtgtggggatcctgaaagtgctatgtcaatttttaatagtttgacaaacagagatgtctcagcttggacagcggctataggagcaatggctatggcaggaaacgctgagcgagcaattgagcttttcgatgatatgattgaacaagggttgaaaccagatggggttgcgtttgttggagcactgacagcttgcagccatggtggattggtccaacagggtaaggaaattttctattcgatgttgaaacttcatggagtttctccagaagatgtgcactatggatgtatggttgatctgcttggtcgagcaggattgttagaggaagctgtgcaactcattgaggacatgcctatggagccaaacgatgtgatttggaactctcttttagctgcttgtcgtgttcagggaaatgtggagatggcagcttatgcagccgagaagatacaagtcttggctccagagagaactgggagttatgttcttctgtcaaatgtttatgcatcagctggaagatggaacgacatggcgaaagtgagactgagtatgaaggagaaagggttacgtaaaccgccagggactagttcaatacagattcgaggtaaaacccatgagttcacatcaggggacgagtcacaccctgaaatgccaaacatagaagcaatgctagatgaagttagtcaaagagcgagtcacttaggccatgtacctgatcttagtaatgttcttatggatgttgatgagaaagagaagatctttatgcttagcagacacagcgagaaacttgcaatggcctatggactcattagctcaaacaaaggcacaacaatccgaatagtcaagaacctaagagtatgctctgattgtcattcatttgcaaaatttgcatccaaagtatacaacagagaaatcattctaagagacaataaccggtttcattacatccgtcaagggaagtgttcttgcggtgacttctgtttgacggatgacgatctcgaagttctcaaaggttgtttagatctaggctttggtttcaactacgacgagatccctgcgctctgcaagactttacctgctttagagctttgctattcaatgagccaaaaaaatttagacgataagcatacaccatcactccaattgccaattggaagatctctagtcccgtcgtgtgataatccggatgatgtgaaagctagactcaaatgctgggcacaagccgttgcctcggctataggagcaatggctatggcaggaaacgctgagcgagcaaacgctaagggtttaatacagattcgaggtaagacccatgagttcacttcaggagatgagtctcaccctgaaatgccaaaaattggagcaatgctcaccatagagcaagcaacttag

SEQ ID NO: 73262 - protein, 978 aa, Arabidopsis thaliana
  peptide (1)..(978): Ceres Seq. ID no. 4962324
  misc_feature (373)..(407): Pfam Name: PPR repeat Pfam Description: PPR repeat
  misc_feature (155)..(841): Homolog of NCBI NO: 15227619 NR Description: hypothetical protein; protein id: At2g29760.1
  misc_feature (22)..(838): Homolog of NCBI NO: 15237421 NR Description: putative protein; protein id: At5g16860.1
  misc_feature (185)..(841): Homolog of NCBI NO: 34910298 NR Description: P0013F10.8 [Oryza sativa (japonica
  misc_feature (376)..(841): Homolog of NCBI NO: 15221306 NR Description: hypothetical protein; protein id: At1g74630.1
  misc_feature (37)..(260): Homolog of NCBI NO: 15221306 NR Description: hypothetical protein; protein id: At1g74630.1
  misc_feature (156)..(841): Homolog of NCBI NO: 15223099 NR Description: unknown protein; protein id: At1g08070.1 thaliana] >gi|8778839|gb|AAF79838.1|AC026875_18 T6D22.15
  misc_feature (219)..(841): Homolog of NCBI NO: 15233584 NR Description: hypothetical protein; protein id: At4g14820.1
  misc_feature (238)..(841): Homolog of NCBI NO: 15239979 NR Description: selenium-binding protein-like; protein id:
  misc_feature (173)..(841): Homolog of NCBI NO: 15235498 NR Description: hypothetical protein; protein id: At4g02750.1
  misc_feature (270)..(841): Homolog of NCBI NO: 34393605 NR Description: pentatricopeptide (PPR) repeat-containing
MAMLGNVLHLSPMVLATTTTTKPSLLNQSKCTKATPSSLKNCKTIDELKMFHRSLTKQGLDNDVSTITKLVARSCELGTRESLSFAKEVFENSESYGTCFMYNSLIRGYASSGLCNEAILLFLRMMNSGISPDKYTFPFGLSACAKSRAKGNGIQIHGLIVKMGYAKDLFVQNSLVHFYAECGELDSARKVFDEMSERNVVSWTSMICGYARRDFAKDAVDLFFRMVRDEEVTPNSVTMVCVISACAKLEDLETGEKVYAFIRNSGIEVNDLMVSALVDMYMKCNAIDVAKRLFDEYGASNLDLCNAMASNYVRQGLTREALGVFNLMMDSGVRPDRISMLSAISSCSQLRNILWGKSCHGYVLRNGFESWDNICNALIDMYMKCHRQDTAFRIFDRMSNKTVVTWNSIVAGYVENGEVDAAWETFETMPEKNIVSWNTIISGLVQGSLFEEAIEVFCSMQSQEGVNADGVTMMSIASACGHLGALDLAKWIYYYIEKNGIQLDVRLGTTLVDMFSRCGDPESAMSIFNSLTNRDVSAWTAAIGAMAMAGNAERAIELFDDMIEQGLKPDGVAFVGALTACSHGGLVQQGKEIFYSMLKLHGVSPEDVHYGCMVDLLGRAGLLEEAVQLIEDMPMEPNDVIWNSLLAACRVQGNVEMAAYAAEKIQVLAPERTGSYVLLSNVYASAGRWNDMAKVRLSMKEKGLRKPPGTSSIQIRGKTHEFTSGDESHPEMPNIEAMLDEVSQRASHLGHVPDLSNVLMDVDEKEKIFMLSRHSEKLAMAYGLISSNKGTTIRIVKNLRVCSDCHSFAKFASKVYNREIILRDNNRFHYIRQGKCSCGDFCLTDDDLEVLKGCLDLGFGFNYDEIPALCKTLPALELCYSMSQKNLDDKHTPSLQLPIGRSLVPSCDNPDDVKARLKCWAQAVASAIGAMAMAGNAERANAKGLIQIRGKTHEFTSGDESHPEMPKIGAMLTIEQAT

SEQ ID NO: 73263 - protein, 976 aa, Arabidopsis thaliana
  peptide (1)..(976): Ceres Seq. ID no. 4962325
  misc_feature (371)..(405): Pfam Name: PPR repeat Pfam Description: PPR repeat
  misc_feature (153)..(839): Homolog of NCBI NO: 15227619 NR Description: hypothetical protein; protein id: At2g29760.1
  misc_feature (20)..(836): Homolog of NCBI NO: 15237421 NR Description: putative protein; protein id: At5g16860.1
  misc_feature (183)..(839): Homolog of NCBI NO: 34910298 NR Description: P0013F10.8 [Oryza sativa (japonica
  misc_feature (374)..(839): Homolog of NCBI NO: 15221306 NR Description: hypothetical protein; protein id: At1g74630.1
  misc_feature (35)..(258): Homolog of NCBI NO: 15221306 NR Description: hypothetical protein; protein id: At1g74630.1
  misc_feature (154)..(839): Homolog of NCBI NO: 15223099 NR Description: unknown protein; protein id: At1g08070.1 thaliana] >gi|8778839|gb|AAF79838.1|AC026875_18 T6D22.15
  misc_feature (217)..(839): Homolog of NCBI NO: 15233584 NR Description: hypothetical protein; protein id: At4g14820.1
  misc_feature (236)..(839): Homolog of NCBI NO: 15239979 NR Description: selenium-binding protein-like; protein id:
  misc_feature (171)..(839): Homolog of NCBI NO: 15235498 NR Description: hypothetical protein; protein id: At4g02750.1
  misc_feature (268)..(839): Homolog of NCBI NO: 34393605 NR Description: pentatricopeptide (PPR) repeat-containing
MLGNVLHLSPMVLATTTTTKPSLLNQSKCTKATPSSLKNCKTIDELKMFHRSLTKQGLDNDVSTITKLVARSCELGTRESLSFAKEVFENSESYGTCFMYNSLIRGYASSGLCNEAILLFLRMMNSGISPDKYTFPFGLSACAKSRAKGNGIQIHGLIVKMGYAKDLFVQNSLVHFYAECGELDSARKVFDEMSERNVVSWTSMICGYARRDFAKDAVDLFFRMVRDEEVTPNSVTMVCVISACAKLEDLETGEKVYAFIRNSGIEVNDLMVSALVDMYMKCNAIDVAKRLFDEYGASNLDLCNAMASNYVRQGLTREALGVFNLMMDSGVRPDRISMLSAISSCSQLRNILWGKSCHGYVLRNGFESWDNICNALIDMYMKCHRQDTAFRIFDRMSNKTVVTWNSIVAGYVENGEVDAAWETFETMPEKNIVSWNTIISGLVQGSLFEEAIEVFCSMQSQEGVNADGVTMMSIASACGHLGALDLAKWIYYYIEKNGIQLDVRLGTTLVDMFSRCGDPESAMSIFNSLTNRDVSAWTAAIGAMAMAGNAERAIELFDDMIEQGLKPDGVAFVGALTACSHGGLVQQGKEIFYSMLKLHGVSPEDVHYGCMVDLLGRAGLLEEAVQLIEDMPMEPNDVIWNSLLAACRVQGNVEMAAYAAEKIQVLAPERTGSYVLLSNVYASAGRWNDMAKVRLSMKEKGLRKPPGTSSIQIRGKTHEFTSGDESHPEMPNIEAMLDEVSQRASHLGHVPDLSNVLMDVDEKEKIFMLSRHSEKLAMAYGLISSNKGTTIRIVKNLRVCSDCHSFAKFASKVYNREIILRDNNRFHYIRQGKCSCGDFCLTDDDLEVLKGCLDLGFGFNYDEIPALCKTLPALELCYSMSQKNLDDKHTPSLQLPIGRSLVPSCDNPDDVKARLKCWAQAVASAIGAMAMAGNAERANAKGLIQIRGKTHEFTSGDESHPEMPKIGAMLTIEQAT

SEQ ID NO: 73264 - protein, 966 aa, Arabidopsis thaliana
  peptide (1)..(966): Ceres Seq. ID no. 4962326
  misc_feature (361)..(395): Pfam Name: PPR repeat Pfam Description: PPR repeat
  misc_feature (143)..(829): Homolog of NCBI NO: 15227619 NR Description: hypothetical protein; protein id: At2g29760.1
  misc_feature (10)..(826): Homolog of NCBI NO: 15237421 NR Description: putative protein; protein id: At5g16860.1
  misc_feature (173)..(829): Homolog of NCBI NO: 34910298 NR Description: P0013F10.8 [Oryza sativa (japonica
  misc_feature (364)..(829): Homolog of NCBI NO: 15221306 NR Description: hypothetical protein; protein id: At1g74630.1
  misc_feature (25)..(248): Homolog of NCBI NO: 15221306 NR Description: hypothetical protein; protein id: At1g74630.1
  misc_feature (144)..(829): Homolog of NCBI NO: 15223099 NR Description: unknown protein; protein id: At1g08070.1 thaliana] >gi|8778839|gb|AAF79838.1|AC026875_18 T6D22.15
  misc_feature (207)..(829): Homolog of NCBI NO: 15233584 NR Description: hypothetical protein; protein id: At4g14820.1
  misc_feature (226)..(829): Homolog of NCBI NO: 15239979 NR Description: selenium-binding protein-like; protein id:
  misc_feature (161)..(829): Homolog of NCBI NO: 15235498 NR Description: hypothetical protein; protein id: At4g02750.1
  misc_feature (258)..(829): Homolog of NCBI NO: 34393605 NR Description: pentatricopeptide (PPR) repeat-containing
MVLATTTTTKPSLLNQSKCTKATPSSLKNCKTIDELKMFHRSLTKQGLDNDVSTITKLVARSCELGTRESLSFAKEVFENSESYGTCFMYNSLIRGYASSGLCNEAILLFLRMMNSGISPDKYTFPFGLSACAKSRAKGNGIQIHGLIVKMGYAKDLFVQNSLVHFYAECGELDSARKVFDEMSERNVVSWTSMICGYARRDFAKDAVDLFFRMVRDEEVTPNSVTMVCVISACAKLEDLETGEKVYAFIRNSGIEVNDLMVSALVDMYMKCNAIDVAKRLFDEYGASNLDLCNAMASNYVRQGLTREALGVFNLMMDSGVRPDRISMLSAISSCSQLRNILWGKSCHGYVLRNGFESWDNICNALIDMYMKCHRQDTAFRIFDRMSNKTVVTWNSIVAGYVENGEVDAAWETFETMPEKNIVSWNTIISGLVQGSLFEEAIEVFCSMQSQEGVNADGVTMMSIASACGHLGALDLAKWIYYYIEKNGIQLDVRLGTTLVDMFSRCGDPESAMSIFNSLTNRDVSAWTAAIGAMAMAGNAERAIELFDDMIEQGLKPDGVAFVGALTACSHGGLVQQGKEIFYSMLKLHGVSPEDVHYGCMVDLLGRAGLLEEAVQLIEDMPMEPNDVIWNSLLAACRVQGNVEMAAYAAEKIQVLAPERTGSYVLLSNVYASAGRWNDMAKVRLSMKEKGLRKPPGTSSIQIRGKTHEFTSGDESHPEMPNIEAMLDEVSQRASHLGHVPDLSNVLMDVDEKEKIFMLSRHSEKLAMAYGLISSNKGTTIRIVKNLRVCSDCHSFAKFASKVYNREIILRDNNRFHYIRQGKCSCGDFCLTDDDLEVLKGCLDLGFGFNYDEIPALCKTLPALELCYSMSQKNLDDKHTPSLQLPIGRSLVPSCDNPDDVKARLKCWAQAVASAIGAMAMAGNAERANAKGLIQIRGKTHEFTSGDESHPEMPKIGAMLTIEQAT

SEQ ID NO: 73265 - DNA, 2268 bp, Arabidopsis thaliana
  misc_feature (1)..(2268): Ceres Seq. ID no. 4962345
  misc_feature: MA Experiment ID: 20000184 Result: Down-regulated in Transcription
  misc_feature: MA Experiment 20000184 PARAMETER Experiment Name: At_Shoots__P Parameter: Age (day) Value: 7
  misc_feature: MA Experiment 20000184 PARAMETER Experiment Name: At_Shoots__P Parameter: Tissue Value: Shoots vs. Whole Plant
atgaatctatacgcgcacgatctttctcttctcgatttcaattacaacgtctccggtcccttcggcgagccactatctcaccgcttcctctctcctggccctttcttccaaggcgaagaagacgattaccgccgtaatacgagctacagtcacgacggagctaatggacgagaaccggacacagattcaagagcatctccgccgcatcgccacgacgggaggtctccgttacctctgggaatggattggagttctcctcctcgtcatttggaaggaagggacacggtttggccacatgatcatcgaactggttggagttactgtgtcactgtcccttcttgggttgaccttcccaagtcaagcgtttcagatcctgccgtgttttatagagtgcaagtagcgatacaatctcctgagggaatcacttctgctaggctggtacttaggaggttcaatgatttcttggagttatattcgtctattaaaaaggagtttgtgaagaaaagcttaccccaggcaccaccaaagaagattctgaggatgagaaaccagacacttttggaagagaggaggtgctctctggaagattggatgaatagacttttgtcagatattgatatatccagaagcgctcttatagctacatttcttgagcttgaagctgctgtcaggtcttattttaatgatgaatatcaagaaactgaagatacctctggggacattccgtcacttctacctaccaccatctctgatgtccctggtagttcatcagttaccatagatcatgacaatgattctgctgatgagacatctaatgcctcaacaatgaagcatgacgaagctaatctcaaaaatcttttctcaaggaattcaactgctgtagataatgtgactgattggcatgagttgatcacagaatatggacttctagatcaaagttcttttcaggaaaaagttgaacgtctttctagtactaatggagatgcagcaactggtaccgtaaccagagggggcatttctagtggagttggaattcagaggttggatggaagtgatagaaagtttcaagaactgaccattgaaagcattaaaaaaactcatgtaagcgattttgaggcgtcaactgctgtggaacctgatttagttaaccaaggcgctatggatattcatggtgaagcccatggaaacatgtatggtgcagtaggtggagatactgagactcagaaggatcttgctattgtatttcagtctgaggagcgacataaattaaagagggttattgatacattaaagcagagactggaaacagcaaaagctgacacggaagatcttatctcaaggctgaatcaggagttagccgttcgacaatttctgtcaacaaaggtaagagatttagaggttgaacttgaaacaactcgagagagctgcaagcaaggcatggagaaaacagtcctagatgaaaaggaaagatttactcaaattcagtgggatatggaggaactccgcaagcaatgcatggaaatggaatcgtttttaaactctataaaggacgagaaaacacatattgagactgcaaatgagtcacttgttcaagaaaatcagatgttgctgcagcagatcaatgatataagagaaaattttgagaattttcataaagaacacgaagagctggaagtgaaagcgaaagcagagctgaaagtcctcgttaaagaggtcaagtctctccgaaccactcaatcagatttgagacaagagcttagcggcataatgaaagaaaaactggagatggagagaattgttcaacgggagaaggatagagaagaaactgcaaaaaacgcagacaagaagttgctgcatgagtgtgatgttctacaaaaccggcttcaagaatgcaatgtcaagttcgacattgaagaggagggtaaattaataatggactcatcatctctatccgaagccatcgagctactagcaacatccgataaccgaataggtcttctaattgctgagacgcagcttctctcagaggaagtggaaaagctgaagctaacatcaggagggcatcgtggaacagacgatctagtaaggaagatgctgacagaggttctgattgataatgccagattaaggaagcaggttaactctgttcttcgttgctctttgtccggacatggaatatcagtcagagaagccggaacagaagtagatgacgaagaaggaagtattgatctagcaagaactgttatgagcaagatccttgagaaatga

SEQ ID NO: 73266 - protein, 755 aa, Arabidopsis thaliana
  peptide (1)..(755): Ceres Seq. ID no. 4962346
  misc_feature (115)..(220): Pfam Name: PX domain Pfam Description: PX domain
  misc_feature (128)..(739): Homolog of NCBI NO: 7485370 NR Description: hypothetical protein F10N7.30 - Arabidopsis >gi|2827621|emb|CAA16573.1| putative protein [Arabidopsis >gi|7270120|emb|CAB79934.1| putative protein [Arabidopsis
  misc_feature (64)..(182): Homolog of NCBI NO: 7485370 NR Description: hypothetical protein F10N7.30 - Arabidopsis >gi|2827621|emb|CAA16573.1| putative protein [Arabidopsis >gi|7270120|emb|CAB79934.1| putative protein [Arabidopsis
  misc_feature (64)..(322): Homolog of NCBI NO: 18400804 NR Description: unknown protein; protein id: At2g25350.1 thaliana] >gi|20198060|gb|AAM15376.1| unknown protein
  misc_feature (226)..(739): Homolog of NCBI NO: 16604601 NR Description: unknown protein [Arabidopsis thaliana]
  misc_feature (226)..(739): Homolog of NCBI NO: 18417953 NR Description: putative protein; protein id: At4g32160.1,
  misc_feature (217)..(655): Homolog of NCBI NO: 18400804 NR Description: unknown protein; protein id: At2g25350.1 thaliana] >gi|20198060|gb|AAM15376.1| unknown protein
  misc_feature (217)..(655): Homolog of NCBI NO: 25412304 NR Description: hypothetical protein At2g25350 [imported] -
  misc_feature (398)..(712): Homolog of NCBI NO: 29373942 NR Description: CDC42 binding protein kinase alpha (DMPK-like)
  misc_feature (398)..(712): Homolog of NCBI NO: 30089960 NR Description: CDC42-binding protein kinase alpha isoform A;
  misc_feature (398)..(712): Homolog of NCBI NO: 27261723 NR Description: CDC42-binding protein kinase beta [Homo sapiens]
MNLYAHDLSLLDFNYNVSGPFGEPLSHRFLSPGPFFQGEEDDYRRNTSYSHDGANGREPDTDSRASPPHRHDGRSPLPLGMDWSSPPRHLEGRDTVWPHDHRTGWSYCVTVPSWVDLPKSSVSDPAVFYRVQVAIQSPEGITSARLVLRRFNDFLELYSSIKKEFVKKSLPQAPPKKILRMRNQTLLEERRCSLEDWMNRLLSDIDISRSALIATFLELEAAVRSYFNDEYQETEDTSGDIPSLLPTTISDVPGSSSVTIDHDNDSADETSNASTMKHDEANLKNLFSRNSTAVDNVTDWHELITEYGLLDQSSFQEKVERLSSTNGDAATGTVTRGGISSGVGIQRLDGSDRKFQELTIESIKKTHVSDFEASTAVEPDLVNQGAMDIHGEAHGNMYGAVGGDTETQKDLAIVFQSEERHKLKRVIDTLKQRLETAKADTEDLISRLNQELAVRQFLSTKVRDLEVELETTRESCKQGMEKTVLDEKERFTQIQWDMEELRKQCMEMESFLNSIKDEKTHIETANESLVQENQMLLQQINDIRENFENFHKEHEELEVKAKAELKVLVKEVKSLRTTQSDLRQELSGIMKEKLEMERIVQREKDREETAKNADKKLLHECDVLQNRLQECNVKFDIEEEGKLIMDSSSLSEAIELLATSDNRIGLLIAETQLLSEEVEKLKLTSGGHRGTDDLVRKMLTEVLIDNARLRKQVNSVLRCSLSGHGISVREAGTEVDDEEGSIDLARTVMSKILEK

SEQ ID NO: 73267 - protein, 675 aa, Arabidopsis thaliana
  peptide (1)..(675): Ceres Seq. ID no. 4962347
  misc_feature (35)..(140): Pfam Name: PX domain Pfam Description: PX domain
  misc_feature (48)..(659): Homolog of NCBI NO: 7485370 NR Description: hypothetical protein F10N7.30 - Arabidopsis >gi|2827621|emb|CAA16573.1| putative protein [Arabidopsis >gi|7270120|emb|CAB79934.1| putative protein [Arabidopsis
  misc_feature (1)..(102): Homolog of NCBI NO: 7485370 NR Description: hypothetical protein F10N7.30 - Arabidopsis >gi|2827621|emb|CAA16573.1| putative protein [Arabidopsis >gi|7270120|emb|CAB79934.1| putative protein [Arabidopsis
  misc_feature (1)..(242): Homolog of NCBI NO: 18400804 NR Description: unknown protein; protein id: At2g25350.1 thaliana] >gi|20198060|gb|AAM15376.1| unknown protein
  misc_feature (146)..(659): Homolog of NCBI NO: 16604601 NR Description: unknown protein [Arabidopsis thaliana]
  misc_feature (146)..(659): Homolog of NCBI NO: 18417953 NR Description: putative protein; protein id: At4g32160.1,
  misc_feature (137)..(575): Homolog of NCBI NO: 18400804 NR Description: unknown protein; protein id: At2g25350.1 thaliana] >gi|20198060|gb|AAM15376.1| unknown protein
  misc_feature (137)..(575): Homolog of NCBI NO: 25412304 NR Description: hypothetical protein At2g25350 [imported] -
  misc_feature (318)..(632): Homolog of NCBI NO: 29373942 NR Description: CDC42 binding protein kinase alpha (DMPK-like)
  misc_feature (318)..(632): Homolog of NCBI NO: 30089960 NR Description: CDC42-binding protein kinase alpha isoform A;
  misc_feature (318)..(632): Homolog of NCBI NO: 27261723 NR Description: CDC42-binding protein kinase beta [Homo sapiens]
MDWSSPPRHLEGRDTVWPHDHRTGWSYCVTVPSWVDLPKSSVSDPAVFYRVQVAIQSPEGITSARLVLRRFNDFLELYSSIKKEFVKKSLPQAPPKKILRMRNQTLLEERRCSLEDWMNRLLSDIDISRSALIATFLELEAAVRSYFNDEYQETEDTSGDIPSLLPTTISDVPGSSSVTIDHDNDSADETSNASTMKHDEANLKNLFSRNSTAVDNVTDWHELITEYGLLDQSSFQEKVERLSSTNGDAATGTVTRGGISSGVGIQRLDGSDRKFQELTIESIKKTHVSDFEASTAVEPDLVNQGAMDIHGEAHGNMYGAVGGDTETQKDLAIVFQSEERHKLKRVIDTLKQRLETAKADTEDLISRLNQELAVRQFLSTKVRDLEVELETTRESCKQGMEKTVLDEKERFTQIQWDMEELRKQCMEMESFLNSIKDEKTHIETANESLVQENQMLLQQINDIRENFENFHKEHEELEVKAKAELKVLVKEVKSLRTTQSDLRQELSGIMKEKLEMERIVQREKDREETAKNADKKLLHECDVLQNRLQECNVKFDIEEEGKLIMDSSSLSEAIELLATSDNRIGLLIAETQLLSEEVEKLKLTSGGHRGTDDLVRKMLTEVLIDNARLRKQVNSVLRCSLSGHGISVREAGTEVDDEEGSIDLARTVMSKILEK

SEQ ID NO: 73268 - protein, 575 aa, Arabidopsis thaliana
  peptide (1)..(575): Ceres Seq. ID no. 4962348
  misc_feature (227)..(434): Pfam Name: Myosin tail Pfam Description: Myosin tail
  misc_feature (1)..(559): Homolog of NCBI NO: 7485370 NR Description: hypothetical protein F10N7.30 - Arabidopsis >gi|2827621|emb|CAA16573.1| putative protein [Arabidopsis >gi|7270120|emb|CAB79934.1| putative protein [Arabidopsis
  misc_feature (1)..(142): Homolog of NCBI NO: 18400804 NR Description: unknown protein; protein id: At2g25350.1 thaliana] >gi|20198060|gb|AAM15376.1| unknown protein
  misc_feature (46)..(559): Homolog of NCBI NO: 16604601 NR Description: unknown protein [Arabidopsis thaliana]
  misc_feature (46)..(559): Homolog of NCBI NO: 18417953 NR Description: putative protein; protein id: At4g32160.1,
  misc_feature (37)..(475): Homolog of NCBI NO: 18400804 NR Description: unknown protein; protein id: At2g25350.1 thaliana] >gi|20198060|gb|AAM15376.1| unknown protein
  misc_feature (37)..(475): Homolog of NCBI NO: 25412304 NR Description: hypothetical protein At2g25350 [imported] -
  misc_feature (218)..(532): Homolog of NCBI NO: 29373942 NR Description: CDC42 binding protein kinase alpha (DMPK-like)
  misc_feature (218)..(532): Homolog of NCBI NO: 30089960 NR Description: CDC42-binding protein kinase alpha isoform A;
  misc_feature (218)..(532): Homolog of NCBI NO: 27261723 NR Description: CDC42-binding protein kinase beta [Homo sapiens]
  misc_feature (228)..(482): Homolog of NCBI NO: 28278379 NR Description: Similar to sarcolemma associated protein [Danio
MRNQTLLEERRCSLEDWMNRLLSDIDISRSALIATFLELEAAVRSYFNDEYQETEDTSGDIPSLLPTTISDVPGSSSVTIDHDNDSADETSNASTMKHDEANLKNLFSRNSTAVDNVTDWHELITEYGLLDQSSFQEKVERLSSTNGDAATGTVTRGGISSGVGIQRLDGSDRKFQELTIESIKKTHVSDFEASTAVEPDLVNQGAMDIHGEAHGNMYGAVGGDTETQKDLAIVFQSEERHKLKRVIDTLKQRLETAKADTEDLISRLNQELAVRQFLSTKVRDLEVELETTRESCKQGMEKTVLDEKERFTQIQWDMEELRKQCMEMESFLNSIKDEKTHIETANESLVQENQMLLQQINDIRENFENFHKEHEELEVKAKAELKVLVKEVKSLRTTQSDLRQELSGIMKEKLEMERIVQREKDREETAKNADKKLLHECDVLQNRLQECNVKFDIEEEGKLIMDSSSLSEAIELLATSDNRIGLLIAETQLLSEEVEKLKLTSGGHRGTDDLVRKMLTEVLIDNARLRKQVNSVLRCSLSGHGISVREAGTEVDDEEGSIDLARTVMSKILEK

SEQ ID NO: 73269 - DNA, 2766 bp, Arabidopsis thaliana
  misc_feature (1)..(2766): Ceres Seq. ID no. 4962377
  misc_feature: MA Experiment ID: 20000173 Result: Down-regulated in Transcription
  misc_feature: MA Experiment 20000173 PARAMETER Experiment Name: At_42deg_Heat_P Parameter: Age (day) Value: 14
  misc_feature: MA Experiment 20000173 PARAMETER Experiment Name: At_42deg_Heat_P Parameter: Organism Value: A. thaliana
  misc_feature: MA Experiment 20000173 PARAMETER Experiment Name: At_42deg_Heat_P Parameter: Plant Line Value: WS
  misc_feature: MA Experiment 20000173 PARAMETER Experiment Name: At_42deg_Heat_P Parameter: Temperature (deg C) Value: 42 vs. 22
  misc_feature: MA Experiment 20000173 PARAMETER Experiment Name: At_42deg_Heat_P Parameter: Timepoint (hr) Value: 6
  misc_feature: MA Experiment 20000173 PARAMETER Experiment Name: At_42deg_Heat_P Parameter: Tissue Value: Aerial
  misc_feature: MA Experiment ID: 20000286 Result: Up-regulated in Transcription
  misc_feature: MA Experiment 20000286 PARAMETER Experiment Name: At_Open_Flower_P Parameter: Age (day) Value: 21
  misc_feature: MA Experiment 20000286 PARAMETER Experiment Name: At_Open_Flower_P Parameter: Plant Line Value: WS
  misc_feature: MA Experiment 20000286 PARAMETER Experiment Name: At_Open_Flower_P Parameter: Tissue Value: Half Open vs. Whole Plant
atgttgcaacagcctctcagactagatatcaagagaaagtttgctcaacgatcagagagagtcaaatctgttgatctgcatcctactgaaccatggattctagcaagtttgtattctggaaccgtgtgtatttggaactaccagacacagacgattacaaaatccttcgaggtgacggaattgccagttaggtcggccaagtttattccgcgcaagcaatgggttgtggctggagcggatgatatgtacatccgtgtatacaattacaatacaatggacaaggtcaaagtatttgaggctcattcggattacattaggtgtgtagctgtccatccgacccttccatatgtgctgtcatcttctgatgatatgctcataaagctttgggactgggaaaacggttgggcttgtactcagatatttgagggacattcgcactatgtgatgcaagtggtatttaatccaaaagataccaacacttttgccagtgcttcgcttgatcgtaccataaagatatggaatcttggttccccagacccaaattttacactggatgctcatcagaaaggagtcaactgtgtagattatttcacagggggtgataaaccctatctaattaccggctctgatgatcatactgctaaggtatgggactatcaaaccaaaagttgtgtccagacgctagatgggcacacacacaatgtttctgccgtatgtttccatccagagcttccaataataatcacaggttctgaggatggcactgttcgcatttggcacgccactacctacaggctagaaaacacattaaattatggtctcgagagagtttgggccattggttacatcaaaagttctcggcgggttgtgattggatatgatgaaggaaccatcatggttaaacttggacgagaaattcctgtcgctagcatggacagtagcggaaaaatcatatgggctaagcataatgaaattcaaaccgcaaacatcaaaagtattggtgcaggttacgaggctactgatggagaaagacttcccttgtctgttaaagagttggggacctgtgatctttatccacaaagcttgaagcacaaccctaatgggaggtttgtcgtagtctgcggtgatggagagtacataatctacactgctttggcgtggagaaatagatcttttgggtctggcctggaatttgtttggtcatctgagggggaatgtgcggttagagaaagctcatcaaagataaagatattcagtaaaaatttccaggaaaggaagagtatccggcctactttctcagctgagaagatttttggaggaaccttgttagcaatgtgttcgaatgatttcatctgcttctatgattgggccgaatgcaggctgattcaacaaattgatgtcaccgtaaagaatctttattgggctgaaagtggtgatttagtagccattgctagtgatacgtcattctacatcttgaagtacaatcgagagttggtttcctcgcattttgatagtggaagaccaactgatgaagagggtgttgaggatgcttttgaggttctccacgagaatgatgaacgtgttaggaccggtatatgggttggggactgcttcatttacaacaactcttcttggaagcttaactattgtgttggaggcgaggtaaccacaatgtatcatttggaccgcccaatgtatttgttaggctatattgccaaccaaagccgggtttacttggtagacaaagaattcaatgtcataggatataccctgctgcttagcctgattgaatacaagactcttgtgatgcgaggcgatttggatagagccaatcaaattttacctacaattcctaaagagcagcataacaatgttgctcatttcttggaatctcggggaatgattgaagatgctttagaaattgcgacagatccagactacaaatttgatctggccatacaactgggtagacttgaaattgcaaaggaaattgctgaagaagtacagagcgagtctaaatggaagcagttaggagagttagccatgtcctcggggaagctgcaattggccgaggattgcatgaagtacgctatggatttgagtggtttgttactactatattcttctttgggagatgctgaaggggtgtcaaaacttgcatgccttgctaaggaacaggggaagaacaatgttgcctttctttgcttatttacgctgggtagattggaagattgtctgcagttattggtggagagtaaccggataccagaagctgctctgatggcacgttcttatcttccaagcaaagtttcggagatagtagctctatggagggaagatctcagcaaggttaatccaaaagcagctgaatctttagctgatcctgaagagtactcaaatctttttgaggattggcaagttgctctttctgttgaagcgaacactgcagagacaaggggagtttataccgctgcagaaaattatccatcccatgccgataaaccttccattacccttgtggaagcctttagaaacctgcaagttgaagcagaggaatcacttgaaaatggaaacatcgatcacgaggtagcagaagaaaacggtcatgtagagaatgaaggagatgaagaggaacaacaggaagaagaagtgaatgaagaagagggagttgtggatgcagactctacggacggtgctgtacttgttaatggaagtgagggtgaggaagagtggggtacgaataacaaaggaaacccatcagcctaa

SEQ ID NO: 73270 - protein, 921 aa, Arabidopsis thaliana
  peptide (1)..(921): Ceres Seq. ID no. 4962378
  misc_feature (322)..(782): Pfam Name: Coatomer WD associated region Pfam Description: Coatomer WD associated region
  misc_feature (5)..(897): Homolog of NCBI NO: 4758032 NR Description: coatomer protein complex, subunit beta 2 (beta
  misc_feature (5)..(897): Homolog of NCBI NO: 486784 NR Description: Golgi-associated particle 102K chain - human
  misc_feature (5)..(897): Homolog of NCBI NO: 27805865 NR Description: coatomer protein complex, subunit beta 2 (beta
  misc_feature (5)..(897): Homolog of NCBI NO: 11120716 NR Description: beta prime COP [Rattus norvegicus]
  misc_feature (5)..(828): Homolog of NCBI NO: 27697187 NR Description: Similar to coatomer protein complex, subunit beta
  misc_feature (5)..(859): Homolog of NCBI NO: 17540286 NR Description: Coatomer (111.1 kD) [Caenorhabditis elegans]
  misc_feature (5)..(859): Homolog of NCBI NO: 3287963 NR Description: PROBABLE COATOMER BETA' SUBUNIT (BETA'-COAT
  misc_feature (6)..(765): Homolog of NCBI NO: 6321301 NR Description: Involved in endoplasmic-to-Golgi protein Sec27p [Saccharomyces cerevisiae]
  misc_feature (5)..(494): Homolog of NCBI NO: 23613580 NR Description: beta subunit of coatomer complex, putative falciparum 3D7] >gi|23504960|emb|CAD51744.1| beta subunit of
  misc_feature (515)..(888): Homolog of NCBI NO: 23613580 NR Description: beta subunit of coatomer complex, putative falciparum 3D7] >gi|23504960|emb|CAD51744.1| beta subunit of
MLQQPLRLDIKRKFAQRSERVKSVDLHPTEPWILASLYSGTVCIWNYQTQTITKSFEVTELPVRSAKFIPRKQWVVAGADDMYIRVYNYNTMDKVKVFEAHSDYIRCVAVHPTLPYVLSSSDDMLIKLWDWENGWACTQIFEGHSHYVMQVVFNPKDTNTFASASLDRTIKIWNLGSPDPNFTLDAHQKGVNCVDYFTGGDKPYLITGSDDHTAKVWDYQTKSCVQTLDGHTHNVSAVCFHPELPIIITGSEDGTVRIWHATTYRLENTLNYGLERVWAIGYIKSSRRVVIGYDEGTIMVKLGREIPVASMDSSGKIIWAKHNEIQTANIKSIGAGYEATDGERLPLSVKELGTCDLYPQSLKHNPNGRFVVVCGDGEYIIYTALAWRNRSFGSGLEFVWSSEGECAVRESSSKIKIFSKNFQERKSIRPTFSAEKIFGGTLLAMCSNDFICFYDWAECRLIQQIDVTVKNLYWAESGDLVAIASDTSFYILKYNRELVSSHFDSGRPTDEEGVEDAFEVLHENDERVRTGIWVGDCFIYNNSSWKLNYCVGGEVTTMYHLDRPMYLLGYIANQSRVYLVDKEFNVIGYTLLLSLIEYKTLVMRGDLDRANQILPTIPKEQHNNVAHFLESRGMIEDALEIATDPDYKFDLAIQLGRLEIAKEIAEEVQSESKWKQLGELAMSSGKLQLAEDCMKYAMDLSGLLLLYSSLGDAEGVSKLACLAKEQGKNNVAFLCLFTLGRLEDCLQLLVESNRIPEAALMARSYLPSKVSEIVALWREDLSKVNPKAAESLADPEEYSNLFEDWQVALSVEANTAETRGVYTAAENYPSHADKPSITLVEAFRNLQVEAEESLENGNIDHEVAEENGHVENEGDEEEQQEEEVNEEEGVVDADSTDGAVLVNGSEGEEEWGTNNKGNPSA

SEQ ID NO: 73271 - protein, 840 aa, Arabidopsis thaliana
  peptide (1)..(840): Ceres Seq. ID no. 4962379
  misc_feature (241)..(701): Pfam Name: Coatomer WD associated region Pfam Description: Coatomer WD associated region
  misc_feature (1)..(816): Homolog of NCBI NO: 4758032 NR Description: coatomer protein complex, subunit beta 2 (beta
  misc_feature (1)..(816): Homolog of NCBI NO: 486784 NR Description: Golgi-associated particle 102K chain - human
  misc_feature (1)..(816): Homolog of NCBI NO: 27805865 NR Description: coatomer protein complex, subunit beta 2 (beta
  misc_feature (1)..(816): Homolog of NCBI NO: 11120716 NR Description: beta prime COP [Rattus norvegicus]
  misc_feature (1)..(747): Homolog of NCBI NO: 27697187 NR Description: Similar to coatomer protein complex, subunit beta
  misc_feature (1)..(778): Homolog of NCBI NO: 17540286 NR Description: Coatomer (111.1 kD) [Caenorhabditis elegans]
  misc_feature (1)..(778): Homolog of NCBI NO: 3287963 NR Description: PROBABLE COATOMER BETA' SUBUNIT (BETA'-COAT
  misc_feature (1)..(684): Homolog of NCBI NO: 6321301 NR Description: Involved in endoplasmic-to-Golgi protein Sec27p [Saccharomyces cerevisiae]
  misc_feature (1)..(413): Homolog of NCBI NO: 23613580 NR Description: beta subunit of coatomer complex, putative falciparum 3D7] >gi|23504960|emb|CAD51744.1| beta subunit of
  misc_feature (434)..(807): Homolog of NCBI NO: 23613580 NR Description: beta subunit of coatomer complex, putative falciparum 3D7] >gi|23504960|emb|CAD51744.1| beta subunit of
MYIRVYNYNTMDKVKVFEAHSDYIRCVAVHPTLPYVLSSSDDMLIKLWDWENGWACTQIFEGHSHYVMQVVFNPKDTNTFASASLDRTIKIWNLGSPDPNFTLDAHQKGVNCVDYFTGGDKPYLITGSDDHTAKVWDYQTKSCVQTLDGHTHNVSAVCFHPELPIIITGSEDGTVRIWHATTYRLENTLNYGLERVWAIGYIKSSRRVVIGYDEGTIMVKLGREIPVASMDSSGKIIWAKHNEIQTANIKSIGAGYEATDGERLPLSVKELGTCDLYPQSLKHNPNGRFVVVCGDGEYIIYTALAWRNRSFGSGLEFVWSSEGECAVRESSSKIKIFSKNFQERKSIRPTFSAEKIFGGTLLAMCSNDFICFYDWAECRLIQQIDVTVKNLYWAESGDLVAIASDTSFYILKYNRELVSSHFDSGRPTDEEGVEDAFEVLHENDERVRTGIWVGDCFIYNNSSWKLNYCVGGEVTTMYHLDRPMYLLGYIANQSRVYLVDKEFNVIGYTLLLSLIEYKTLVMRGDLDRANQILPTIPKEQHNNVAHFLESRGMIEDALEIATDPDYKFDLAIQLGRLEIAKEIAEEVQSESKWKQLGELAMSSGKLQLAEDCMKYAMDLSGLLLLYSSLGDAEGVSKLACLAKEQGKNNVAFLCLFTLGRLEDCLQLLVESNRIPEAALMARSYLPSKVSEIVALWREDLSKVNPKAAESLADPEEYSNLFEDWQVALSVEANTAETRGVYTAAENYPSHADKPSITLVEAFRNLQVEAEESLENGNIDHEVAEENGHVENEGDEEEQQEEEVNEEEGVVDADSTDGAVLVNGSEGEEEWGTNNKGNPSA

SEQ ID NO: 73272 - protein, 830 aa, Arabidopsis thaliana
  peptide (1)..(830): Ceres Seq. ID no. 4962380
  misc_feature (231)..(691): Pfam Name: Coatomer WD associated region Pfam Description: Coatomer WD associated region
  misc_feature (1)..(806): Homolog of NCBI NO: 4758032 NR Description: coatomer protein complex, subunit beta 2 (beta
  misc_feature (1)..(806): Homolog of NCBI NO: 486784 NR Description: Golgi-associated particle 102K chain - human
  misc_feature (1)..(806): Homolog of NCBI NO: 27805865 NR Description: coatomer protein complex, subunit beta 2 (beta
  misc_feature (1)..(806): Homolog of NCBI NO: 11120716 NR Description: beta prime COP [Rattus norvegicus]
  misc_feature (1)..(737): Homolog of NCBI NO: 27697187 NR Description: Similar to coatomer protein complex, subunit beta
  misc_feature (1)..(768): Homolog of NCBI NO: 17540286 NR Description: Coatomer (111.1 kD) [Caenorhabditis elegans]
  misc_feature (1)..(768): Homolog of NCBI NO: 3287963 NR Description: PROBABLE COATOMER BETA' SUBUNIT (BETA'-COAT
  misc_feature (1)..(674): Homolog of NCBI NO: 6321301 NR Description: Involved in endoplasmic-to-Golgi protein Sec27p [Saccharomyces cerevisiae]
  misc_feature (1)..(403): Homolog of NCBI NO: 23613580 NR Description: beta subunit of coatomer complex, putative falciparum 3D7] >gi|23504960|emb|CAD51744.1| beta subunit of
  misc_feature (424)..(797): Homolog of NCBI NO: 23613580 NR Description: beta subunit of coatomer complex, putative falciparum 3D7] >gi|23504960|emb|CAD51744.1| beta subunit of
MDKVKVFEAHSDYIRCVAVHPTLPYVLSSSDDMLIKLWDWENGWACTQIFEGHSHYVMQVVFNPKDTNTFASASLDRTIKIWNLGSPDPNFTLDAHQKGVNCVDYFTGGDKPYLITGSDDHTAKVWDYQTKSCVQTLDGHTHNVSAVCFHPELPIIITGSEDGTVRIWHATTYRLENTLNYGLERVWAIGYIKSSRRVVIGYDEGTIMVKLGREIPVASMDSSGKIIWAKHNEIQTANIKSIGAGYEATDGERLPLSVKELGTCDLYPQSLKHNPNGRFVVVCGDGEYIIYTALAWRNRSFGSGLEFVWSSEGECAVRESSSKIKIFSKNFQERKSIRPTFSAEKIFGGTLLAMCSNDFICFYDWAECRLIQQIDVTVKNLYWAESGDLVAIASDTSFYILKYNRELVSSHFDSGRPTDEEGVEDAFEVLHENDERVRTGIWVGDCFIYNNSSWKLNYCVGGEVTTMYHLDRPMYLLGYIANQSRVYLVDKEFNVIGYTLLLSLIEYKTLVMRGDLDRANQILPTIPKEQHNNVAHFLESRGMIEDALEIATDPDYKFDLAIQLGRLEIAKEIAEEVQSESKWKQLGELAMSSGKLQLAEDCMKYAMDLSGLLLLYSSLGDAEGVSKLACLAKEQGKNNVAFLCLFTLGRLEDCLQLLVESNRIPEAALMARSYLPSKVSEIVALWREDLSKVNPKAAESLADPEEYSNLFEDWQVALSVEANTAETRGVYTAAENYPSHADKPSITLVEAFRNLQVEAEESLENGNIDHEVAEENGHVENEGDEEEQQEEEVNEEEGVVDADSTDGAVLVNGSEGEEEWGTNNKGNPSA

SEQ ID NO: 73273 - DNA, 840 bp, Arabidopsis thaliana
  misc_feature (1)..(840): Ceres Seq. ID no. 4962547
  misc_feature: MA Experiment ID: 20001760 Result: Up-regulated in Transcription
  misc_feature: MA Experiment 20001760 PARAMETER Experiment Name: At_50mM_NH4NO3_L-to-H_P Parameter: Timepoint (hr) Value: 2
  misc_feature: MA Experiment 20001760 PARAMETER Experiment Name: At_50mM_NH4NO3_L-to-H_P Parameter: Tissue Value: Siliques
  misc_feature: MA Experiment 20001760 PARAMETER Experiment Name: At_50mM_NH4NO3_L-to-H_P Parameter: Treatment Value: 50mM NH4NO3 vs 100mM Mannitol
  misc_feature: Pfam Name: DUF677 Pfam Description: Protein of unknown function (DUF677)
atggaattactttatgatacacataatgatataaacattctcatcactgatctcaagcttcattatatgactgattcggagcatggatattggtttgagaattacatgaacataaatacaaaattgctcgatctgtgtaacgcttttatgtccttgcttcgtcacatgaaccatggcattgtttgcttaaagttccttaggcataaattagaaatgaaatctgaggatctatgcactgagatttgttccgcacttgatagttggagggaaaatatcaccgcggaaatatcgaaatgccgcgaagttcttgggagatatgttgaatcattaaactttcataaagtcaagaattgtataaaagaagcaaaggttcttatgaaggcgttttatggggctaatgttcttacggcttatatctgcagtgtctttgtgatagttttgtcgaattccgacaaagatattttgcctatatatgtctggaagcaatcattgtggaaaaaagatttcttggatttgcagactatcgtaaacgtcaaaacaagagttaatatttccactgatggaacaatggtactccaagagttagaatctgttgctgccaaaatgaagaagatgtatcttacaattcaagaaggtgatgatcttgttcaagagtcctttaaggaatctattgaggaatgcaaagaagaagtcgagaaactggaacatgggttagatgaaatcttcaggaaaattggcaacttgtctgatgtaacctttaaaggacgtgaaatcattcgtgacggtttatttgattcaatgattagggagttaactcatggaccatacatatatgattaa

SEQ ID NO: 73274 - protein, 279 aa, Arabidopsis thaliana
  peptide (1)..(279): Ceres Seq. ID no. 4962548
  misc_feature: Pfam Name: DUF677 Pfam Description: Protein of unknown function (DUF677)
  misc_feature (1)..(279): Homolog of NCBI NO: 15233126 NR Description: putative protein; protein id: At3g61500.1
  misc_feature (1)..(259): Homolog of NCBI NO: 16604342 NR Description: At2g46080/T3F17.27 [Arabidopsis thaliana]
  misc_feature (1)..(259): Homolog of NCBI NO: 18406969 NR Description: expressed protein; protein id: At2g46080.1, by cDNA: gi_16604341, supported by cDNA: gi_18252158 [Arabidopsis >gi|25341889|pir||E84898 hypothetical protein At2g46080
  misc_feature (1)..(263): Homolog of NCBI NO: 18378853 NR Description: expressed protein; protein id: At1g01550.1, by cDNA: gi_13194833, supported by cDNA: gi_16648870, supported cDNA: gi_17380899, supported by cDNA: gi_20259586 [Arabidopsis
  misc_feature (1)..(271): Homolog of NCBI NO: 7485228 NR Description: hypothetical protein A_IG002N01.26 - Arabidopsis >gi|2191147|gb|AAB61034.1| A_IG002N01.26 gene product thaliana] >gi|7267633|emb|CAB80945.1| hypothetical protein
  misc_feature (1)..(271): Homolog of NCBI NO: 30678866 NR Description: expressed protein [Arabidopsis thaliana]
  misc_feature (1)..(271): Homolog of NCBI NO: 28392962 NR Description: unknown protein [Arabidopsis thaliana]
  misc_feature (1)..(231): Homolog of NCBI NO: 37536014 NR Description: unknown protein [Oryza sativa (japonica
MELLYDTHNDINILITDLKLHYMTDSEHGYWFENYMNINTKLLDLCNAFMSLLRHMNHGIVCLKFLRHKLEMKSEDLCTEICSALDSWRENITAEISKCREVLGRYVESLNFHKVKNCIKEAKVLMKAFYGANVLTAYICSVFVIVLSNSDKDILPIYVWKQSLWKKDFLDLQTIVNVKTRVNISTDGTMVLQELESVAAKMKKMYLTIQEGDDLVQESFKESIEECKEEVEKLEHGLDEIFRKIGNLSDVTFKGREIIRDGLFDSMIRELTHGPYIYD

SEQ ID NO: 73275 - protein, 257 aa, Arabidopsis thaliana
  peptide (1)..(257): Ceres Seq. ID no. 4962549
  misc_feature: Pfam Name: DUF677 Pfam Description: Protein of unknown function (DUF677)
  misc_feature (1)..(257): Homolog of NCBI NO: 15233126 NR Description: putative protein; protein id: At3g61500.1
  misc_feature (1)..(237): Homolog of NCBI NO: 16604342 NR Description: At2g46080/T3F17.27 [Arabidopsis thaliana]
  misc_feature (1)..(237): Homolog of NCBI NO: 18406969 NR Description: expressed protein; protein id: At2g46080.1, by cDNA: gi_16604341, supported by cDNA: gi_18252158 [Arabidopsis >gi|25341889|pir||E84898 hypothetical protein At2g46080
  misc_feature (1)..(241): Homolog of NCBI NO: 18378853 NR Description: expressed protein; protein id: At1g01550.1, by cDNA: gi_13194833, supported by cDNA: gi_16648870, supported cDNA: gi_17380899, supported by cDNA: gi_20259586 [Arabidopsis
  misc_feature (1)..(249): Homolog of NCBI NO: 7485228 NR Description: hypothetical protein A_IG002N01.26 - Arabidopsis >gi|2191147|gb|AAB61034.1| A_IG002N01.26 gene product thaliana] >gi|7267633|emb|CAB80945.1| hypothetical protein
  misc_feature (1)..(249): Homolog of NCBI NO: 30678866 NR Description: expressed protein [Arabidopsis thaliana]
  misc_feature (1)..(249): Homolog of NCBI NO: 28392962 NR Description: unknown protein [Arabidopsis thaliana]
  misc_feature (1)..(209): Homolog of NCBI NO: 37536014 NR Description: unknown protein [Oryza sativa (japonica
MTDSEHGYWFENYMNINTKLLDLCNAFMSLLRHMNHGIVCLKFLRHKLEMKSEDLCTEICSALDSWRENITAEISKCREVLGRYVESLNFHKVKNCIKEAKVLMKAFYGANVLTAYICSVFVIVLSNSDKDILPIYVWKQSLWKKDFLDLQTIVNVKTRVNISTDGTMVLQELESVAAKMKKMYLTIQEGDDLVQESFKESIEECKEEVEKLEHGLDEIFRKIGNLSDVTFKGREIIRDGLFDSMIRELTHGPYIYD

SEQ ID NO: 73276 - protein, 244 aa, Arabidopsis thaliana
  peptide (1)..(244): Ceres Seq. ID no. 4962550
  misc_feature: Pfam Name: DUF677 Pfam Description: Protein of unknown function (DUF677)
  misc_feature (1)..(244): Homolog of NCBI NO: 15233126 NR Description: putative protein; protein id: At3g61500.1
  misc_feature (1)..(224): Homolog of NCBI NO: 16604342 NR Description: At2g46080/T3F17.27 [Arabidopsis thaliana]
  misc_feature (1)..(224): Homolog of NCBI NO: 18406969 NR Description: expressed protein; protein id: At2g46080.1, by cDNA: gi_16604341, supported by cDNA: gi_18252158 [Arabidopsis >gi|25341889|pir||E84898 hypothetical protein At2g46080
  misc_feature (1)..(228): Homolog of NCBI NO: 18378853 NR Description: expressed protein; protein id: At1g01550.1, by cDNA: gi_13194833, supported by cDNA: gi_16648870, supported cDNA: gi_17380899, supported by cDNA: gi_20259586 [Arabidopsis
  misc_feature (1)..(236): Homolog of NCBI NO: 7485228 NR Description: hypothetical protein A_IG002N01.26 - Arabidopsis >gi|2191147|gb|AAB61034.1| A_IG002N01.26 gene product thaliana] >gi|7267633|emb|CAB80945.1| hypothetical protein
  misc_feature (1)..(236): Homolog of NCBI NO: 30678866 NR Description: expressed protein [Arabidopsis thaliana]
  misc_feature (1)..(236): Homolog of NCBI NO: 28392962 NR Description: unknown protein [Arabidopsis thaliana]
  misc_feature (1)..(196): Homolog of NCBI NO: 37536014 NR Description: unknown protein [Oryza sativa (japonica
MNINTKLLDLCNAFMSLLRHMNHGIVCLKFLRHKLEMKSEDLCTEICSALDSWRENITAEISKCREVLGRYVESLNFHKVKNCIKEAKVLMKAFYGANVLTAYICSVFVIVLSNSDKDILPIYVWKQSLWKKDFLDLQTIVNVKTRVNISTDGTMVLQELESVAAKMKKMYLTIQEGDDLVQESFKESIEECKEEVEKLEHGLDEIFRKIGNLSDVTFKGREIIRDGLFDSMIRELTHGPYIYD

SEQ ID NO: 73277 - DNA, 930 bp, Arabidopsis thaliana
  misc_feature (1)..(930): Ceres Seq. ID no. 4962587
  misc_feature: MA Experiment ID: 108461 Result: Up-regulated in Transcription
  misc_feature: MA Experiment 108461 PARAMETER Experiment Name: At_Germinating_Seeds_cDNA_P Parameter: Age (day) Value: 1 vs. 0
  misc_feature: MA Experiment 108461 PARAMETER Experiment Name: At_Germinating_Seeds_cDNA_P Parameter: Tissue Value: Germinating Seeds
  misc_feature: MA Experiment ID: 108462 Result: Up-regulated in Transcription
  misc_feature: MA Experiment 108462 PARAMETER Experiment Name: At_Germinating_Seeds_cDNA_P Parameter: Age (day) Value: 2 vs. 0
  misc_feature: MA Experiment 108462 PARAMETER Experiment Name: At_Germinating_Seeds_cDNA_P Parameter: Tissue Value: Germinating Seeds
  misc_feature: MA Experiment ID: 108463 Result: Up-regulated in Transcription
  misc_feature: MA Experiment 108463 PARAMETER Experiment Name: At_Germinating_Seeds_cDNA_P Parameter: Age (day) Value: 3 vs. 0
  misc_feature: MA Experiment 108463 PARAMETER Experiment Name: At_Germinating_Seeds_cDNA_P Parameter: Tissue Value: Germinating Seeds
  misc_feature: MA Experiment ID: 108595 Result: Down-regulated in Transcription
  misc_feature: MA Experiment 108595 PARAMETER Experiment Name: At_Ler-pi_Ovule_cDNA_P Parameter: Plant Line Value: null
  misc_feature: MA Experiment ID: 20000111 Result: Down-regulated in Transcription
  misc_feature: MA Experiment 20000111 PARAMETER Experiment Name: At_42deg_Heat_cDNA_P Parameter: Temperature (deg C) Value: 42 vs. 22
  misc_feature: MA Experiment 20000111 PARAMETER Experiment Name: At_42deg_Heat_cDNA_P Parameter: Timepoint (hr) Value: 6
  misc_feature: MA Experiment 20000111 PARAMETER Experiment Name: At_42deg_Heat_cDNA_P Parameter: Tissue Value: Aerial
  misc_feature: MA Experiment ID: 20000113 Result: Down-regulated in Transcription
  misc_feature: MA Experiment 20000113 PARAMETER Experiment Name: At_42deg_Heat_cDNA_P Parameter: Temperature (deg C) Value: 42 vs. 22
  misc_feature: MA Experiment 20000113 PARAMETER Experiment Name: At_42deg_Heat_cDNA_P Parameter: Timepoint (hr) Value: 8
  misc_feature: MA Experiment 20000113 PARAMETER Experiment Name: At_42deg_Heat_cDNA_P Parameter: Tissue Value: Aerial
  misc_feature: MA Experiment ID: 20000224 Result: Up-regulated in Transcription
  misc_feature: MA Experiment ID: 20000306 Result: Up-regulated in Transcription
  misc_feature: MA Experiment 20000306 PARAMETER Experiment Name: At_Germinating_Seeds_Sub_P Parameter: Age (hr) Value: 6 vs. 0
  misc_feature: MA Experiment 20000306 PARAMETER Experiment Name: At_Germinating_Seeds_Sub_P Parameter: Organism Value: A. thaliana
  misc_feature: MA Experiment 20000306 PARAMETER Experiment Name: At_Germinating_Seeds_Sub_P Parameter: Plant Line Value: WS
  misc_feature: MA Experiment 20000306 PARAMETER Experiment Name: At_Germinating_Seeds_Sub_P Parameter: Tissue Value: Germinating Seeds
  misc_feature: MA Experiment ID: 20000307 Result: Up-regulated in Transcription
  misc_feature: MA Experiment 20000307 PARAMETER Experiment Name: At_Germinating_Seeds_Sub_P Parameter: Age (hr) Value: 24 vs. 0
  misc_feature: MA Experiment 20000307 PARAMETER Experiment Name: At_Germinating_Seeds_Sub_P Parameter: Organism Value: A. thaliana
  misc_feature: MA Experiment 20000307 PARAMETER Experiment Name: At_Germinating_Seeds_Sub_P Parameter: Plant Line Value: WS
  misc_feature: MA Experiment 20000307 PARAMETER Experiment Name: At_Germinating_Seeds_Sub_P Parameter: Tissue Value: Germinating Seeds
  misc_feature: MA Experiment ID: 20000315 Result: Down-regulated in Transcription
  misc_feature: MA Experiment 20000315 PARAMETER Experiment Name: At_14day_Shoots-Roots_Sub_P Parameter: Age (day) Value: 14
  misc_feature: MA Experiment 20000315 PARAMETER Experiment Name: At_14day_Shoots-Roots_Sub_P Parameter: Organism Value: A. thaliana
  misc_feature: MA Experiment 20000315 PARAMETER Experiment Name: At_14day_Shoots-Roots_Sub_P Parameter: Plant Line Value: WS
  misc_feature: MA Experiment 20000315 PARAMETER Experiment Name: At_14day_Shoots-Roots_Sub_P Parameter: Tissue Value: Shoots vs. Whole Plant
  misc_feature: MA Experiment ID: 20000349 Result: Up-regulated in Transcription
  misc_feature: MA Experiment 20000349 PARAMETER Experiment Name: At_100uM_ABA_Sub_P Parameter: Age (day) Value: 14
  misc_feature: MA Experiment 20000349 PARAMETER Experiment Name: At_100uM_ABA_Sub_P Parameter: Organism Value: A. thaliana
  misc_feature: MA Experiment 20000349 PARAMETER Experiment Name: At_100uM_ABA_Sub_P Parameter: Plant Line Value: WS
  misc_feature: MA Experiment 20000349 PARAMETER Experiment Name: At_100uM_ABA_Sub_P Parameter: Timepoint (hr) Value: 6
  misc_feature: MA Experiment 20000349 PARAMETER Experiment Name: At_100uM_ABA_Sub_P Parameter: Tissue Value: Aerial
  misc_feature: MA Experiment 20000349 PARAMETER Experiment Name: At_100uM_ABA_Sub_P Parameter: Treatment Value: 100uM ABA vs. No Treatment
atgagaactcttttgcacaacttcaattttgtccctcaagattctccttattacaaaacgtccccttttcccacatcatccttcttcaacgttcgctttcccatcaagaacaaccaaatctcttgtaacaaagcaaagaatttgagaatggatccgtctaagggaatccaagaacagaggattgtgattccaaacagacacaacgagaagctggttggtctgcttcatgaaactggttctacagacatcgtagtcttgtgccatggctttcgatcaaacaagagtaaccaaataatgaataatgtggctgctgctatacagaaagaagggatcagcgcttttcgttttgatttctccgggaatggagagagtgaaggcagtttctattatggtaactataaccatgaagctgatgatttacattctgttgtccaatacttctctaacaagaaccgtgtggttcctataatcctcggtcacagtaagggaggtgatgttgtcctcctctacgcctccaagtatcatgatgtccgcaatgtaatcaatctctcgggacgttatgatcttaaaaagggtataagagagcgtcttggagaagattttttggaaagaattaagcaacaaggattcatcgatgttggagatggaaaatcggggtatcgtgttactgagaagagcttaatggacaggttaagcactgatattcatgaagcttgcctcaagattgacaaagagtgcagggtcttgacggttcatggatcggaggacgaggtaatacctgtggaagatgcgaaggagtttgcgaagatcataccaaaccacaagctggagattgtggaaggagctaatcatggttatactgagcaccaaagtcaattagtttcaacagttatggagttcataaagacagtcattgtgaagaacaactag

SEQ ID NO: 73278 - protein, 309 aa, Arabidopsis thaliana
  peptide (1)..(309): Ceres Seq. ID no. 4962588
  misc_feature (1)..(309): Homolog of NCBI NO: 15228202 NR Description: putative protein; protein id: At3g47590.1
  misc_feature (50)..(309): Homolog of NCBI NO: 15220578 NR Description: hypothetical protein; protein id: At1g29840.1
  misc_feature (50)..(303): Homolog of NCBI NO: 21554728 NR Description: putative esterase [Arabidopsis thaliana]
  misc_feature (50)..(309): Homolog of NCBI NO: 15232826 NR Description: putative protein; protein id: At3g47560.1, by cDNA: 262295. [Arabidopsis thaliana] >gi|11281956|pir||T45716
  misc_feature (50)..(309): Homolog of NCBI NO: 22135864 NR Description: putative protein [Arabidopsis thaliana]
  misc_feature (60)..(309): Homolog of NCBI NO: 15224799 NR Description: putative esterase; protein id: At2g19550.1
  misc_feature (57)..(301): Homolog of NCBI NO: 34913064 NR Description: P0013G02.24 [Oryza sativa (japonica
  misc_feature (43)..(302): Homolog of NCBI NO: 21595418 NR Description: putative esterase-like protein [Arabidopsis
  misc_feature (43)..(302): Homolog of NCBI NO: 18416707 NR Description: putative esterase - like protein; protein id:
  misc_feature (48)..(301): Homolog of NCBI NO: 34913068 NR Description: P0013G02.26 [Oryza sativa (japonica
MRTLLHNFNFVPQDSPYYKTSPFPTSSFFNVRFPIKNNQISCNKAKNLRMDPSKGIQEQRIVIPNRHNEKLVGLLHETGSTDIVVLCHGFRSNKSNQIMNNVAAAIQKEGISAFRFDFSGNGESEGSFYYGNYNHEADDLHSVVQYFSNKNRVVPIILGHSKGGDVVLLYASKYHDVRNVINLSGRYDLKKGIRERLGEDFLERIKQQGFIDVGDGKSGYRVTEKSLMDRLSTDIHEACLKIDKECRVLTVHGSEDEVIPVEDAKEFAKIIPNHKLEIVEGANHGYTEHQSQLVSTVMEFIKTVIVKNN

SEQ ID NO: 73279 - protein, 260 aa, Arabidopsis thaliana; identical to SEQ ID NO: 71070
  peptide (1)..(260): Ceres Seq. ID no. 4962589
  misc_feature (1)..(260): Homolog of NCBI NO: 15228202 NR Description: putative protein; protein id: At3g47590.1
  misc_feature (1)..(260): Homolog of NCBI NO: 15220578 NR Description: hypothetical protein; protein id: At1g29840.1
  misc_feature (1)..(254): Homolog of NCBI NO: 21554728 NR Description: putative esterase [Arabidopsis thaliana]
  misc_feature (1)..(260): Homolog of NCBI NO: 15232826 NR Description: putative protein; protein id: At3g47560.1, by cDNA: 262295. [Arabidopsis thaliana] >gi|11281956|pir||T45716
  misc_feature (1)..(260): Homolog of NCBI NO: 22135864 NR Description: putative protein [Arabidopsis thaliana]
  misc_feature (11)..(260): Homolog of NCBI NO: 15224799 NR Description: putative esterase; protein id: At2g19550.1
  misc_feature (8)..(252): Homolog of NCBI NO: 34913064 NR Description: P0013G02.24 [Oryza sativa (japonica
  misc_feature (1)..(253): Homolog of NCBI NO: 21595418 NR Description: putative esterase-like protein [Arabidopsis
  misc_feature (1)..(253): Homolog of NCBI NO: 18416707 NR Description: putative esterase - like protein; protein id:
  misc_feature (1)..(252): Homolog of NCBI NO: 34913068 NR Description: P0013G02.26 [Oryza sativa (japonica

SEQ ID NO: 73280 - protein, 211 aa, Arabidopsis thaliana; identical to SEQ ID NO: 71071
  peptide (1)..(211): Ceres Seq. ID no. 4962590
  misc_feature (1)..(211): Homolog of NCBI NO: 15228202 NR Description: putative protein; protein id: At3g47590.1
  misc_feature (1)..(211): Homolog of NCBI NO: 15220578 NR Description: hypothetical protein; protein id: At1g29840.1
  misc_feature (1)..(205): Homolog of NCBI NO: 21554728 NR Description: putative esterase [Arabidopsis thaliana]
  misc_feature (1)..(211): Homolog of NCBI NO: 15232826 NR Description: putative protein; protein id: At3g47560.1, by cDNA: 262295. [Arabidopsis thaliana] >gi|11281956|pir||T45716
  misc_feature (1)..(211): Homolog of NCBI NO: 22135864 NR Description: putative protein [Arabidopsis thaliana]
  misc_feature (1)..(211): Homolog of NCBI NO: 15224799 NR Description: putative esterase; protein id: At2g19550.1
  misc_feature (1)..(203): Homolog of NCBI NO: 34913064 NR Description: P0013G02.24 [Oryza sativa (japonica
  misc_feature (1)..(204): Homolog of NCBI NO: 21595418 NR Description: putative esterase-like protein [Arabidopsis
  misc_feature (1)..(204): Homolog of NCBI NO: 18416707 NR Description: putative esterase - like protein; protein id:
  misc_feature (1)..(203): Homolog of NCBI NO: 34913068 NR Description: P0013G02.26 [Oryza sativa (japonica

SEQ ID NO: 73281 - DNA, 3690 bp, Arabidopsis thaliana
  misc_feature (1)..(3690): Ceres Seq. ID no. 4962681
  misc_feature: MA Experiment ID: 20001905 Result: Down-regulated in Transcription
  misc_feature: MA Experiment 20001905 PARAMETER Experiment Name: At_Drought_Reproduction_P Parameter: Age (day) Value: 40
  misc_feature: MA Experiment 20001905 PARAMETER Experiment Name: At_Drought_Reproduction_P Parameter: Organism Value: A. thaliana
  misc_feature: MA Experiment 20001905 PARAMETER Experiment Name: At_Drought_Reproduction_P Parameter: Plant Line Value: WS
  misc_feature: MA Experiment 20001905 PARAMETER Experiment Name: At_Drought_Reproduction_P Parameter: Timepoint (day) Value: 10
  misc_feature: MA Experiment 20001905 PARAMETER Experiment Name: At_Drought_Reproduction_P Parameter: Tissue Value: Rosettes
  misc_feature: MA Experiment 20001905 PARAMETER Experiment Name: At_Drought_Reproduction_P Parameter: Treatment Value: Drought vs. No Drought
atgaaacgcatcaatgtcgatctccatcttctccattttccgaaattcagaaaatttcaatcacgaaaagtatcttcgtccctacccaaattggaactcgatcagaaatcaccacaggagacagttttcttacttggtcaggtacttgacacttacccagatatcagaacacttagaacagtccactcaagaatcattttggaagatctacgttgtaattcttctttgggtgttaaacttatgagagcttatgcttctctaaaagatgtagcgtcagcacgcaaggtgttcgacgaaattcctgagagaaacgtaattatcattaatgttatgattagaagctatgtgaataatgggttttacggtgaaggtgttaaagtgtttgggacgatgtgtggttgtaatgttagacctgatcattatactttcccgtgtgttctaaaggcgtgttcttgctctgggactattgtcattgggaggaaaattcatgggtctgctacaaaagttgggctctcttcgactttgtttgttgggaatggtttagtttctatgtatggaaagtgtggatttttatctgaagcaaggcttgtacttgacgagatgtctaggagagatgtggtgtcttggaactcgttggttgttgggtatgcgcaaaatcagagatttgatgatgctttggaggtttgtagggaaatggagtctgtgaagataagccatgatgctggtacgatggctagtctgttaccagcagtgagtaacactacaactgaaaacgttatgtatgttaaagatatgttttttaaaatggggaaaaagagtttggtttcatggaatgtgatgatcggtgtgtatatgaaaaatgcgatgcctgttgaagctgtggaattgtattcccgaatggaggctgatgggtttgaacctgatgcagtctcaatcacaagtgtattacctgcttgtggagatacctctgctctgtctcttggtaagaaaatccatggatacattgagaggaagaagctgataccaaatctgttgttagagaatgcactgatcgacatgtatgcaaaatgcggatgtttagagaaagctagagatgtgtttgagaacatgaagtcacgtgatgttgtgtcttggacagctatgatttcagcttatggattcagcggacgaggctgtgacgcagtggcattgttttcgaaattgcaagattcgggtctcgtccctgattcaattgcgtttgtcacaacgcttgctgcttgtagccatgcggggttactagaagaaggtaggagttgtttcaaactcatgacagatcattacaagatcactcctaggttagagcatttggcttgtatggtggatcttcttggccgagccgggaaagtgaaagaagcttacagatttatacaagatatgtcaatggaaccaaacgagagagtttggggagcattattaggagcttgcagggtgcattctgatacagacatcggtctactagcagctgataaacttttccagttagcacccgagcaatcgggttactacgtattgctttctaacatatacgcaaaggctggaagatgggaagaagtgactaacatcagaaacataatgaagagcaaagggttaaagaagaatcccggagcaagcaatgttgaggtcaacagaataattcatacattcttagtaggcgacaggtcacacccgcaatccgatgagatatacagagagctggatgttctagtaaagaaaatgaaagagttaggttatgttcctgattcagagtcagcgcttcacgatgtggaagaggaagataaagagacgcatttagctgttcacagtgagaaattagccattgtgtttgctctgatgaacactaaggaggaagaagaagacagtaataataccataagaataacgaagaatcttaggatatgtggagactgtcatgttgcagctaagcttatctcacagataacttctcgagagataatcatcagagacactaatagatttcatgtgttccggttcggtgtttgctcttgtgcttctgagctcagagatagagagagcgagaggttagagataacagtagttttaccgatgattgagtcggttatggccgttcgtctctccaccggattttgctcgtcgacggcgttactcctctttgttcattcgtctgaatcgtctcatgctaaatttgtagagtatcgtacagcaccgagctcggaggagggaggaaactgcttccattatgcgtcccgccgcgtttttcagcctcaacgtatccaccatattgatgggagtgggtttctgaagtacaacagtgactatataacaagaaaacacctacggaagaatcgaactcaagccacagctgagtatgtagattcagcttcagatccagaaaagcaaactggcaagtcaaggtatcatccttcagaagaaatcagagcctctttgccacagaatgatggagattccaggctttcacctgcagaaactactagaaccatcattgaggtgaacaataaaggaaccctgatgcttacaggttctattggtgatggagttcatgagaatattctctggccagatataccttatataacagatcaaaatggaaatttatactttcaagtaaaggaggatgaggacgtcatgcagtccgttacttctgaaaataattatgtgttgctaaagcatgtatcttctgacgatgttatggatgcattgcagcaagttatagttggttttgatacgatggagatgatcaaggaaatggagctgatgggactttctgatagtgactttgaaactgaagatgatgaaagtggagatgatgacagtgaggatacaggagaagacgaagatgaggaggaatgggttgctattttagaggatgaagatgaagacgatgatgatgatgatgatgatgatgaggatgatgatgattctgattctgatgaatcgctgggagactgggcaaatttggaaacaatgaggagttgtcatcccatgttttttgcaaagagaatgactgaggttgcttcaaatgatcctgttgattggatggatcagccgtctgctggccttgctatccagggacttttgagtcatatcttagtggaagattattcagatatccaaaagaaacttgctgatagcaattctacaactaacggaaacaaggatgcagaaaacttagtggacaagcttgaagacaatagtaaggcaggtggtgacgaatctgagatagattcatcacaggatgaaaaagcaagaaatgtggtggcgttttacaagctggagatgataagaattcagcttatcacagcacaaggggatcagactgaagttgaggtggaagatgtcagaaaagcacaacctgatgctattgctcatgcatcagctgaaatcataagccgtttagaagaatctggtgataaaataactgaagcactcaaatctctgtgttggagacataacagtattcaagcagaggaagtgaagctgattgggatagattccctaggttttgacctcaggctttgcgcaggagcaaagattgagtcattgcgatttgcattctcgacaagggcaacatcagaagaaaacgcagagggacaaataagaaaactattattcccgaaaacgaaccagtcgacacaaccaaaaccaaaatga

SEQ ID NO: 73282 - protein, 1229 aa, Arabidopsis thaliana
  peptide (1)..(1229): Ceres Seq. ID no. 4962682
  misc_feature (106)..(140): Pfam Name: PPR repeat Pfam Description: PPR repeat
  misc_feature (265)..(682): Homolog of NCBI NO: 15220337 NR Description: hypothetical protein; protein id: At1g11290.1
  misc_feature (3)..(302): Homolog of NCBI NO: 15220337 NR Description: hypothetical protein; protein id: At1g11290.1
  misc_feature (271)..(682): Homolog of NCBI NO: 15237421 NR Description: putative protein; protein id: At5g16860.1
  misc_feature (55)..(248): Homolog of NCBI NO: 15237421 NR Description: putative protein; protein id: At5g16860.1
  misc_feature (265)..(682): Homolog of NCBI NO: 11281371 NR Description: hypothetical protein T8H10.30 - Arabidopsis >gi|6706414|emb|CAB66100.1| putative protein [Arabidopsis
  misc_feature (265)..(682): Homolog of NCBI NO: 30794008 NR Description: unknown protein [Arabidopsis thaliana]
  misc_feature (265)..(682): Homolog of NCBI NO: 30694644 NR Description: pentatricopeptide (PPR) repeat-containing protein
  misc_feature (28)..(249): Homolog of NCBI NO: 11281371 NR Description: hypothetical protein T8H10.30 - Arabidopsis >gi|6706414|emb|CAB66100.1| putative protein [Arabidopsis
  misc_feature (28)..(249): Homolog of NCBI NO: 30694644 NR Description: pentatricopeptide (PPR) repeat-containing protein
  misc_feature (28)..(249): Homolog of NCBI NO: 30794008 NR Description: unknown protein [Arabidopsis thaliana]
MKRINVDLHLLHFPKFRKFQSRKVSSSLPKLELDQKSPQETVFLLGQVLDTYPDIRTLRTVHSRIILEDLRCNSSLGVKLMRAYASLKDVASARKVFDEIPERNVIIINVMIRSYVNNGFYGEGVKVFGTMCGCNVRPDHYTFPCVLKACSCSGTIVIGRKIHGSATKVGLSSTLFVGNGLVSMYGKCGFLSEARLVLDEMSRRDVVSWNSLVVGYAQNQRFDDALEVCREMESVKISHDAGTMASLLPAVSNTTTENVMYVKDMFFKMGKKSLVSWNVMIGVYMKNAMPVEAVELYSRMEADGFEPDAVSITSVLPACGDTSALSLGKKIHGYIERKKLIPNLLLENALIDMYAKCGCLEKARDVFENMKSRDVVSWTAMISAYGFSGRGCDAVALFSKLQDSGLVPDSIAFVTTLAACSHAGLLEEGRSCFKLMTDHYKITPRLEHLACMVDLLGRAGKVKEAYRFIQDMSMEPNERVWGALLGACRVHSDTDIGLLAADKLFQLAPEQSGYYVLLSNIYAKAGRWEEVTNIRNIMKSKGLKKNPGASNVEVNRIIHTFLVGDRSHPQSDEIYRELDVLVKKMKELGYVPDSESALHDVEEEDKETHLAVHSEKLAIVFALMNTKEEEEDSNNTIRITKNLRICGDCHVAAKLISQITSREIIIRDTNRFHVFRFGVCSCASELRDRESERLEITVVLPMIESVMAVRLSTGFCSSTALLLFVHSSESSHAKFVEYRTAPSSEEGGNCFHYASRRVFQPQRIHHIDGSGFLKYNSDYITRKHLRKNRTQATAEYVDSASDPEKQTGKSRYHPSEEIRASLPQNDGDSRLSPAETTRTIIEVNNKGTLMLTGSIGDGVHENILWPDIPYITDQNGNLYFQVKEDEDVMQSVTSENNYVLLKHVSSDDVMDALQQVIVGFDTMEMIKEMELMGLSDSDFETEDDESGDDDSEDTGEDEDEEEWVAILEDEDEDDDDDDDDDEDDDDSDSDESLGDWANLETMRSCHPMFFAKRMTEVASNDPVDWMDQPSAGLAIQGLLSHILVEDYSDIQKKLADSNSTTNGNKDAENLVDKLEDNSKAGGDESEIDSSQDEKARNVVAFYKLEMIRIQLITAQGDQTEVEVEDVRKAQPDAIAHASAEIISRLEESGDKITEALKSLCWRHNSIQAEEVKLIGIDSLGFDLRLCAGAKIESLRFAFSTRATSEENAEGQIRKLLFPKTNQSTQPKPK

SEQ ID NO: 73283 - protein, 1149 aa, Arabidopsis thaliana
  peptide (1)..(1149): Ceres Seq. ID no. 4962683
  misc_feature (26)..(60): Pfam Name: PPR repeat Pfam Description: PPR repeat
  misc_feature (185)..(602): Homolog of NCBI NO: 15220337 NR Description: hypothetical protein; protein id: At1g11290.1
  misc_feature (1)..(222): Homolog of NCBI NO: 15220337 NR Description: hypothetical protein; protein id: At1g11290.1
  misc_feature (191)..(602): Homolog of NCBI NO: 15237421 NR Description: putative protein; protein id: At5g16860.1
  misc_feature (1)..(168): Homolog of NCBI NO: 15237421 NR Description: putative protein; protein id: At5g16860.1
  misc_feature (185)..(602): Homolog of NCBI NO: 11281371 NR Description: hypothetical protein T8H10.30 - Arabidopsis >gi|6706414|emb|CAB66100.1| putative protein [Arabidopsis
  misc_feature (185)..(602): Homolog of NCBI NO: 30694644 NR Description: pentatricopeptide (PPR) repeat-containing protein
  misc_feature (185)..(602): Homolog of NCBI NO: 30794008 NR Description: unknown protein [Arabidopsis thaliana]
  misc_feature (1)..(169): Homolog of NCBI NO: 11281371 NR Description: hypothetical protein T8H10.30 - Arabidopsis >gi|6706414|emb|CAB66100.1| putative protein [Arabidopsis
  misc_feature (1)..(169): Homolog of NCBI NO: 30694644 NR Description: pentatricopeptide (PPR) repeat-containing protein
  misc_feature (1)..(169): Homolog of NCBI NO: 30794008 NR Description: unknown protein [Arabidopsis thaliana]
MRAYASLKDVASARKVFDEIPERNVIIINVMIRSYVNNGFYGEGVKVFGTMCGCNVRPDHYTFPCVLKACSCSGTIVIGRKIHGSATKVGLSSTLFVGNGLVSMYGKCGFLSEARLVLDEMSRRDVVSWNSLVVGYAQNQRFDDALEVCREMESVKISHDAGTMASLLPAVSNTTTENVMYVKDMFFKMGKKSLVSWNVMIGVYMKNAMPVEAVELYSRMEADGFEPDAVSITSVLPACGDTSALSLGKKIHGYIERKKLIPNLLLENALIDMYAKCGCLEKARDVFENMKSRDVVSWTAMISAYGFSGRGCDAVALFSKLQDSGLVPDSIAFVTTLAACSHAGLLEEGRSCFKLMTDHYKITPRLEHLACMVDLLGRAGKVKEAYRFIQDMSMEPNERVWGALLGACRVHSDTDIGLLAADKLFQLAPEQSGYYVLLSNIYAKAGRWEEVTNIRNIMKSKGLKKNPGASNVEVNRIIHTFLVGDRSHPQSDEIYRELDVLVKKMKELGYVPDSESALHDVEEEDKETHLAVHSEKLAIVFALMNTKEEEEDSNNTIRITKNLRICGDCHVAAKLISQITSREIIIRDTNRFHVFRFGVCSCASELRDRESERLEITVVLPMIESVMAVRLSTGFCSSTALLLFVHSSESSHAKFVEYRTAPSSEEGGNCFHYASRRVFQPQRIHHIDGSGFLKYNSDYITRKHLRKNRTQATAEYVDSASDPEKQTGKSRYHPSEEIRASLPQNDGDSRLSPAETTRTIIEVNNKGTLMLTGSIGDGVHENILWPDIPYITDQNGNLYFQVKEDEDVMQSVTSENNYVLLKHVSSDDVMDALQQVIVGFDTMEMIKEMELMGLSDSDFETEDDESGDDDSEDTGEDEDEEEWVAILEDEDEDDDDDDDDDEDDDDSDSDESLGDWANLETMRSCHPMFFAKRMTEVASNDPVDWMDQPSAGLAIQGLLSHILVEDYSDIQKKLADSNSTTNGNKDAENLVDKLEDNSKAGGDESEIDSSQDEKARNVVAFYKLEMIRIQLITAQGDQTEVEVEDVRKAQPDAIAHASAEIISRLEESGDKITEALKSLCWRHNSIQAEEVKLIGIDSLGFDLRLCAGAKIESLRFAFSTRATSEENAEGQIRKLLFPKTNQSTQPKPK

SEQ ID NO: 73284 - protein, 1119 aa, Arabidopsis thaliana
  peptide (1)..(1119): Ceres Seq. ID no. 4962684
  misc_feature (1)..(30): Pfam Name: PPR repeat Pfam Description: PPR repeat
  misc_feature (155)..(572): Homolog of NCBI NO: 15220337 NR Description: hypothetical protein; protein id: At1g11290.1
  misc_feature (1)..(192): Homolog of NCBI NO: 15220337 NR Description: hypothetical protein; protein id: At1g11290.1
  misc_feature (161)..(572): Homolog of NCBI NO: 15237421 NR Description: putative protein; protein id: At5g16860.1
  misc_feature (1)..(138): Homolog of NCBI NO: 15237421 NR Description: putative protein; protein id: At5g16860.1
  misc_feature (155)..(572): Homolog of NCBI NO: 11281371 NR Description: hypothetical protein T8H10.30 - Arabidopsis >gi|6706414|emb|CAB66100.1| putative protein [Arabidopsis
  misc_feature (155)..(572): Homolog of NCBI NO: 30694644 NR Description: pentatricopeptide (PPR) repeat-containing protein
  misc_feature (155)..(572): Homolog of NCBI NO: 30794008 NR Description: unknown protein [Arabidopsis thaliana]
  misc_feature (1)..(139): Homolog of NCBI NO: 11281371 NR Description: hypothetical protein T8H10.30 - Arabidopsis >gi|6706414|emb|CAB66100.1| putative protein [Arabidopsis
  misc_feature (1)..(139): Homolog of NCBI NO: 30794008 NR Description: unknown protein [Arabidopsis thaliana]
  misc_feature (1)..(139): Homolog of NCBI NO: 30694644 NR Description: pentatricopeptide (PPR) repeat-containing protein
MIRSYVNNGFYGEGVKVFGTMCGCNVRPDHYTFPCVLKACSCSGTIVIGRKIHGSATKVGLSSTLFVGNGLVSMYGKCGFLSEARLVLDEMSRRDVVSWNSLVVGYAQNQRFDDALEVCREMESVKISHDAGTMASLLPAVSNTTTENVMYVKDMFFKMGKKSLVSWNVMIGVYMKNAMPVEAVELYSRMEADGFEPDAVSITSVLPACGDTSALSLGKKIHGYIERKKLIPNLLLENALIDMYAKCGCLEKARDVFENMKSRDVVSWTAMISAYGFSGRGCDAVALFSKLQDSGLVPDSIAFVTTLAACSHAGLLEEGRSCFKLMTDHYKITPRLEHLACMVDLLGRAGKVKEAYRFIQDMSMEPNERVWGALLGACRVHSDTDIGLLAADKLFQLAPEQSGYYVLLSNIYAKAGRWEEVTNIRNIMKSKGLKKNPGASNVEVNRIIHTFLVGDRSHPQSDEIYRELDVLVKKMKELGYVPDSESALHDVEEEDKETHLAVHSEKLAIVFALMNTKEEEEDSNNTIRITKNLRICGDCHVAAKLISQITSREIIIRDTNRFHVFRFGVCSCASELRDRESERLEITVVLPMIESVMAVRLSTGFCSSTALLLFVHSSESSHAKFVEYRTAPSSEEGGNCFHYASRRVFQPQRIHHIDGSGFLKYNSDYITRKHLRKNRTQATAEYVDSASDPEKQTGKSRYHPSEEIRASLPQNDGDSRLSPAETTRTIIEVNNKGTLMLTGSIGDGVHENILWPDIPYITDQNGNLYFQVKEDEDVMQSVTSENNYVLLKHVSSDDVMDALQQVIVGFDTMEMIKEMELMGLSDSDFETEDDESGDDDSEDTGEDEDEEEWVAILEDEDEDDDDDDDDDEDDDDSDSDESLGDWANLETMRSCHPMFFAKRMTEVASNDPVDWMDQPSAGLAIQGLLSHILVEDYSDIQKKLADSNSTTNGNKDAENLVDKLEDNSKAGGDESEIDSSQDEKARNVVAFYKLEMIRIQLITAQGDQTEVEVEDVRKAQPDAIAHASAEIISRLEESGDKITEALKSLCWRHNSIQAEEVKLIGIDSLGFDLRLCAGAKIESLRFAFSTRATSEENAEGQIRKLLFPKTNQSTQPKPK

SEQ ID NO: 73285 - DNA, 711 bp, Arabidopsis thaliana
  misc_feature (1)..(711): Ceres Seq. ID no. 4962693
  misc_feature: MA Experiment ID: 20000173 Result: Down-regulated in Transcription
  misc_feature: MA Experiment 20000173 PARAMETER Experiment Name: At_42deg_Heat_P Parameter: Age (day) Value: 14
  misc_feature: MA Experiment 20000173 PARAMETER Experiment Name: At_42deg_Heat_P Parameter: Organism Value: A. thaliana
  misc_feature: MA Experiment 20000173 PARAMETER Experiment Name: At_42deg_Heat_P Parameter: Plant Line Value: WS
  misc_feature: MA Experiment 20000173 PARAMETER Experiment Name: At_42deg_Heat_P Parameter: Temperature (deg C) Value: 42 vs. 22
  misc_feature: MA Experiment 20000173 PARAMETER Experiment Name: At_42deg_Heat_P Parameter: Timepoint (hr) Value: 6
  misc_feature: MA Experiment 20000173 PARAMETER Experiment Name: At_42deg_Heat_P Parameter: Tissue Value: Aerial
  misc_feature: MA Experiment ID: 20000180 Result: Down-regulated in Transcription
  misc_feature: MA Experiment 20000180 PARAMETER Experiment Name: At_Germinating_Seeds_P Parameter: Age (hr) Value: 24 vs. 0
  misc_feature: MA Experiment 20000180 PARAMETER Experiment Name: At_Germinating_Seeds_P Parameter: Tissue Value: Germinating Seeds
  misc_feature: MA Experiment ID: 20000437 Result: Up-regulated in Transcription
  misc_feature: MA Experiment 20000437 PARAMETER Experiment Name: At_Drought_P Parameter: Age (day) Value: 8
  misc_feature: MA Experiment 20000437 PARAMETER Experiment Name: At_Drought_P Parameter: Organism Value: A. thaliana
  misc_feature: MA Experiment 20000437 PARAMETER Experiment Name: At_Drought_P Parameter: Plant Line Value: WS
  misc_feature: MA Experiment 20000437 PARAMETER Experiment Name: At_Drought_P Parameter: Timepoint (hr) Value: 24
  misc_feature: MA Experiment 20000437 PARAMETER Experiment Name: At_Drought_P Parameter: Tissue Value: Whole Plant
  misc_feature: MA Experiment 20000437 PARAMETER Experiment Name: At_Drought_P Parameter: Treatment Value: Drought vs. No Drought
atgtttgatgaacgtggatccttttctattgcccatccgtatcctggtccccttgcagctttattcaagtctataggaaagcttccagaaagggttgcttttactggagagattgttcctgttaaagagaaaagggttgatgcggtgaagaaatatgtcgaggaagctatacagtcagagatgaaagcgattagcgataccccaaattctgtccgtagtattttgaattcttccgatcagatgtatgcctcccggtgtgacagtcttagagccctgatcaatgatgcaaaggaaaaatacgttatctataagttcgttccaagctcatgtatgtttattgacccaaatggtacgaaagaaatagacttgaaggttttggaactgtcaaaaccagatccattagggacttggtcgacaaaacttgtggatggaatcaataagaacgaatcaagaagacgagctttgattcttttctgtttatattttcttgatataaacgcaagggatgcttatatggtatcagtggataggaaaggtttccacttgttggggaaggtaccgagtgaacaagaagctggagatgagtatcagtggagagagtttaggtttgagtttgaagaagaggtgaaagacgttgaagctttttgccaccaacttgtggaaatggaacaagaggttgtaagcaagtttactgaccataccggtttgtga

SEQ ID NO: 73286 - protein, 236 aa, Arabidopsis thaliana
  peptide (1)..(236): Ceres Seq. ID no. 4962694
  misc_feature (1)..(236): Homolog of NCBI NO: 15229211 NR Description: unknown protein; protein id: At3g04020.1 thaliana] >gi|6223647|gb|AAF05861.1|AC011698_12 unknown protein
MFDERGSFSIAHPYPGPLAALFKSIGKLPERVAFTGEIVPVKEKRVDAVKKYVEEAIQSEMKAISDTPNSVRSILNSSDQMYASRCDSLRALINDAKEKYVIYKFVPSSCMFIDPNGTKEIDLKVLELSKPDPLGTWSTKLVDGINKNESRRRALILFCLYFLDINARDAYMVSVDRKGFHLLGKVPSEQEAGDEYQWREFRFEFEEEVKDVEAFCHQLVEMEQEVVSKFTDHTGL

SEQ ID NO: 73287 - protein, 176 aa, Arabidopsis thaliana
  peptide (1)..(176): Ceres Seq. ID no. 4962695
  misc_feature (1)..(176): Homolog of NCBI NO: 15229211 NR Description: unknown protein; protein id: At3g04020.1 thaliana] >gi|6223647|gb|AAF05861.1|AC011698_12 unknown protein
MKAISDTPNSVRSILNSSDQMYASRCDSLRALINDAKEKYVIYKFVPSSCMFIDPNGTKEIDLKVLELSKPDPLGTWSTKLVDGINKNESRRRALILFCLYFLDINARDAYMVSVDRKGFHLLGKVPSEQEAGDEYQWREFRFEFEEEVKDVEAFCHQLVEMEQEVVSKFTDHTGL

SEQ ID NO: 73288 - protein, 156 aa, Arabidopsis thaliana
  peptide (1)..(156): Ceres Seq. ID no. 4962696
  misc_feature (1)..(156): Homolog of NCBI NO: 15229211 NR Description: unknown protein; protein id: At3g04020.1 thaliana] >gi|6223647|gb|AAF05861.1|AC011698_12 unknown protein
MYASRCDSLRALINDAKEKYVIYKFVPSSCMFIDPNGTKEIDLKVLELSKPDPLGTWSTKLVDGINKNESRRRALILFCLYFLDINARDAYMVSVDRKGFHLLGKVPSEQEAGDEYQWREFRFEFEEEVKDVEAFCHQLVEMEQEVVSKFTDHTGL

SEQ ID NO: 73289 - DNA, 1941 bp, Arabidopsis thaliana
  misc_feature (1)..(1941): Ceres Seq. ID no. 4962731
  misc_feature: MA Experiment ID: 20000180 Result: Down-regulated in Transcription
  misc_feature: MA Experiment 20000180 PARAMETER Experiment Name: At_Germinating_Seeds_P Parameter: Age (hr) Value: 24 vs. 0
  misc_feature: MA Experiment 20000180 PARAMETER Experiment Name: At_Germinating_Seeds_P Parameter: Tissue Value: Germinating Seeds
  misc_feature: MA Experiment ID: 20001558 Result: Up-regulated in Transcription
  misc_feature: MA Experiment 20001558 PARAMETER Experiment Name: At_Drought_Soil_Dry_P Parameter: Age (day) Value: 27
  misc_feature: MA Experiment 20001558 PARAMETER Experiment Name: At_Drought_Soil_Dry_P Parameter: Organism Value: A. thaliana
  misc_feature: MA Experiment 20001558 PARAMETER Experiment Name: At_Drought_Soil_Dry_P Parameter: Plant Line Value: WS
  misc_feature: MA Experiment 20001558 PARAMETER Experiment Name: At_Drought_Soil_Dry_P Parameter: Post Timepoint (hr) Value: 6
  misc_feature: MA Experiment 20001558 PARAMETER Experiment Name: At_Drought_Soil_Dry_P Parameter: Post-Treatment Value: Re-Water vs. No Drought
  misc_feature: MA Experiment 20001558 PARAMETER Experiment Name: At_Drought_Soil_Dry_P Parameter: Timepoint (day) Value: 13
  misc_feature: MA Experiment 20001558 PARAMETER Experiment Name: At_Drought_Soil_Dry_P Parameter: Treatment Value: Drought vs. No Drought
atgttgttcgatgaaatgcctaagagagattccgtgtcttggaacacaatgatttctgggtacacaagctgtgggaaattggaggatgcatggtgtttatttacatgtatgaagagatctggatctgatgttgatgggtatagttttagtaggttgttgaaagggattgcttctgtgaaaaggttcgatcttggagagcaagtgcatggtttggttataaagggaggttatgagtgtaatgtgtatgttggaagttcgcttgttgatatgtatgcgaaatgtgaaagagttgaagatgcttttgaggcttttaaggagatttcagagcctaactctgtttcatggaatgctttgattgctggatttgtgcaagtgcgagatatcaagactgctttttggttgttgggtttgatggagatgaaagctgctgtgactatggatgctggcactttcgctccacttcttactttgcttgatgatcctatgttttgtaacttgttaaagcaagttcatgctaaggttttgaaactcgggcttcaacacgagatcactatatgcaatgcgatgatcagctcttatgcagattgtgggtcagtatcagatgcaaagagagtttttgatggcttgggtggctcaaaagacttgatttcgtggaattcgatgattgcaggtttctctaaacatgagctaaaggaatctgcttttgaactgtttattcaaatgcaaagacattgggtcgaaaccgacatttatacttacaccggcttgttaagcgcttgctctggcgaagaacatcaaatttttgggaagtctttgcatggtatggtaataaagaagggattggaacaagtaacttctgcaacaaatgcattgatctctatgtatattcagtttcctacaggcaccatggaagatgctctgtctctatttgaatccttaaaatctaaggatcttatctcttggaattcgatcattacagggttcgcccagaagggtctcagcgaggatgcggtaaagttctttagctacttaagatcctcagagataaaagtcgacgattacgccttctctgcacttctcagatcatgctcggacctagcaacactccaattaggtcagcagatccacgcgctcgccactaaatcaggcttcgtatcaaacgagtttgtaatcagttctctgatcgtgatgtactcaaaatgtggcataatcgagagtgcacgaaaatgcttccaacagatttcctccaaacacagcacagtagcttggaacgcaatgattcttggatacgctcaacatggtttaggccaagtctctcttgatctcttctcccaaatgtgtaaccaaaacgtgaagctagaccatgtaaccttcacagcaatccttacagcttgtagccacaccggtttaatacaagagggactcgagttgcttaatttaatggaaccggtttacaaaatccaacctcgaatggaacattacgcagctgcagttgatctcttaggcagagcagggctcgtgaacaaagcgaaagagttaatcgaatcaatgccgttgaatcctgatccaatggtattgaaaactttccttggagtttgcagggcttgtggagagatcgaaatggctactcaagtggctaaccatttgctagagattgaaccagaagatcattttacgtatgtttcgttgtctcatatgtatagtgatctcaagaaatgggaagagaaagcaagtgtgaagaagatgatgaaggagagaggtgtaaagaaagttccaggttggagctggattgagattagaaatcaagttaaggcctttaatgctgaagatcgatcaaatcctctttgtcaagatatatatatgatgattaaagacttgactcaggaaatgcagtggcttgattctgataatggggttgatgcagattcacttcatgcttaa

SEQ ID NO: 73290 - protein, 646 aa, Arabidopsis thaliana
  peptide (1)..(646): Ceres Seq. ID no. 4962732
  misc_feature (12)..(46): Pfam Name: PPR repeat Pfam Description: PPR repeat
  misc_feature (57)..(646): Homolog of NCBI NO: 9279602 NR Description: gb|AAD22682.1~gene_id:MPE11.14~strong similarity
  misc_feature (2)..(644): Homolog of NCBI NO: 27260973 NR Description: OJ1705_C03.3 [Oryza sativa (japonica
  misc_feature (1)..(461): Homolog of NCBI NO: 9279602 NR Description: gb|AAD22682.1~gene_id:MPE11.14~strong similarity
  misc_feature (2)..(628): Homolog of NCBI NO: 15236324 NR Description: putative protein; protein id: At4g13650.1
  misc_feature (3)..(631): Homolog of NCBI NO: 37536800 NR Description: putative PPR-repeat protein [Oryza sativa
  misc_feature (2)..(55): Homolog of NCBI NO: 37536800 NR Description: putative PPR-repeat protein [Oryza sativa
  misc_feature (2)..(643): Homolog of NCBI NO: 15226200 NR Description: putative selenium-binding protein; protein id:
  misc_feature (2)..(630): Homolog of NCBI NO: 15234006 NR Description: putative protein; protein id: At4g18750.1
  misc_feature (5)..(610): Homolog of NCBI NO: 34912348 NR Description: P0518F01.9 [Oryza sativa (japonica
  misc_feature (2)..(631): Homolog of NCBI NO: 15232006 NR Description: hypothetical protein; protein id: At3g09040.1 thaliana] >gi|5923669|gb|AAD56320.1|AC009326_7 hypothetical
MLFDEMPKRDSVSWNTMISGYTSCGKLEDAWCLFTCMKRSGSDVDGYSFSRLLKGIASVKRFDLGEQVHGLVIKGGYECNVYVGSSLVDMYAKCERVEDAFEAFKEISEPNSVSWNALIAGFVQVRDIKTAFWLLGLMEMKAAVTMDAGTFAPLLTLLDDPMFCNLLKQVHAKVLKLGLQHEITICNAMISSYADCGSVSDAKRVFDGLGGSKDLISWNSMIAGFSKHELKESAFELFIQMQRHWVETDIYTYTGLLSACSGEEHQIFGKSLHGMVIKKGLEQVTSATNALISMYIQFPTGTMEDALSLFESLKSKDLISWNSIITGFAQKGLSEDAVKFFSYLRSSEIKVDDYAFSALLRSCSDLATLQLGQQIHALATKSGFVSNEFVISSLIVMYSKCGIIESARKCFQQISSKHSTVAWNAMILGYAQHGLGQVSLDLFSQMCNQNVKLDHVTFTAILTACSHTGLIQEGLELLNLMEPVYKIQPRMEHYAAAVDLLGRAGLVNKAKELIESMPLNPDPMVLKTFLGVCRACGEIEMATQVANHLLEIEPEDHFTYVSLSHMYSDLKKWEEKASVKKMMKERGVKKVPGWSWIEIRNQVKAFNAEDRSNPLCQDIYMMIKDLTQEMQWLDSDNGVDADSLHA

SEQ ID NO: 73291 - protein, 641 aa, Arabidopsis thaliana
  peptide (1)..(641): Ceres Seq. ID no. 4962733
  misc_feature (7)..(41): Pfam Name: PPR repeat Pfam Description: PPR repeat
  misc_feature (52)..(641): Homolog of NCBI NO: 9279602 NR Description: gb|AAD22682.1~gene_id:MPE11.14~strong similarity
  misc_feature (1)..(639): Homolog of NCBI NO: 27260973 NR Description: OJ1705_C03.3 [Oryza sativa (japonica
  misc_feature (1)..(456): Homolog of NCBI NO: 9279602 NR Description: gb|AAD22682.1~gene_id:MPE11.14~strong similarity
  misc_feature (1)..(623): Homolog of NCBI NO: 15236324 NR Description: putative protein; protein id: At4g13650.1
  misc_feature (1)..(626): Homolog of NCBI NO: 37536800 NR Description: putative PPR-repeat protein [Oryza sativa
  misc_feature (1)..(50): Homolog of NCBI NO: 37536800 NR Description: putative PPR-repeat protein [Oryza sativa
  misc_feature (1)..(638): Homolog of NCBI NO: 15226200 NR Description: putative selenium-binding protein; protein id:
  misc_feature (1)..(625): Homolog of NCBI NO: 15234006 NR Description: putative protein; protein id: At4g18750.1
  misc_feature (1)..(605): Homolog of NCBI NO: 34912348 NR Description: P0518F01.9 [Oryza sativa (japonica
  misc_feature (1)..(626): Homolog of NCBI NO: 15232006 NR Description: hypothetical protein; protein id: At3g09040.1 thaliana] >gi|5923669|gb|AAD56320.1|AC009326_7 hypothetical
MPKRDSVSWNTMISGYTSCGKLEDAWCLFTCMKRSGSDVDGYSFSRLLKGIASVKRFDLGEQVHGLVIKGGYECNVYVGSSLVDMYAKCERVEDAFEAFKEISEPNSVSWNALIAGFVQVRDIKTAFWLLGLMEMKAAVTMDAGTFAPLLTLLDDPMFCNLLKQVHAKVLKLGLQHEITICNAMISSYADCGSVSDAKRVFDGLGGSKDLISWNSMIAGFSKHELKESAFELFIQMQRHWVETDIYTYTGLLSACSGEEHQIFGKSLHGMVIKKGLEQVTSATNALISMYIQFPTGTMEDALSLFESLKSKDLISWNSIITGFAQKGLSEDAVKFFSYLRSSEIKVDDYAFSALLRSCSDLATLQLGQQIHALATKSGFVSNEFVISSLIVMYSKCGIIESARKCFQQISSKHSTVAWNAMILGYAQHGLGQVSLDLFSQMCNQNVKLDHVTFTAILTACSHTGLIQEGLELLNLMEPVYKIQPRMEHYAAAVDLLGRAGLVNKAKELIESMPLNPDPMVLKTFLGVCRACGEIEMATQVANHLLEIEPEDHFTYVSLSHMYSDLKKWEEKASVKKMMKERGVKKVPGWSWIEIRNQVKAFNAEDRSNPLCQDIYMMIKDLTQEMQWLDSDNGVDADSLHA

SEQ ID NO: 73292 - protein, 630 aa, Arabidopsis thaliana
  peptide (1)..(630): Ceres Seq. ID no. 4962734
  misc_feature (1)..(30): Pfam Name: PPR repeat Pfam Description: PPR repeat
  misc_feature (41)..(630): Homolog of NCBI NO: 9279602 NR Description: gb|AAD22682.1~gene_id:MPE11.14~strong similarity
  misc_feature (1)..(628): Homolog of NCBI NO: 27260973 NR Description: OJ1705_C03.3 [Oryza sativa (japonica
  misc_feature (1)..(445): Homolog of NCBI NO: 9279602 NR Description: gb|AAD22682.1~gene_id:MPE11.14~strong similarity
  misc_feature (1)..(612): Homolog of NCBI NO: 15236324 NR Description: putative protein; protein id: At4g13650.1
  misc_feature (1)..(615): Homolog of NCBI NO: 37536800 NR Description: putative PPR-repeat protein [Oryza sativa
  misc_feature (1)..(39): Homolog of NCBI NO: 37536800 NR Description: putative PPR-repeat protein [Oryza sativa
  misc_feature (1)..(627): Homolog of NCBI NO: 15226200 NR Description: putative selenium-binding protein; protein id:
  misc_feature (1)..(614): Homolog of NCBI NO: 15234006 NR Description: putative protein; protein id: At4g18750.1
  misc_feature (1)..(594): Homolog of NCBI NO: 34912348 NR Description: P0518F01.9 [Oryza sativa (japonica
  misc_feature (1)..(615): Homolog of NCBI NO: 15232006 NR Description: hypothetical protein; protein id: At3g09040.1 thaliana] >gi|5923669|gb|AAD56320.1|AC009326_7 hypothetical
MISGYTSCGKLEDAWCLFTCMKRSGSDVDGYSFSRLLKGIASVKRFDLGEQVHGLVIKGGYECNVYVGSSLVDMYAKCERVEDAFEAFKEISEPNSVSWNALIAGFVQVRDIKTAFWLLGLMEMKAAVTMDAGTFAPLLTLLDDPMFCNLLKQVHAKVLKLGLQHEITICNAMISSYADCGSVSDAKRVFDGLGGSKDLISWNSMIAGFSKHELKESAFELFIQMQRHWVETDIYTYTGLLSACSGEEHQIFGKSLHGMVIKKGLEQVTSATNALISMYIQFPTGTMEDALSLFESLKSKDLISWNSIITGFAQKGLSEDAVKFFSYLRSSEIKVDDYAFSALLRSCSDLATLQLGQQIHALATKSGFVSNEFVISSLIVMYSKCGIIESARKCFQQISSKHSTVAWNAMILGYAQHGLGQVSLDLFSQMCNQNVKLDHVTFTAILTACSHTGLIQEGLELLNLMEPVYKIQPRMEHYAAAVDLLGRAGLVNKAKELIESMPLNPDPMVLKTFLGVCRACGEIEMATQVANHLLEIEPEDHFTYVSLSHMYSDLKKWEEKASVKKMMKERGVKKVPGWSWIEIRNQVKAFNAEDRSNPLCQDIYMMIKDLTQEMQWLDSDNGVDADSLHA

SEQ ID NO: 73293 - DNA, 576 bp, Arabidopsis thaliana
  misc_feature (1)..(576): Ceres Seq. ID no. 4962845
  misc_feature: MA Experiment ID: 20001247 Result: Down-regulated in Transcription
  misc_feature: MA Experiment 20001247 PARAMETER Experiment Name: At_Far-red-induction_P Parameter: Age (day) Value: 7
  misc_feature: MA Experiment 20001247 PARAMETER Experiment Name: At_Far-red-induction_P Parameter: Light Value: Far-red vs. White
  misc_feature: MA Experiment 20001247 PARAMETER Experiment Name: At_Far-red-induction_P Parameter: Organism Value: A. thaliana
  misc_feature: MA Experiment 20001247 PARAMETER Experiment Name: At_Far-red-induction_P Parameter: Plant Line Value: Columbia
  misc_feature: MA Experiment 20001247 PARAMETER Experiment Name: At_Far-red-induction_P Parameter: Timepoint (hr) Value: 1
  misc_feature: MA Experiment 20001247 PARAMETER Experiment Name: At_Far-red-induction_P Parameter: Tissue Value: Whole Plant
atggcagaggacgagctggtcgagattgttcctaatatgaacatggagcaactcaatttcatcagtggcgatttcggtcggttcattcctcagattccgacaaaggtgcctctgtggcttgcagtggcactgaagaggagaggaaaatgcactttccggcctccggggtggatgtctgttgataatttgactcagatcttggaagcagaacgtgaatctcagtcgacattccaggcattaccatttagttacgtggagattgccagactactttttgaccatgcacgtgacgatattccagacatgtatatggtgagatccctagtcgaggacatcagagatgtacggcttcacaaacttgagactaacttaggatcatttcaaggtacatctgcagtaaagatctctaatgtatcggcaatggaagtaaacatagtacgcccatttgtgataagagccttagaagcattttataagcatgacaagccagaggctgatgtagacagagacaccagaagtagtagacaacagcgtgaaaccaacaatgaaccaaggagacctctaaggcaacgctag

SEQ ID NO: 73294 - protein, 191 aa, Arabidopsis thaliana; identical to SEQ ID NO: 71770
  peptide (1)..(191): Ceres Seq. ID no. 4962846
  misc_feature (1)..(147): Pfam Name: Partner of SLD five, PSF2 Pfam Description: Partner of SLD five, PSF2
  misc_feature (1)..(191): Homolog of NCBI NO: 15230511 NR Description: unknown protein; protein id: At3g12530.1
  misc_feature (1)..(191): Homolog of NCBI NO: 37999772 NR Description: Probable DNA replication complex GINS protein PSF2
  misc_feature (1)..(191): Homolog of NCBI NO: 34904658 NR Description: P0034C11.24 [Oryza sativa (japonica
  misc_feature (1)..(190): Homolog of NCBI NO: 5042457 NR Description: unknown protein [Oryza sativa (japonica
  misc_feature (1)..(159): Homolog of NCBI NO: 34851825 NR Description: similar to HSPC037 protein [Rattus norvegicus]
  misc_feature (1)..(159): Homolog of NCBI NO: 7706367 NR Description: HSPC037 protein [Homo sapiens]
  misc_feature (1)..(159): Homolog of NCBI NO: 26390541 NR Description: unnamed protein product [Mus musculus]
  misc_feature (1)..(171): Homolog of NCBI NO: 17945611 NR Description: RE26983p [Drosophila melanogaster]
  misc_feature (1)..(171): Homolog of NCBI NO: 24581628 NR Description: CG18013-PA [Drosophila melanogaster]
  misc_feature (1)..(147): Homolog of NCBI NO: 39584442 NR Description: Hypothetical protein CBG19768 [Caenorhabditis

SEQ ID NO: 73295 - protein, 179 aa, Arabidopsis thaliana; identical to SEQ ID NO: 71771
  peptide (1)..(179): Ceres Seq. ID no. 4962847
  misc_feature (1)..(135): Pfam Name: Partner of SLD five, PSF2 Pfam Description: Partner of SLD five, PSF2
  misc_feature (1)..(179): Homolog of NCBI NO: 15230511 NR Description: unknown protein; protein id: At3g12530.1
  misc_feature (1)..(179): Homolog of NCBI NO: 37999772 NR Description: Probable DNA replication complex GINS protein PSF2
  misc_feature (1)..(179): Homolog of NCBI NO: 34904658 NR Description: P0034C11.24 [Oryza sativa (japonica
  misc_feature (1)..(178): Homolog of NCBI NO: 5042457 NR Description: unknown protein [Oryza sativa (japonica
  misc_feature (1)..(147): Homolog of NCBI NO: 34851825 NR Description: similar to HSPC037 protein [Rattus norvegicus]
  misc_feature (1)..(147): Homolog of NCBI NO: 7706367 NR Description: HSPC037 protein [Homo sapiens]
  misc_feature (1)..(147): Homolog of NCBI NO: 26390541 NR Description: unnamed protein product [Mus musculus]
  misc_feature (1)..(159): Homolog of NCBI NO: 17945611 NR Description: RE26983p [Drosophila melanogaster]
  misc_feature (1)..(159): Homolog of NCBI NO: 24581628 NR Description: CG18013-PA [Drosophila melanogaster]
  misc_feature (1)..(135): Homolog of NCBI NO: 39584442 NR Description: Hypothetical protein CBG19768 [Caenorhabditis

SEQ ID NO: 73296 - protein, 177 aa, Arabidopsis thaliana
  peptide (1)..(177): Ceres Seq. ID no. 4962848
  misc_feature (1)..(133): Pfam Name: Partner of SLD five, PSF2 Pfam Description: Partner of SLD five, PSF2
  misc_feature (1)..(177): Homolog of NCBI NO: 15230511 NR Description: unknown protein; protein id: At3g12530.1
  misc_feature (1)..(177): Homolog of NCBI NO: 37999772 NR Description: Probable DNA replication complex GINS protein PSF2
  misc_feature (1)..(177): Homolog of NCBI NO: 34904658 NR Description: P0034C11.24 [Oryza sativa (japonica
  misc_feature (1)..(176): Homolog of NCBI NO: 5042457 NR Description: unknown protein [Oryza sativa (japonica
  misc_feature (1)..(145): Homolog of NCBI NO: 34851825 NR Description: similar to HSPC037 protein [Rattus norvegicus]
  misc_feature (1)..(145): Homolog of NCBI NO: 7706367 NR Description: HSPC037 protein [Homo sapiens]
  misc_feature (1)..(145): Homolog of NCBI NO: 26390541 NR Description: unnamed protein product [Mus musculus]
  misc_feature (1)..(157): Homolog of NCBI NO: 17945611 NR Description: RE26983p [Drosophila melanogaster]
  misc_feature (1)..(157): Homolog of NCBI NO: 24581628 NR Description: CG18013-PA [Drosophila melanogaster]
  misc_feature (1)..(133): Homolog of NCBI NO: 39584442 NR Description: Hypothetical protein CBG19768 [Caenorhabditis
MEQLNFISGDFGRFIPQIPTKVPLWLAVALKRRGKCTFRPPGWMSVDNLTQILEAERESQSTFQALPFSYVEIARLLFDHARDDIPDMYMVRSLVEDIRDVRLHKLETNLGSFQGTSAVKISNVSAMEVNIVRPFVIRALEAFYKHDKPEADVDRDTRSSRQQRETNNEPRRPLRQR

SEQ ID NO: 73297 - DNA, 2160 bp, Arabidopsis thaliana
  misc_feature (1)..(2160): Ceres Seq. ID no. 4962861
  misc_feature: MA Experiment ID: 20000307 Result: Down-regulated in Transcription
  misc_feature: MA Experiment 20000307 PARAMETER Experiment Name: At_Germinating_Seeds_Sub_P Parameter: Age (hr) Value: 24 vs. 0
  misc_feature: MA Experiment 20000307 PARAMETER Experiment Name: At_Germinating_Seeds_Sub_P Parameter: Organism Value: A. thaliana
  misc_feature: MA Experiment 20000307 PARAMETER Experiment Name: At_Germinating_Seeds_Sub_P Parameter: Plant Line Value: WS
  misc_feature: MA Experiment 20000307 PARAMETER Experiment Name: At_Germinating_Seeds_Sub_P Parameter: Tissue Value: Germinating Seeds
  misc_feature: MA Experiment ID: 20000328 Result: Down-regulated in Transcription
  misc_feature: MA Experiment 20000328 PARAMETER Experiment Name: At_42deg_Heat_Sub_P Parameter: Age (day) Value: 14
  misc_feature: MA Experiment 20000328 PARAMETER Experiment Name: At_42deg_Heat_Sub_P Parameter: Organism Value: A. thaliana
  misc_feature: MA Experiment 20000328 PARAMETER Experiment Name: At_42deg_Heat_Sub_P Parameter: Plant Line Value: WS
  misc_feature: MA Experiment 20000328 PARAMETER Experiment Name: At_42deg_Heat_Sub_P Parameter: Temperature (deg C) Value: 42 vs. 22
  misc_feature: MA Experiment 20000328 PARAMETER Experiment Name: At_42deg_Heat_Sub_P Parameter: Timepoint (hr) Value: 6
  misc_feature: MA Experiment 20000328 PARAMETER Experiment Name: At_42deg_Heat_Sub_P Parameter: Tissue Value: Aerial
atgtcggaagcatcttgtcttgcttctcctttgctctacaccaattctggaatccattctgattctttctacgcttcgcttattgatagtgccactcataaagctcagctgaagcaaatccacgcacgtttacttgttttaggtttgcagttcagtggtttcttgatcaccaagctcattcacgctagctcttcctttggtgacattacttttgcacgccaagtgttcgacgatttacctcgtcctcaaatattcccttggaatgctataatcaggggttattcaaggaacaatcacttccaagatgctcttctcatgtattccaatatgcaactcgctcgtgtttctcctgattctttcactttccctcatcttcttaaagcttgcagcggtttgtctcatcttcagatgggtagattcgttcatgctcaggtgttcaggcttggatttgatgcggatgtgtttgttcagaacggtctcattgccttgtatgcgaaatgtaggcgtttgggatctgcgagaactgtgtttgaaggactgccattgccagagaggacgatagtctcatggactgctatcgtttcagcttatgctcagaacggtgagcctatggaggctcttgagatttttagtcagatgaggaagatggatgtgaagcctgactgggtagctcttgtcagcgttctcaatgctttcacttgcttgcaggatttgaagcaagggagatctattcatgcttctgttgtgaagatgggtcttgaaatagagcctgacttactcatctctctcaacaccatgtatgcaaaatgtggccaagttgcaactgccaagattctgtttgataagatgaagtcacctaacctgattttgtggaacgccatgatctctggctatgcgaagaacggttatgccagggaagctattgatatgtttcatgagatgatcaataaagatgttagacccgacaccatctctataacatctgccatttcggcttgcgctcaagtaggttctcttgagcaggctcgcagtatgtatgaatatgtaggcagaagtgactacagggatgacgttttcataagcagcgcattaatcgatatgtttgctaaatgtggaagtgtagaaggcgcaaggttggtttttgaccgaacacttgacagggatgttgtggtgtggagtgctatgattgttgggtatggattgcacgggcgggcaagagaagcaatcagtctgtaccgtgcaatggagcgtggtggagtacatcccaatgacgtcacttttctggggcttctcatggcctgtaaccattcaggcatggtaagagaaggctggtggtttttcaaccggatggcggatcacaaaataaatccacaacagcaacattatgcatgtgtcattgatcttctcgggcgtgctggtcatctggatcaagcttatgaagtgatcaaatgcatgccggtccagcccggtgtaacggtttggggagcactcctaagcgcttgcaagaagcatcgccacgttgaactgggagaatatgcagctcaacagcttttctcaatagacccatccaacacaggccactatgtacagctctctaatctgtatgctgcagcacgtttgtgggaccgtgttgcagaggtgcgagtgagaatgaaggagaaaggattgaacaaagacgttggatgtagctgggttgaagtaaggggaaggttggaggctttccgagtgggtgataagtcacatccgagatatgaagagatagagagacaagtagagtggatagagagtagattgaaggaaggtggatttgtggctaacaaggatgcttcattgcacgatctcaacgatgaagaagctgaagagactttgtgcagccacagcgagaggatcgcgattgcgtatgggcttataagtacaccccaaggcacaccactgcggatcacaaagaatctgagagcatgcgtaaactgtcatgctgctacaaagcttatctcgaagctagtggacagagagattgttgtgagagatacaaataggttccaccattttaaggatggagtttgttcctgtggtgattattgtcttaaggttgaaaagcttacttatttaatcatcaatttaaagattctgacaaacacaatagaaaaatctgtgagataa

SEQ ID NO: 73298 - protein, 719 aa, Arabidopsis thaliana
  peptide (1)..(719): Ceres Seq. ID no. 4962862
  misc_feature (425)..(459): Pfam Name: PPR repeat Pfam Description: PPR repeat
  misc_feature (38)..(693): Homolog of NCBI NO: 15220337 NR Description: hypothetical protein; protein id: At1g11290.1
  misc_feature (15)..(690): Homolog of NCBI NO: 15234006 NR Description: putative protein; protein id: At4g18750.1
  misc_feature (11)..(693): Homolog of NCBI NO: 18418348 NR Description: putative protein; protein id: At4g33990.1
  misc_feature (16)..(693): Homolog of NCBI NO: 34915012 NR Description: P0458A05.10 [Oryza sativa (japonica
  misc_feature (40)..(693): Homolog of NCBI NO: 34903762 NR Description: unnamed protein product [Oryza sativa (japonica group)] >gi|7340873|dbj|BAA92963.1| unnamed protein product
  misc_feature (25)..(695): Homolog of NCBI NO: 37536510 NR Description: hypothetical protein [Oryza sativa (japonica group)] >gi|12039323|gb|AAG46111.1| hypothetical protein [Oryza >gi|31433315|gb|AAP54844.1| hypothetical protein [Oryza sativa
  misc_feature (1)..(693): Homolog of NCBI NO: 34897884 NR Description: Similar to Arabidopsis thaliana DNA chromosome 4,
  misc_feature (9)..(693): Homolog of NCBI NO: 15231617 NR Description: unknown protein; protein id: At3g26780.1
  misc_feature (26)..(693): Homolog of NCBI NO: 15231970 NR Description: unknown protein; protein id: At3g08820.1 thaliana] >gi|6403507|gb|AAF07847.1|AC010871_23 unknown protein
  misc_feature (38)..(693): Homolog of NCBI NO: 11281371 NR Description: hypothetical protein T8H10.30 - Arabidopsis >gi|6706414|emb|CAB66100.1| putative protein [Arabidopsis
MSEASCLASPLLYTNSGIHSDSFYASLIDSATHKAQLKQIHARLLVLGLQFSGFLITKLIHASSSFGDITFARQVFDDLPRPQIFPWNAIIRGYSRNNHFQDALLMYSNMQLARVSPDSFTFPHLLKACSGLSHLQMGRFVHAQVFRLGFDADVFVQNGLIALYAKCRRLGSARTVFEGLPLPERTIVSWTAIVSAYAQNGEPMEALEIFSQMRKMDVKPDWVALVSVLNAFTCLQDLKQGRSIHASVVKMGLEIEPDLLISLNTMYAKCGQVATAKILFDKMKSPNLILWNAMISGYAKNGYAREAIDMFHEMINKDVRPDTISITSAISACAQVGSLEQARSMYEYVGRSDYRDDVFISSALIDMFAKCGSVEGARLVFDRTLDRDVVVWSAMIVGYGLHGRAREAISLYRAMERGGVHPNDVTFLGLLMACNHSGMVREGWWFFNRMADHKINPQQQHYACVIDLLGRAGHLDQAYEVIKCMPVQPGVTVWGALLSACKKHRHVELGEYAAQQLFSIDPSNTGHYVQLSNLYAAARLWDRVAEVRVRMKEKGLNKDVGCSWVEVRGRLEAFRVGDKSHPRYEEIERQVEWIESRLKEGGFVANKDASLHDLNDEEAEETLCSHSERIAIAYGLISTPQGTPLRITKNLRACVNCHAATKLISKLVDREIVVRDTNRFHHFKDGVCSCGDYCLKVEKLTYLIINLKILTNTIEKSVR

SEQ ID NO: 73299 - protein, 614 aa, Arabidopsis thaliana
  peptide (1)..(614): Ceres Seq. ID no. 4962863
  misc_feature (320)..(354): Pfam Name: PPR repeat Pfam Description: PPR repeat
  misc_feature (1)..(588): Homolog of NCBI NO: 15220337 NR Description: hypothetical protein; protein id: At1g11290.1
  misc_feature (1)..(585): Homolog of NCBI NO: 15234006 NR Description: putative protein; protein id: At4g18750.1
  misc_feature (1)..(588): Homolog of NCBI NO: 18418348 NR Description: putative protein; protein id: At4g33990.1
  misc_feature (1)..(588): Homolog of NCBI NO: 34915012 NR Description: P0458A05.10 [Oryza sativa (japonica
  misc_feature (1)..(588): Homolog of NCBI NO: 34903762 NR Description: unnamed protein product [Oryza sativa (japonica group)] >gi|7340873|dbj|BAA92963.1| unnamed protein product
  misc_feature (1)..(590): Homolog of NCBI NO: 37536510 NR Description: hypothetical protein [Oryza sativa (japonica group)] >gi|12039323|gb|AAG46111.1| hypothetical protein [Oryza >gi|31433315|gb|AAP54844.1| hypothetical protein [Oryza sativa
  misc_feature (1)..(588): Homolog of NCBI NO: 34897884 NR Description: Similar to Arabidopsis thaliana DNA chromosome 4,
  misc_feature (1)..(588): Homolog of NCBI NO: 15231617 NR Description: unknown protein; protein id: At3g26780.1
  misc_feature (1)..(588): Homolog of NCBI NO: 15231970 NR Description: unknown protein; protein id: At3g08820.1 thaliana] >gi|6403507|gb|AAF07847.1|AC010871_23 unknown protein
  misc_feature (1)..(588): Homolog of NCBI NO: 11281371 NR Description: hypothetical protein T8H10.30 - Arabidopsis >gi|6706414|emb|CAB66100.1| putative protein [Arabidopsis
MYSNMQLARVSPDSFTFPHLLKACSGLSHLQMGRFVHAQVFRLGFDADVFVQNGLIALYAKCRRLGSARTVFEGLPLPERTIVSWTAIVSAYAQNGEPMEALEIFSQMRKMDVKPDWVALVSVLNAFTCLQDLKQGRSIHASVVKMGLEIEPDLLISLNTMYAKCGQVATAKILFDKMKSPNLILWNAMISGYAKNGYAREAIDMFHEMINKDVRPDTISITSAISACAQVGSLEQARSMYEYVGRSDYRDDVFISSALIDMFAKCGSVEGARLVFDRTLDRDVVVWSAMIVGYGLHGRAREAISLYRAMERGGVHPNDVTFLGLLMACNHSGMVREGWWFFNRMADHKINPQQQHYACVIDLLGRAGHLDQAYEVIKCMPVQPGVTVWGALLSACKKHRHVELGEYAAQQLFSIDPSNTGHYVQLSNLYAAARLWDRVAEVRVRMKEKGLNKDVGCSWVEVRGRLEAFRVGDKSHPRYEEIERQVEWIESRLKEGGFVANKDASLHDLNDEEAEETLCSHSERIAIAYGLISTPQGTPLRITKNLRACVNCHAATKLISKLVDREIVVRDTNRFHHFKDGVCSCGDYCLKVEKLTYLIINLKILTNTIEKSVR

SEQ ID NO: 73300 - protein, 610 aa, Arabidopsis thaliana
  peptide (1)..(610): Ceres Seq. ID no. 4962864
  misc_feature (316)..(350): Pfam Name: PPR repeat Pfam Description: PPR repeat
  misc_feature (1)..(584): Homolog of NCBI NO: 15220337 NR Description: hypothetical protein; protein id: At1g11290.1
  misc_feature (1)..(581): Homolog of NCBI NO: 15234006 NR Description: putative protein; protein id: At4g18750.1
  misc_feature (1)..(584): Homolog of NCBI NO: 18418348 NR Description: putative protein; protein id: At4g33990.1
  misc_feature (1)..(584): Homolog of NCBI NO: 34915012 NR Description: P0458A05.10 [Oryza sativa (japonica
  misc_feature (1)..(584): Homolog of NCBI NO: 34903762 NR Description: unnamed protein product [Oryza sativa (japonica group)] >gi|7340873|dbj|BAA92963.1| unnamed protein product
  misc_feature (1)..(586): Homolog of NCBI NO: 37536510 NR Description: hypothetical protein [Oryza sativa (japonica group)] >gi|12039323|gb|AAG46111.1| hypothetical protein [Oryza >gi|31433315|gb|AAP54844.1| hypothetical protein [Oryza sativa
  misc_feature (1)..(584): Homolog of NCBI NO: 34897884 NR Description: Similar to Arabidopsis thaliana DNA chromosome 4,
  misc_feature (1)..(584): Homolog of NCBI NO: 15231617 NR Description: unknown protein; protein id: At3g26780.1
  misc_feature (1)..(584): Homolog of NCBI NO: 15231970 NR Description: unknown protein; protein id: At3g08820.1 thaliana] >gi|6403507|gb|AAF07847.1|AC010871_23 unknown protein
  misc_feature (1)..(584): Homolog of NCBI NO: 11281371 NR Description: hypothetical protein T8H10.30 - Arabidopsis >gi|6706414|emb|CAB66100.1| putative protein [Arabidopsis
MQLARVSPDSFTFPHLLKACSGLSHLQMGRFVHAQVFRLGFDADVFVQNGLIALYAKCRRLGSARTVFEGLPLPERTIVSWTAIVSAYAQNGEPMEALEIFSQMRKMDVKPDWVALVSVLNAFTCLQDLKQGRSIHASVVKMGLEIEPDLLISLNTMYAKCGQVATAKILFDKMKSPNLILWNAMISGYAKNGYAREAIDMFHEMINKDVRPDTISITSAISACAQVGSLEQARSMYEYVGRSDYRDDVFISSALIDMFAKCGSVEGARLVFDRTLDRDVVVWSAMIVGYGLHGRAREAISLYRAMERGGVHPNDVTFLGLLMACNHSGMVREGWWFFNRMADHKINPQQQHYACVIDLLGRAGHLDQAYEVIKCMPVQPGVTVWGALLSACKKHRHVELGEYAAQQLFSIDPSNTGHYVQLSNLYAAARLWDRVAEVRVRMKEKGLNKDVGCSWVEVRGRLEAFRVGDKSHPRYEEIERQVEWIESRLKEGGFVANKDASLHDLNDEEAEETLCSHSERIAIAYGLISTPQGTPLRITKNLRACVNCHAATKLISKLVDREIVVRDTNRFHHFKDGVCSCGDYCLKVEKLTYLIINLKILTNTIEKSVR

SEQ ID NO: 73301 - DNA, 1152 bp, Arabidopsis thaliana
  misc_feature (1)..(1152): Ceres Seq. ID no. 4963002
  misc_feature: MA Experiment ID: 20000440 Result: Up-regulated in Transcription
  misc_feature: MA Experiment 20000440 PARAMETER Experiment Name: At_Closed-Flower__Sub_P Parameter: Tissue Value: Closed Flower vs. Whole Plant
  misc_feature: Pfam Name: DUF537 Pfam Description: Protein of unknown function, DUF537
atgaccacctgtccgcttcccgatggtcatgatcctcgtctggtgggtccgaggatagaatcggcgttggaaaagtcaggccagtggcgctgccgccggggtcctctctttatcactgccgttggcaacctaacgcagatccctggtggtgacgaatccctgcgaacgctttcttccactggaatcgctcttaaacatgcccacgatattcaaagggatttgtttgagtggactgatgagaatcttgctccggctactataatgctcataaccagttctaaggacctgaaaactttagctagtacactttacgacatagagaagaagggatacagaattcttctcgcatatcctccacgagctctagctctccggctaagcattcttaaagatgttcctgaagagttgttctgggatagcttaatggcagatgctgctatggaggataacaaacaggagcaacaagacttgttcttcaggactacaagcgcagtgaaaccggtgaaactcccttgttttgctcagaatgcgattttggtgcccaaagctttgaagatttcaccacgcatctcaagagtgaaaaacatgcgtattctggaggctagtcataacaatgtggatcgactagaccctgctaacatggtgctgggtcgatcaaaggcaagttttaatatctcatctcaagagtgggacttgctggttactcaagatatagcgtatcatacttcttctcctctaacactaaaggcaacattgactttggatttactgactttggttgatgctaaaacattcaaggaactctgcaagatgttggaatttgatggtaaaacatgcaacaagggaaacggttctaccatggtgaagattcgaccagaggagggaaacccctgttttacgtctgttaccatggaagaatgcatgatgatgatgagaaagttaaagactgaggaagctgctgtagaagaggagaaccccgagaagcccattcagtccatccaagtgcaacggtcatctgcaacagaacaagaagacaaaccagttagttctgtggctaagagagcgtcaaggaaaagcatctccagctgttcaagtcaagatacgatcttaactaataggctcaaatgtttagaggatgaggataaaatgtaa

SEQ ID NO: 73302 - protein, 383 aa, Arabidopsis thaliana
  peptide (1)..(383): Ceres Seq. ID no. 4963003
  misc_feature: Pfam Name: DUF537 Pfam Description: Protein of unknown function, DUF537
  misc_feature (1)..(383): Homolog of NCBI NO: 15231195 NR Description: hypothetical protein; protein id: At3g13280.1
  misc_feature (1)..(220): Homolog of NCBI NO: 9294534 NR Description: gb|AAC80583.1~gene_id:MDC11.11~similar to unknown
  misc_feature (254)..(383): Homolog of NCBI NO: 9294534 NR Description: gb|AAC80583.1~gene_id:MDC11.11~similar to unknown
  misc_feature (1)..(142): Homolog of NCBI NO: 15229336 NR Description: putative protein; protein id: At3g62850.1
  misc_feature (1)..(86): Homolog of NCBI NO: 15220497 NR Description: hypothetical protein; protein id: At1g05400.1
  misc_feature (1)..(142): Homolog of NCBI NO: 15229336 NR Description: putative protein; protein id: At3g62850.1
MTTCPLPDGHDPRLVGPRIESALEKSGQWRCRRGPLFITAVGNLTQIPGGDESLRTLSSTGIALKHAHDIQRDLFEWTDENLAPATIMLITSSKDLKTLASTLYDIEKKGYRILLAYPPRALALRLSILKDVPEELFWDSLMADAAMEDNKQEQQDLFFRTTSAVKPVKLPCFAQNAILVPKALKISPRISRVKNMRILEASHNNVDRLDPANMVLGRSKASFNISSQEWDLLVTQDIAYHTSSPLTLKATLTLDLLTLVDAKTFKELCKMLEFDGKTCNKGNGSTMVKIRPEEGNPCFTSVTMEECMMMMRKLKTEEAAVEEENPEKPIQSIQVQRSSATEQEDKPVSSVAKRASRKSISSCSSQDTILTNRLKCLEDEDKM

SEQ ID NO: 73303 - protein, 296 aa, Arabidopsis thaliana
  peptide (1)..(296): Ceres Seq. ID no. 4963004
  misc_feature: Pfam Name: DUF537 Pfam Description: Protein of unknown function, DUF537
  misc_feature (1)..(296): Homolog of NCBI NO: 15231195 NR Description: hypothetical protein; protein id: At3g13280.1
  misc_feature (1)..(133): Homolog of NCBI NO: 9294534 NR Description: gb|AAC80583.1~gene_id:MDC11.11~similar to unknown
  misc_feature (167)..(296): Homolog of NCBI NO: 9294534 NR Description: gb|AAC80583.1~gene_id:MDC11.11~similar to unknown
  misc_feature (1)..(55): Homolog of NCBI NO: 15229336 NR Description: putative protein; protein id: At3g62850.1
  misc_feature (1)..(55): Homolog of NCBI NO: 15229336 NR Description: putative protein; protein id: At3g62850.1
MLITSSKDLKTLASTLYDIEKKGYRILLAYPPRALALRLSILKDVPEELFWDSLMADAAMEDNKQEQQDLFFRTTSAVKPVKLPCFAQNAILVPKALKISPRISRVKNMRILEASHNNVDRLDPANMVLGRSKASFNISSQEWDLLVTQDIAYHTSSPLTLKATLTLDLLTLVDAKTFKELCKMLEFDGKTCNKGNGSTMVKIRPEEGNPCFTSVTMEECMMMMRKLKTEEAAVEEENPEKPIQSIQVQRSSATEQEDKPVSSVAKRASRKSISSCSSQDTILTNRLKCLEDEDKM

SEQ ID NO: 73304 - protein, 242 aa, Arabidopsis thaliana
  peptide (1)..(242): Ceres Seq. ID no. 4963005
  misc_feature: Pfam Name: DUF537 Pfam Description: Protein of unknown function, DUF537
  misc_feature (1)..(242): Homolog of NCBI NO: 15231195 NR Description: hypothetical protein; protein id: At3g13280.1
  misc_feature (1)..(79): Homolog of NCBI NO: 9294534 NR Description: gb|AAC80583.1~gene_id:MDC11.11~similar to unknown
  misc_feature (113)..(242): Homolog of NCBI NO: 9294534 NR Description: gb|AAC80583.1~gene_id:MDC11.11~similar to unknown
MADAAMEDNKQEQQDLFFRTTSAVKPVKLPCFAQNAILVPKALKISPRISRVKNMRILEASHNNVDRLDPANMVLGRSKASFNISSQEWDLLVTQDIAYHTSSPLTLKATLTLDLLTLVDAKTFKELCKMLEFDGKTCNKGNGSTMVKIRPEEGNPCFTSVTMEECMMMMRKLKTEEAAVEEENPEKPIQSIQVQRSSATEQEDKPVSSVAKRASRKSISSCSSQDTILTNRLKCLEDEDKM

SEQ ID NO: 73305 - DNA, 1827 bp, Arabidopsis thaliana
  misc_feature (1)..(1827): Ceres Seq. ID no. 4963044
  misc_feature: MA Experiment ID: 20000234 Result: Down-regulated in Transcription
  misc_feature: MA Experiment 20000234 PARAMETER Experiment Name: At_Siliques_P Parameter: Age (day) Value: 21
  misc_feature: MA Experiment 20000234 PARAMETER Experiment Name: At_Siliques_P Parameter: Organism Value: A. thaliana
  misc_feature: MA Experiment 20000234 PARAMETER Experiment Name: At_Siliques_P Parameter: Plant Line Value: WS
  misc_feature: MA Experiment 20000234 PARAMETER Experiment Name: At_Siliques_P Parameter: Tissue Value: Less Than 5mm Siliques vs. Whole Plant
  misc_feature: MA Experiment ID: 20000264 Result: Down-regulated in Transcription
  misc_feature: MA Experiment 20000264 PARAMETER Experiment Name: At_Open_Flower_P Parameter: Age (day) Value: 21
  misc_feature: MA Experiment 20000264 PARAMETER Experiment Name: At_Open_Flower_P Parameter: Plant Line Value: WS
  misc_feature: MA Experiment 20000264 PARAMETER Experiment Name: At_Open_Flower_P Parameter: Tissue Value: Open Flower vs. Whole Plant
  misc_feature: MA Experiment ID: 20000265 Result: Down-regulated in Transcription
  misc_feature: MA Experiment 20000265 PARAMETER Experiment Name: At_Open_Flower_P Parameter: Age (day) Value: 21
  misc_feature: MA Experiment 20000265 PARAMETER Experiment Name: At_Open_Flower_P Parameter: Plant Line Value: WS
  misc_feature: MA Experiment 20000265 PARAMETER Experiment Name: At_Open_Flower_P Parameter: Tissue Value: Closed Flower vs. Whole Plant
  misc_feature: MA Experiment ID: 20000794 Result: Down-regulated in Transcription
  misc_feature: MA Experiment 20000794 PARAMETER Experiment Name: At_Petals_P Parameter: Age (day) Value: 23-25 days
  misc_feature: MA Experiment 20000794 PARAMETER Experiment Name: At_Petals_P Parameter: Plant Line Value: WS
  misc_feature: MA Experiment 20000794 PARAMETER Experiment Name: At_Petals_P Parameter: Tissue Value: Petals vs. Whole plant
  misc_feature: MA Experiment ID: 20001248 Result: Up-regulated in Transcription
  misc_feature: MA Experiment 20001248 PARAMETER Experiment Name: At_Far-red-induction_P Parameter: Age (day) Value: 7
  misc_feature: MA Experiment 20001248 PARAMETER Experiment Name: At_Far-red-induction_P Parameter: Light Value: Far-red vs. White
  misc_feature: MA Experiment 20001248 PARAMETER Experiment Name: At_Far-red-induction_P Parameter: Organism Value: A. thaliana
  misc_feature: MA Experiment 20001248 PARAMETER Experiment Name: At_Far-red-induction_P Parameter: Plant Line Value: Columbia
  misc_feature: MA Experiment 20001248 PARAMETER Experiment Name: At_Far-red-induction_P Parameter: Timepoint (hr) Value: 4
  misc_feature: MA Experiment 20001248 PARAMETER Experiment Name: At_Far-red-induction_P Parameter: Tissue Value: Whole Plant
  misc_feature: MA Experiment ID: 20001450 Result: Up-regulated in Transcription
  misc_feature: MA Experiment 20001450 PARAMETER Experiment Name: At_Far-red-induction_P Parameter: Age (day) Value: 7
  misc_feature: MA Experiment 20001450 PARAMETER Experiment Name: At_Far-red-induction_P Parameter: Light Value: Far-red vs. White
  misc_feature: MA Experiment 20001450 PARAMETER Experiment Name: At_Far-red-induction_P Parameter: Organism Value: A. thaliana
  misc_feature: MA Experiment 20001450 PARAMETER Experiment Name: At_Far-red-induction_P Parameter: Plant Line Value: Columbia
  misc_feature: MA Experiment 20001450 PARAMETER Experiment Name: At_Far-red-induction_P Parameter: Timepoint (hr) Value: 8
  misc_feature: MA Experiment 20001450 PARAMETER Experiment Name: At_Far-red-induction_P Parameter: Tissue Value: Whole Plant
  misc_feature: MA Experiment ID: 20001757 Result: Up-regulated in Transcription
  misc_feature: MA Experiment 20001757 PARAMETER Experiment Name: At_50mM_NH4NO3_L-to-H_P Parameter: Timepoint (hr) Value: 6
  misc_feature: MA Experiment 20001757 PARAMETER Experiment Name: At_50mM_NH4NO3_L-to-H_P Parameter: Tissue Value: Leaf
  misc_feature: MA Experiment 20001757 PARAMETER Experiment Name: At_50mM_NH4NO3_L-to-H_P Parameter: Treatment Value: 50mM NH4NO3 vs 100mM Mannitol
atgcttcccagtgatgctgctgacccttcagtttgctatgttcctaatccttacaatccctaccagtattacaatgtatatgggagtggtcaagagtggactgactacccagcttacacaaatcctgagggtgttgacatgaattctggaatttatggagagaatgggactgttgtgtatcctcagggttatgggtatgcagcgtatccttactcgccagcaactagccctgctccacagcttggcggggaagggcagttgtacggtgctcagcagtatcagtatcctaactattttccaaacagtggaccgtatgcttcatctgtggctacacctacccagccggatctctctgcaaacaaacctgctggtgtgaagacactacctgcggatagcaataatgttgcttctgctgctggtatcacaaaaggaagtaatggatcagctccagtgaaaccaactaaccaggctacccttaacacctcaagtaatttgtatggtatgggtgctccaggaggaggtttggctgctggttatcaggaccccaggtatgcctatgaagggtattatgctcctgtgccgtggcacgatggctctaagtactctgatgtgcagagacctgtttctggtagtggagttgcatcctcctattctaagtctagcacagtaccttcatcgaggaatcaaaactaccgctcaaattctcactacacgagcgtgcaccagccttcatcagtgactggctatggtacagctcaggggtactacaacaggatgtatcagaacaagttatatggtcagtatggtagcacagggagatctgctttgggttatggttcatctgggtatgattcaagaacaaatggaagaggatgggcggccacagacaacaaatacagaagctggggcaggggtaacagttactattacggaaatgagaacaatgtagatggtttgaatgaacttaacaggggacctagagctaagggcacaaagaaccagaagggaaatctagatgatagcttagaggttaaggagcagactggagaatcaaatgtaactgaggttggggaggcggataacacatgtgttgttcctgacagagaacagtacaataaagaagatttcccagtggattatgcaaatgccatgttctttatcatcaagtcatacagtgaagatgatgtgcacaagagcattaaatataatgtttgggctagcacaccaaatggaaacaagaagcttgctgcagcataccaggaagctcaacagaaagctggcggctgtcccatctttctgtttttctcggtcaatgcaagtggacaatttgttggtcttgctgaaatgacaggaccagttgatttcaacacaaatgtggagtactggcagcaagataagtggaccggctctttccccctcaagtggcatattgtgaaggatgtgccaaacagtttactgaagcatattactttagagaacaatgagaacaaacctgttaccaacagcagagacacacaagaggttaagttggagcaaggtttgaagattgtgaaaattttcaaggagcatagcagcaagacttgcattttggatgatttctcattctacgaggttcgacagaagactatcttggagaagaaagccaagcaaacccagaaacaggtaagcgaggagaaggtaaccgatgaaaagaaggaatctgcaactgcagagtcagcgagcaaggaatctcctgcagctgttcaaacgtccagtgatgttaaggttgctgagaatgggtctgttgctaaaccagtcacaggcgatgtggtggcaaatggttgctaa

SEQ ID NO: 73306 - protein, 608 aa, Arabidopsis thaliana; identical to SEQ ID NO: 45804
  peptide (1)..(608): Ceres Seq. ID no. 4963045
  misc_feature (433)..(523): Pfam Name: YT521-B-like family Pfam Description: YT521-B-like family
  misc_feature (71)..(564): Homolog of NCBI NO: 18405397 NR Description: expressed protein; protein id: At1g55500.1, by cDNA: gi_15215791 [Arabidopsis thaliana] At1g55500/T5A14_10 [Arabidopsis thaliana]
  misc_feature (71)..(558): Homolog of NCBI NO: 25372787 NR Description: Rubisco subunit binding-protein beta subunit - Arabidopsis thaliana >gi|4204265|gb|AAD10646.1| Hypothetical
  misc_feature (5)..(600): Homolog of NCBI NO: 22773231 NR Description: Putative RNA-binding protein [Oryza sativa
  misc_feature (2)..(607): Homolog of NCBI NO: 18087662 NR Description: putative RNA-binding protein [Oryza sativa]
  misc_feature (232)..(608): Homolog of NCBI NO: 15912287 NR Description: AT5g61020/maf19_20 [Arabidopsis thaliana]
  misc_feature (232)..(608): Homolog of NCBI NO: 30697464 NR Description: expressed protein [Arabidopsis thaliana]
  misc_feature (232)..(608): Homolog of NCBI NO: 30697466 NR Description: expressed protein [Arabidopsis thaliana] contains similarity to unknown [Arabidopsis thaliana] >gi|17529254|gb|AAL38854.1| unknown
  misc_feature (28)..(601): Homolog of NCBI NO: 34395023 NR Description: high-glucose-regulated protein 8-like [Oryza
  misc_feature (19)..(354): Homolog of NCBI NO: 18405397 NR Description: expressed protein; protein id: At1g55500.1, by cDNA: gi_15215791 [Arabidopsis thaliana] At1g55500/T5A14_10 [Arabidopsis thaliana]
  misc_feature (19)..(354): Homolog of NCBI NO: 25372787 NR Description: Rubisco subunit binding-protein beta subunit - Arabidopsis thaliana >gi|4204265|gb|AAD10646.1| Hypothetical

SEQ ID NO: 73307 - protein, 562 aa, Arabidopsis thaliana; identical to SEQ ID NO: 45805
  peptide (1)..(562): Ceres Seq. ID no. 4963046
  misc_feature (387)..(477): Pfam Name: YT521-B-like family Pfam Description: YT521-B-like family
  misc_feature (25)..(518): Homolog of NCBI NO: 18405397 NR Description: expressed protein; protein id: At1g55500.1, by cDNA: gi_15215791 [Arabidopsis thaliana] At1g55500/T5A14_10 [Arabidopsis thaliana]
  misc_feature (25)..(512): Homolog of NCBI NO: 25372787 NR Description: Rubisco subunit binding-protein beta subunit - Arabidopsis thaliana >gi|4204265|gb|AAD10646.1| Hypothetical
  misc_feature (1)..(554): Homolog of NCBI NO: 22773231 NR Description: Putative RNA-binding protein [Oryza sativa
  misc_feature (1)..(561): Homolog of NCBI NO: 18087662 NR Description: putative RNA-binding protein [Oryza sativa]
  misc_feature (186)..(562): Homolog of NCBI NO: 15912287 NR Description: AT5g61020/maf19_20 [Arabidopsis thaliana]
  misc_feature (186)..(562): Homolog of NCBI NO: 30697464 NR Description: expressed protein [Arabidopsis thaliana]
  misc_feature (186)..(562): Homolog of NCBI NO: 30697466 NR Description: expressed protein [Arabidopsis thaliana] contains similarity to unknown [Arabidopsis thaliana] >gi|17529254|gb|AAL38854.1| unknown
  misc_feature (1)..(555): Homolog of NCBI NO: 34395023 NR Description: high-glucose-regulated protein 8-like [Oryza
  misc_feature (1)..(308): Homolog of NCBI NO: 18405397 NR Description: expressed protein; protein id: At1g55500.1, by cDNA: gi_15215791 [Arabidopsis thaliana] At1g55500/T5A14_10 [Arabidopsis thaliana]
  misc_feature (1)..(308): Homolog of NCBI NO: 25372787 NR Description: Rubisco subunit binding-protein beta subunit - Arabidopsis thaliana >gi|4204265|gb|AAD10646.1| Hypothetical

SEQ ID NO: 73308 - protein, 441 aa, Arabidopsis thaliana
  peptide (1)..(441): Ceres Seq. ID no. 4963047
  misc_feature (266)..(356): Pfam Name: YT521-B-like family Pfam Description: YT521-B-like family
  misc_feature (1)..(397): Homolog of NCBI NO: 18405397 NR Description: expressed protein; protein id: At1g55500.1, by cDNA: gi_15215791 [Arabidopsis thaliana] At1g55500/T5A14_10 [Arabidopsis thaliana]
  misc_feature (1)..(391): Homolog of NCBI NO: 25372787 NR Description: Rubisco subunit binding-protein beta subunit - Arabidopsis thaliana >gi|4204265|gb|AAD10646.1| Hypothetical
  misc_feature (1)..(433): Homolog of NCBI NO: 22773231 NR Description: Putative RNA-binding protein [Oryza sativa
  misc_feature (1)..(440): Homolog of NCBI NO: 18087662 NR Description: putative RNA-binding protein [Oryza sativa]
  misc_feature (65)..(441): Homolog of NCBI NO: 15912287 NR Description: AT5g61020/maf19_20 [Arabidopsis thaliana]
  misc_feature (65)..(441): Homolog of NCBI NO: 30697464 NR Description: expressed protein [Arabidopsis thaliana]
  misc_feature (65)..(441): Homolog of NCBI NO: 30697466 NR Description: expressed protein [Arabidopsis thaliana] contains similarity to unknown [Arabidopsis thaliana] >gi|17529254|gb|AAL38854.1| unknown
  misc_feature (1)..(434): Homolog of NCBI NO: 34395023 NR Description: high-glucose-regulated protein 8-like [Oryza
  misc_feature (1)..(187): Homolog of NCBI NO: 18405397 NR Description: expressed protein; protein id: At1g55500.1, by cDNA: gi_15215791 [Arabidopsis thaliana] At1g55500/T5A14_10 [Arabidopsis thaliana]
  misc_feature (1)..(187): Homolog of NCBI NO: 25372787 NR Description: Rubisco subunit binding-protein beta subunit - Arabidopsis thaliana >gi|4204265|gb|AAD10646.1| Hypothetical
MGAPGGGLAAGYQDPRYAYEGYYAPVPWHDGSKYSDVQRPVSGSGVASSYSKSSTVPSSRNQNYRSNSHYTSVHQPSSVTGYGTAQGYYNRMYQNKLYGQYGSTGRSALGYGSSGYDSRTNGRGWAATDNKYRSWGRGNSYYYGNENNVDGLNELNRGPRAKGTKNQKGNLDDSLEVKEQTGESNVTEVGEADNTCVVPDREQYNKEDFPVDYANAMFFIIKSYSEDDVHKSIKYNVWASTPNGNKKLAAAYQEAQQKAGGCPIFLFFSVNASGQFVGLAEMTGPVDFNTNVEYWQQDKWTGSFPLKWHIVKDVPNSLLKHITLENNENKPVTNSRDTQEVKLEQGLKIVKIFKEHSSKTCILDDFSFYEVRQKTILEKKAKQTQKQVSEEKVTDEKKESATAESASKESPAAVQTSSDVKVAENGSVAKPVTGDVVANGC

SEQ ID NO: 73309 - DNA, 1167 bp, Arabidopsis thaliana
  misc_feature (1)..(1167): Ceres Seq. ID no. 4963082
  misc_feature: MA Experiment ID: 20000180 Result: Down-regulated in Transcription
  misc_feature: MA Experiment 20000180 PARAMETER Experiment Name: At_Germinating_Seeds_P Parameter: Age (hr) Value: 24 vs. 0
  misc_feature: MA Experiment 20000180 PARAMETER Experiment Name: At_Germinating_Seeds_P Parameter: Tissue Value: Germinating Seeds
  misc_feature: MA Experiment ID: 20000437 Result: Down-regulated in Transcription
  misc_feature: MA Experiment 20000437 PARAMETER Experiment Name: At_Drought_P Parameter: Age (day) Value: 8
  misc_feature: MA Experiment 20000437 PARAMETER Experiment Name: At_Drought_P Parameter: Organism Value: A. thaliana
  misc_feature: MA Experiment 20000437 PARAMETER Experiment Name: At_Drought_P Parameter: Plant Line Value: WS
  misc_feature: MA Experiment 20000437 PARAMETER Experiment Name: At_Drought_P Parameter: Timepoint (hr) Value: 24
  misc_feature: MA Experiment 20000437 PARAMETER Experiment Name: At_Drought_P Parameter: Tissue Value: Whole Plant
  misc_feature: MA Experiment 20000437 PARAMETER Experiment Name: At_Drought_P Parameter: Treatment Value: Drought vs. No Drought
  misc_feature: MA Experiment ID: 20001451 Result: Down-regulated in Transcription
  misc_feature: MA Experiment 20001451 PARAMETER Experiment Name: At_Far-red-induction_P Parameter: Age (day) Value: 7
  misc_feature: MA Experiment 20001451 PARAMETER Experiment Name: At_Far-red-induction_P Parameter: Light Value: Far-red vs. White
  misc_feature: MA Experiment 20001451 PARAMETER Experiment Name: At_Far-red-induction_P Parameter: Organism Value: A. thaliana
  misc_feature: MA Experiment 20001451 PARAMETER Experiment Name: At_Far-red-induction_P Parameter: Plant Line Value: Columbia
  misc_feature: MA Experiment 20001451 PARAMETER Experiment Name: At_Far-red-induction_P Parameter: Timepoint (hr) Value: 24
  misc_feature: MA Experiment 20001451 PARAMETER Experiment Name: At_Far-red-induction_P Parameter: Tissue Value: Whole Plant
atgtattttcattattatggacaacttctacatcagcaaaatatgctacaagattatgtgcggacaggtacgtactatgccgcagtcatggagaatcattcagattttgctggtcgtgttgtggtcgatgtgggtgctgggagtggcattttgtcaatgtttgcggcccaggctggtgccaaacatgtgtatgcggttgaagcatcagaaatggctgagtatgctcgtaagctgattgctggaaacccattattcgctgaccgaatcacagtcatcaagggtaaagttgaggatatcgagttgcctgagaaagcagatattttgatttctgaaccgatgggcaccttattggtcaacgagagaatgttagaatcgtatgtaattgctagggatcgttttatgactccaaaaggcaaaatgtttcccactgtcggaaggattcacatggcacctttttctgatgaattcttatttattgagatggcaaataaggctatgttttggcaacagcagaactattatggagttgatctgacacctctatatggatcagcgcaccaaggttatttttctcagcccgtggttgatgcatttgatccgagattattagtggcttctccgatgttccacatgatagatttcactcaaatgaaggaagaagatttttacgagattgatatcccgttgaagttcactgcttccatgtgcaccagaatgcatggacttgcctgctggtttgacgttctctttgacgggagcacggtccaaagatggctcacaactgctcccggtgcacctacaacgcattggtaccaaatcagatgtgttctctcgcagcctatttacgtaatggcaggtcaagagatcactggtagacttcatttgatagcccacagtgctcagagttacaccatagatctaactttatcagctaaaatgtgggggcccggtgcaagtcaaggcggaattctccaatcatcgacatgcaaattcgatctgaaagaaccttattatagaatgtctcagccacaagcataccctgttgcacaagaaccacctctacaaccacaaccagagctaagtacacaggacatacaaacaccaaacgatgaattagaagaagagttactgcaacaattgccacagaacccaagtgcccagctctaa

SEQ ID NO: 73310 - protein, 388 aa, Arabidopsis thaliana
  peptide (1)..(388): Ceres Seq. ID no. 4963083
  misc_feature (29)..(299): Pfam Name: Skb1 methyltransferase Pfam Description: Skb1 methyltransferase
  misc_feature (1)..(388): Homolog of NCBI NO: 6729000 NR Description: putative arginine methyltransferase [Arabidopsis
  misc_feature (1)..(388): Homolog of NCBI NO: 30680066 NR Description: protein arginine N-methyltransferase family
  misc_feature (1)..(388): Homolog of NCBI NO: 30680069 NR Description: protein arginine N-methyltransferase family
  misc_feature (1)..(388): Homolog of NCBI NO: 28393408 NR Description: putative arginine methyltransferase [Arabidopsis
  misc_feature (1)..(388): Homolog of NCBI NO: 27754675 NR Description: putative arginine methyltransferase [Arabidopsis
  misc_feature (1)..(388): Homolog of NCBI NO: 30695591 NR Description: protein arginine N-methyltransferase family
  misc_feature (1)..(258): Homolog of NCBI NO: 10177192 NR Description: arginine methyltransferase-like protein
  misc_feature (218)..(388): Homolog of NCBI NO: 10177192 NR Description: arginine methyltransferase-like protein
  misc_feature (1)..(363): Homolog of NCBI NO: 33146849 NR Description: putative protein arginine N-methyltransferase 4
  misc_feature (2)..(363): Homolog of NCBI NO: 24645553 NR Description: CG5358-PA [Drosophila melanogaster]
MYFHYYGQLLHQQNMLQDYVRTGTYYAAVMENHSDFAGRVVVDVGAGSGILSMFAAQAGAKHVYAVEASEMAEYARKLIAGNPLFADRITVIKGKVEDIELPEKADILISEPMGTLLVNERMLESYVIARDRFMTPKGKMFPTVGRIHMAPFSDEFLFIEMANKAMFWQQQNYYGVDLTPLYGSAHQGYFSQPVVDAFDPRLLVASPMFHMIDFTQMKEEDFYEIDIPLKFTASMCTRMHGLACWFDVLFDGSTVQRWLTTAPGAPTTHWYQIRCVLSQPIYVMAGQEITGRLHLIAHSAQSYTIDLTLSAKMWGPGASQGGILQSSTCKFDLKEPYYRMSQPQAYPVAQEPPLQPQPELSTQDIQTPNDELEEELLQQLPQNPSAQL

SEQ ID NO: 73311 - protein, 374 aa, Arabidopsis thaliana
  peptide (1)..(374): Ceres Seq. ID no. 4963084
  misc_feature (15)..(285): Pfam Name: Skb1 methyltransferase Pfam Description: Skb1 methyltransferase
  misc_feature (1)..(374): Homolog of NCBI NO: 6729000 NR Description: putative arginine methyltransferase [Arabidopsis
  misc_feature (1)..(374): Homolog of NCBI NO: 30680066 NR Description: protein arginine N-methyltransferase family
  misc_feature (1)..(374): Homolog of NCBI NO: 30680069 NR Description: protein arginine N-methyltransferase family
  misc_feature (1)..(374): Homolog of NCBI NO: 28393408 NR Description: putative arginine methyltransferase [Arabidopsis
  misc_feature (1)..(374): Homolog of NCBI NO: 27754675 NR Description: putative arginine methyltransferase [Arabidopsis
  misc_feature (1)..(374): Homolog of NCBI NO: 30695591 NR Description: protein arginine N-methyltransferase family
  misc_feature (1)..(244): Homolog of NCBI NO: 10177192 NR Description: arginine methyltransferase-like protein
  misc_feature (204)..(374): Homolog of NCBI NO: 10177192 NR Description: arginine methyltransferase-like protein
  misc_feature (1)..(349): Homolog of NCBI NO: 33146849 NR Description: putative protein arginine N-methyltransferase 4
  misc_feature (1)..(349): Homolog of NCBI NO: 24645553 NR Description: CG5358-PA [Drosophila melanogaster]
MLQDYVRTGTYYAAVMENHSDFAGRVVVDVGAGSGILSMFAAQAGAKHVYAVEASEMAEYARKLIAGNPLFADRITVIKGKVEDIELPEKADILISEPMGTLLVNERMLESYVIARDRFMTPKGKMFPTVGRIHMAPFSDEFLFIEMANKAMFWQQQNYYGVDLTPLYGSAHQGYFSQPVVDAFDPRLLVASPMFHMIDFTQMKEEDFYEIDIPLKFTASMCTRMHGLACWFDVLFDGSTVQRWLTTAPGAPTTHWYQIRCVLSQPIYVMAGQEITGRLHLIAHSAQSYTIDLTLSAKMWGPGASQGGILQSSTCKFDLKEPYYRMSQPQAYPVAQEPPLQPQPELSTQDIQTPNDELEEELLQQLPQNPSAQL

SEQ ID NO: 73312 - protein, 359 aa, Arabidopsis thaliana
  peptide (1)..(359): Ceres Seq. ID no. 4963085
  misc_feature (1)..(270): Pfam Name: Skb1 methyltransferase Pfam Description: Skb1 methyltransferase
  misc_feature (1)..(359): Homolog of NCBI NO: 6729000 NR Description: putative arginine methyltransferase [Arabidopsis
  misc_feature (1)..(359): Homolog of NCBI NO: 30680066 NR Description: protein arginine N-methyltransferase family
  misc_feature (1)..(359): Homolog of NCBI NO: 30680069 NR Description: protein arginine N-methyltransferase family
  misc_feature (1)..(359): Homolog of NCBI NO: 28393408 NR Description: putative arginine methyltransferase [Arabidopsis
  misc_feature (1)..(359): Homolog of NCBI NO: 27754675 NR Description: putative arginine methyltransferase [Arabidopsis
  misc_feature (1)..(359): Homolog of NCBI NO: 30695591 NR Description: protein arginine N-methyltransferase family
  misc_feature (1)..(229): Homolog of NCBI NO: 10177192 NR Description: arginine methyltransferase-like protein
  misc_feature (189)..(359): Homolog of NCBI NO: 10177192 NR Description: arginine methyltransferase-like protein
  misc_feature (1)..(334): Homolog of NCBI NO: 33146849 NR Description: putative protein arginine N-methyltransferase 4
  misc_feature (1)..(334): Homolog of NCBI NO: 24645553 NR Description: CG5358-PA [Drosophila melanogaster]
MENHSDFAGRVVVDVGAGSGILSMFAAQAGAKHVYAVEASEMAEYARKLIAGNPLFADRITVIKGKVEDIELPEKADILISEPMGTLLVNERMLESYVIARDRFMTPKGKMFPTVGRIHMAPFSDEFLFIEMANKAMFWQQQNYYGVDLTPLYGSAHQGYFSQPVVDAFDPRLLVASPMFHMIDFTQMKEEDFYEIDIPLKFTASMCTRMHGLACWFDVLFDGSTVQRWLTTAPGAPTTHWYQIRCVLSQPIYVMAGQEITGRLHLIAHSAQSYTIDLTLSAKMWGPGASQGGILQSSTCKFDLKEPYYRMSQPQAYPVAQEPPLQPQPELSTQDIQTPNDELEEELLQQLPQNPSAQL

SEQ ID NO: 73313 - DNA, 1701 bp, Arabidopsis thaliana
  misc_feature (1)..(1701): Ceres Seq. ID no. 4963109
  misc_feature: MA Experiment ID: 108434 Result: Down-regulated in Transcription
  misc_feature: MA Experiment 108434 PARAMETER Experiment Name: At_Root_Tips_cDNA_P Parameter: Tissue Value: Root Tips
  misc_feature: MA Experiment ID: 108488 Result: Down-regulated in Transcription
  misc_feature: MA Experiment ID: 20000069 Result: Up-regulated in Transcription
  misc_feature: MA Experiment 20000069 PARAMETER Experiment Name: At_100uM_ABA_Mutants_cDNA_P Parameter: Plant Line Value: CS23
  misc_feature: MA Experiment 20000069 PARAMETER Experiment Name: At_100uM_ABA_Mutants_cDNA_P Parameter: Timepoint (hr) Value: 6
  misc_feature: MA Experiment 20000069 PARAMETER Experiment Name: At_100uM_ABA_Mutants_cDNA_P Parameter: Tissue Value: Aerial
  misc_feature: MA Experiment 20000069 PARAMETER Experiment Name: At_100uM_ABA_Mutants_cDNA_P Parameter: Treatment Value: 100uM ABA vs. No Treatment
  misc_feature: MA Experiment ID: 20000111 Result: Down-regulated in Transcription
  misc_feature: MA Experiment 20000111 PARAMETER Experiment Name: At_42deg_Heat_cDNA_P Parameter: Temperature (deg C) Value: 42 vs. 22
  misc_feature: MA Experiment 20000111 PARAMETER Experiment Name: At_42deg_Heat_cDNA_P Parameter: Timepoint (hr) Value: 6
  misc_feature: MA Experiment 20000111 PARAMETER Experiment Name: At_42deg_Heat_cDNA_P Parameter: Tissue Value: Aerial
  misc_feature: MA Experiment ID: 20000113 Result: Down-regulated in Transcription
  misc_feature: MA Experiment 20000113 PARAMETER Experiment Name: At_42deg_Heat_cDNA_P Parameter: Temperature (deg C) Value: 42 vs. 22
  misc_feature: MA Experiment 20000113 PARAMETER Experiment Name: At_42deg_Heat_cDNA_P Parameter: Timepoint (hr) Value: 8
  misc_feature: MA Experiment 20000113 PARAMETER Experiment Name: At_42deg_Heat_cDNA_P Parameter: Tissue Value: Aerial
  misc_feature: MA Experiment ID: 20000224 Result: Up-regulated in Transcription
atgggcacatcatctgggtccaatcttcctcaccagatgctacctccacgtcagcaactacaaacatctctttcgcttgtatcttcagatccccacttgtcacggtctaattctggcattgtgcgtgaatcaccagctgaaagtgctagctctcaagaaacttggccaacctcaaaatctattatgggaaggaagacagatagcggaaagacagggcctgactctcatgatcaacatgtgatccgccatgtttccattgctgataaggtatcgctacgggacatagctagagagagacttgacatagtcgctgagagaatgcatcgattaccagaagaatatctcgaggagttaaagaatggtcttaaggctatccttgaaggaaatggtgcgcagcctatagatgagtttatgtttctgcagaagtttgtccagacgagatctgatttaacttcaaagacacttgtcagggctcaccgagtgcagcttgaagttcttgtggttataaacactggtatccaagcattcttgcacccaaacatcaatctctctcagtcatcactcatcgagatctttgtgtacaagagatgcagaaacatagcttgccaaaacgaactcccggctgatggttgtccctgtgagatatgcgctaataggaaaggcttctgcaacctgtgcatgtgtgtgatatgtaacaagtttgactttgcagtcaacacatgccgctggattggctgcgacgtgtgttctcattggactcatacggattgtgctattagggatggggagatttcgatgggagtttctcccaagagcgtatctgggatgggagaaatgctgttcaagtgtcgagcgtgcaaccatacttctgaattgctggggtgggtgaaagatgtgtttcagcactgtgcaccaaactgggatagggaatctttaatgaaggaacttgacttcgttagtaggattttccgtggaagcgaagatacaagaggccggaaactcttctggaagtgtgaggagcttatggagaagattaaaggtggactggctgaagcaacagcggccaagttgatactcatgtttttccaagaaattgaattggactctccaaagagccttgaaagcggagaaggtgggggtacgatagcacctcaagatgcatgcaaccgaattgctgaagttgtaaaggaaacactgaggaaaatggagatagtgggtgaggaaaagacgaggatgtacaagaaagcgcgaatggggcttgaggaatgcgagagagaggtagaagagaaagcaaagcaagtggcggaactgcagatggagaggcagaagaagaaacaacagatagaagaggtggagaggatagtgaggctgaagcaagcagaggcagagatgtttcagttaaaagcaaacgaggcaaaagtggaagcagagagattggaaaggattgtgaaagcgaaaaaggagaaaacagaagaggaatacgcaagtaactatttgaaactgaggctgagcgaggcggaggcagagaaagagtatctgtttgaaaagataaaagagcaggaaagtggtgggaatggtggtgaagcgtcacaagcagtgatgtactcaaagatcagagaaatgctgcatggatacaatgcatcgtcgccaagggtagatccaagatcaaaccagcgaaatcctttcagatccaatccttag

SEQ ID NO: 73314 - protein, 566 aa, Arabidopsis thaliana; identical to SEQ ID NO: 43217
  peptide (1)..(566): Ceres Seq. ID no. 4963110
  misc_feature (403)..(564): Pfam Name: Myosin tail Pfam Description: Myosin tail
  misc_feature (1)..(566): Homolog of NCBI NO: 18398053 NR Description: expressed protein; protein id: At3g07780.1, by cDNA: gi_15028084, supported by cDNA: gi_21280842 [Arabidopsis >gi|6466960|gb|AAF13095.1|AC009176_22 unknown protein
  misc_feature (1)..(566): Homolog of NCBI NO: 15238905 NR Description: putative protein; protein id: At5g48160.1 thaliana] >gi|8777406|dbj|BAA96996.1|
  misc_feature (56)..(566): Homolog of NCBI NO: 30385713 NR Description: Potyvirus VPg interacting protein [Pisum sativum]
  misc_feature (13)..(542): Homolog of NCBI NO: 30385711 NR Description: Potyvirus VPg interacting protein [Nicotiana
  misc_feature (92)..(523): Homolog of NCBI NO: 28973711 NR Description: unknown protein [Arabidopsis thaliana]
  misc_feature (92)..(523): Homolog of NCBI NO: 30695820 NR Description: expressed protein [Arabidopsis thaliana]
  misc_feature (92)..(523): Homolog of NCBI NO: 15229445 NR Description: putative protein; protein id: At3g63500.1
  misc_feature (67)..(522): Homolog of NCBI NO: 25402780 NR Description: protein F10B6.14 [imported] - Arabidopsis >gi|8778236|gb|AAF79245.1|AC006917_30 F10B6.14 [Arabidopsis
  misc_feature (67)..(507): Homolog of NCBI NO: 18394157 NR Description: expressed protein; protein id: At1g14740.1, by cDNA: gi_14596044, supported by cDNA: gi_20148718 [Arabidopsis >gi|14596045|gb|AAK68750.1| Unknown protein [Arabidopsis
  misc_feature (389)..(525): Homolog of NCBI NO: 33339558 NR Description: ABRH1 [Marsilea quadrifolia]

SEQ ID NO: 73315 - protein, 554 aa, Arabidopsis thaliana; identical to SEQ ID NO: 43218
  peptide (1)..(554): Ceres Seq. ID no. 4963111
  misc_feature (391)..(552): Pfam Name: Myosin tail Pfam Description: Myosin tail
  misc_feature (1)..(554): Homolog of NCBI NO: 18398053 NR Description: expressed protein; protein id: At3g07780.1, by cDNA: gi_15028084, supported by cDNA: gi_21280842 [Arabidopsis >gi|6466960|gb|AAF13095.1|AC009176_22 unknown protein
  misc_feature (1)..(554): Homolog of NCBI NO: 15238905 NR Description: putative protein; protein id: At5g48160.1 thaliana] >gi|8777406|dbj|BAA96996.1|
  misc_feature (44)..(554): Homolog of NCBI NO: 30385713 NR Description: Potyvirus VPg interacting protein [Pisum sativum]
  misc_feature (1)..(530): Homolog of NCBI NO: 30385711 NR Description: Potyvirus VPg interacting protein [Nicotiana
  misc_feature (80)..(511): Homolog of NCBI NO: 28973711 NR Description: unknown protein [Arabidopsis thaliana]
  misc_feature (80)..(511): Homolog of NCBI NO: 30695820 NR Description: expressed protein [Arabidopsis thaliana]
  misc_feature (80)..(511): Homolog of NCBI NO: 15229445 NR Description: putative protein; protein id: At3g63500.1
  misc_feature (55)..(510): Homolog of NCBI NO: 25402780 NR Description: protein F10B6.14 [imported] - Arabidopsis >gi|8778236|gb|AAF79245.1|AC006917_30 F10B6.14 [Arabidopsis
  misc_feature (55)..(495): Homolog of NCBI NO: 18394157 NR Description: expressed protein; protein id: At1g14740.1, by cDNA: gi_14596044, supported by cDNA: gi_20148718 [Arabidopsis >gi|14596045|gb|AAK68750.1| Unknown protein [Arabidopsis
  misc_feature (377)..(513): Homolog of NCBI NO: 33339558 NR Description: ABRH1 [Marsilea quadrifolia]

SEQ ID NO: 73316 - protein, 505 aa, Arabidopsis thaliana
  peptide (1)..(505): Ceres Seq. ID no. 4963112
  misc_feature (342)..(503): Pfam Name: Myosin tail Pfam Description: Myosin tail
  misc_feature (1)..(505): Homolog of NCBI NO: 18398053 NR Description: expressed protein; protein id: At3g07780.1, by cDNA: gi_15028084, supported by cDNA: gi_21280842 [Arabidopsis >gi|6466960|gb|AAF13095.1|AC009176_22 unknown protein
  misc_feature (1)..(505): Homolog of NCBI NO: 15238905 NR Description: putative protein; protein id: At5g48160.1 thaliana] >gi|8777406|dbj|BAA96996.1|
  misc_feature (1)..(505): Homolog of NCBI NO: 30385713 NR Description: Potyvirus VPg interacting protein [Pisum sativum]
  misc_feature (1)..(481): Homolog of NCBI NO: 30385711 NR Description: Potyvirus VPg interacting protein [Nicotiana
  misc_feature (31)..(462): Homolog of NCBI NO: 28973711 NR Description: unknown protein [Arabidopsis thaliana]
  misc_feature (31)..(462): Homolog of NCBI NO: 30695820 NR Description: expressed protein [Arabidopsis thaliana]
  misc_feature (31)..(462): Homolog of NCBI NO: 15229445 NR Description: putative protein; protein id: At3g63500.1
  misc_feature (6)..(461): Homolog of NCBI NO: 25402780 NR Description: protein F10B6.14 [imported] - Arabidopsis >gi|8778236|gb|AAF79245.1|AC006917_30 F10B6.14 [Arabidopsis
  misc_feature (6)..(446): Homolog of NCBI NO: 18394157 NR Description: expressed protein; protein id: At1g14740.1, by cDNA: gi_14596044, supported by cDNA: gi_20148718 [Arabidopsis >gi|14596045|gb|AAK68750.1| Unknown protein [Arabidopsis
  misc_feature (328)..(464): Homolog of NCBI NO: 33339558 NR Description: ABRH1 [Marsilea quadrifolia]
MGRKTDSGKTGPDSHDQHVIRHVSIADKVSLRDIARERLDIVAERMHRLPEEYLEELKNGLKAILEGNGAQPIDEFMFLQKFVQTRSDLTSKTLVRAHRVQLEVLVVINTGIQAFLHPNINLSQSSLIEIFVYKRCRNIACQNELPADGCPCEICANRKGFCNLCMCVICNKFDFAVNTCRWIGCDVCSHWTHTDCAIRDGEISMGVSPKSVSGMGEMLFKCRACNHTSELLGWVKDVFQHCAPNWDRESLMKELDFVSRIFRGSEDTRGRKLFWKCEELMEKIKGGLAEATAAKLILMFFQEIELDSPKSLESGEGGGTIAPQDACNRIAEVVKETLRKMEIVGEEKTRMYKKARMGLEECEREVEEKAKQVAELQMERQKKKQQIEEVERIVRLKQAEAEMFQLKANEAKVEAERLERIVKAKKEKTEEEYASNYLKLRLSEAEAEKEYLFEKIKEQESGGNGGEASQAVMYSKIREMLHGYNASSPRVDPRSNQRNPFRSNP

SEQ ID NO: 73317 - DNA, 1368 bp, Arabidopsis thaliana
  misc_feature (1)..(1368): Ceres Seq. ID no. 4963123
  misc_feature: MA Experiment ID: 20000184 Result: Up-regulated in Transcription
  misc_feature: MA Experiment 20000184 PARAMETER Experiment Name: At_Shoots__P Parameter: Age (day) Value: 7
  misc_feature: MA Experiment 20000184 PARAMETER Experiment Name: At_Shoots__P Parameter: Tissue Value: Shoots vs. Whole Plant
  misc_feature: MA Experiment ID: 20000437 Result: Down-regulated in Transcription
  misc_feature: MA Experiment 20000437 PARAMETER Experiment Name: At_Drought_P Parameter: Age (day) Value: 8
  misc_feature: MA Experiment 20000437 PARAMETER Experiment Name: At_Drought_P Parameter: Organism Value: A. thaliana
  misc_feature: MA Experiment 20000437 PARAMETER Experiment Name: At_Drought_P Parameter: Plant Line Value: WS
  misc_feature: MA Experiment 20000437 PARAMETER Experiment Name: At_Drought_P Parameter: Timepoint (hr) Value: 24
  misc_feature: MA Experiment 20000437 PARAMETER Experiment Name: At_Drought_P Parameter: Tissue Value: Whole Plant
  misc_feature: MA Experiment 20000437 PARAMETER Experiment Name: At_Drought_P Parameter: Treatment Value: Drought vs. No Drought
  misc_feature: MA Experiment ID: 20000438 Result: Up-regulated in Transcription
  misc_feature: MA Experiment 20000438 PARAMETER Experiment Name: At_Shoots__P Parameter: Age (day) Value: 14
  misc_feature: MA Experiment 20000438 PARAMETER Experiment Name: At_Shoots__P Parameter: Tissue Value: Shoots vs. Whole Plant
  misc_feature: MA Experiment ID: 20000527 Result: Up-regulated in Transcription
  misc_feature: MA Experiment 20000527 PARAMETER Experiment Name: At_10percent_PEG_P Parameter: Age (day) Value: 20
  misc_feature: MA Experiment 20000527 PARAMETER Experiment Name: At_10percent_PEG_P Parameter: Organism Value: A. thaliana
  misc_feature: MA Experiment 20000527 PARAMETER Experiment Name: At_10percent_PEG_P Parameter: Plant Line Value: WS
  misc_feature: MA Experiment 20000527 PARAMETER Experiment Name: At_10percent_PEG_P Parameter: Timepoint (day) Value: 20
  misc_feature: MA Experiment 20000527 PARAMETER Experiment Name: At_10percent_PEG_P Parameter: Tissue Value: Whole Plant
  misc_feature: MA Experiment 20000527 PARAMETER Experiment Name: At_10percent_PEG_P Parameter: Treatment Value: 10percent PEG vs. No Treatment
  misc_feature: MA Experiment ID: 20001248 Result: Down-regulated in Transcription
  misc_feature: MA Experiment 20001248 PARAMETER Experiment Name: At_Far-red-induction_P Parameter: Age (day) Value: 7
  misc_feature: MA Experiment 20001248 PARAMETER Experiment Name: At_Far-red-induction_P Parameter: Light Value: Far-red vs. White
  misc_feature: MA Experiment 20001248 PARAMETER Experiment Name: At_Far-red-induction_P Parameter: Organism Value: A. thaliana
  misc_feature: MA Experiment 20001248 PARAMETER Experiment Name: At_Far-red-induction_P Parameter: Plant Line Value: Columbia
  misc_feature: MA Experiment 20001248 PARAMETER Experiment Name: At_Far-red-induction_P Parameter: Timepoint (hr) Value: 4
  misc_feature: MA Experiment 20001248 PARAMETER Experiment Name: At_Far-red-induction_P Parameter: Tissue Value: Whole Plant
  misc_feature: MA Experiment ID: 20001450 Result: Down-regulated in Transcription
  misc_feature: MA Experiment 20001450 PARAMETER Experiment Name: At_Far-red-induction_P Parameter: Age (day) Value: 7
  misc_feature: MA Experiment 20001450 PARAMETER Experiment Name: At_Far-red-induction_P Parameter: Light Value: Far-red vs. White
  misc_feature: MA Experiment 20001450 PARAMETER Experiment Name: At_Far-red-induction_P Parameter: Organism Value: A. thaliana
  misc_feature: MA Experiment 20001450 PARAMETER Experiment Name: At_Far-red-induction_P Parameter: Plant Line Value: Columbia
  misc_feature: MA Experiment 20001450 PARAMETER Experiment Name: At_Far-red-induction_P Parameter: Timepoint (hr) Value: 8
  misc_feature: MA Experiment 20001450 PARAMETER Experiment Name: At_Far-red-induction_P Parameter: Tissue Value: Whole Plant
  misc_feature: MA Experiment ID: 20001451 Result: Down-regulated in Transcription
  misc_feature: MA Experiment 20001451 PARAMETER Experiment Name: At_Far-red-induction_P Parameter: Age (day) Value: 7
  misc_feature: MA Experiment 20001451 PARAMETER Experiment Name: At_Far-red-induction_P Parameter: Light Value: Far-red vs. White
  misc_feature: MA Experiment 20001451 PARAMETER Experiment Name: At_Far-red-induction_P Parameter: Organism Value: A. thaliana
  misc_feature: MA Experiment 20001451 PARAMETER Experiment Name: At_Far-red-induction_P Parameter: Plant Line Value: Columbia
  misc_feature: MA Experiment 20001451 PARAMETER Experiment Name: At_Far-red-induction_P Parameter: Timepoint (hr) Value: 24
  misc_feature: MA Experiment 20001451 PARAMETER Experiment Name: At_Far-red-induction_P Parameter: Tissue Value: Whole Plant
  misc_feature: Pfam Name: p450 Pfam Description: Cytochrome P450
atgaacttgttttggaacacaggattttgtgttatagttttagtggttgcgagggttggtcattggtggtaccaatggtcaaaccctaagtctaacggcaagttacctccgggatcaatgggtttcccgatcatcggagagacattagatttctttaagccttatggattctacgagatctccccatatctcaagaaaaagatgttaaggtatgggccattatttcggacaaacattcttggagtaaaaaccgtggtatcgacggataaggatgttaacatggagattttaagacaagagaacaagtctttcattttaagttatccggatggtttaatgaagccattgggaaaagatagcttgttcttgaagattggaaacatccacaagcacatcaaacaaataactcttcatcttttgtcctccgagggtttaaaacggaaaatattaaaagatatggaccgtgtgacacgcgagcatcttagttcgaaagctaaaacaggaagattggatgttaaggacgcagtttcaaaattgataatagcccacttgacacctaagatgatgagtaatctcaaaccacagactcaagcaaagcttatgggaatttttaaggccttcacttttgattggtttcggacatcctatcttatctctgccgggaagggtctctacaacaccctttgggcatgccgagaggggatgcgagagataaaggatatatatacaatgaggaaaacgtctgaggagaagtacgatgacttcctcaacacggcaatagaagagtcagagaaagcaggagagttattgaacgaaaatgcaattataaccctcatctttaccctttcatgtgtcactcaagataccacctcaaaggcgatttgcttggctgtgaaattcctattggaaaacccaaaagttctcgcagagttaaagaaagaacatgaggtgatccttgaaagcagagaagacaaagaaggtggagttacttgggaagaatacagacacaagatgactttcaccaacatgaaaagcggatacaccattccagcaggttggatagtgatgattataccttcagtggttcattttgatcctgaaatctatgaaaacccttttgagtttaatccatggagatgggaggggaaagagttgcgggctggatctaaaacgttcatggtgtttggaaccggacttagacaatgcgctggtgcagagtttgctaggcttcagatttcagtatttcttcatcatcttgttaccacttataatttctcgttgcaccaagactgcgaggtgcttcgtgtaccagctgctcacctccctaatggcatatctataaacatctccaagtgtcccaaaaaatga

SEQ ID NO: 73318 - protein, 455 aa, Arabidopsis thaliana
  peptide (1)..(455): Ceres Seq. ID no. 4963124
  misc_feature: Pfam Name: p450 Pfam Description: Cytochrome P450
  misc_feature (1)..(455): Homolog of NCBI NO: 15230572 NR Description: cytochrome P450 - like protein; protein id:
  misc_feature (1)..(349): Homolog of NCBI NO: 22530982 NR Description: cytochrome P450-like protein [Arabidopsis
  misc_feature (334)..(451): Homolog of NCBI NO: 22530982 NR Description: cytochrome P450-like protein [Arabidopsis
  misc_feature (1)..(349): Homolog of NCBI NO: 30695347 NR Description: cytochrome p450 family [Arabidopsis thaliana]
  misc_feature (1)..(349): Homolog of NCBI NO: 30695352 NR Description: cytochrome p450 family [Arabidopsis thaliana]
  misc_feature (334)..(451): Homolog of NCBI NO: 30695347 NR Description: cytochrome p450 family [Arabidopsis thaliana]
  misc_feature (334)..(451): Homolog of NCBI NO: 30695352 NR Description: cytochrome p450 family [Arabidopsis thaliana]
  misc_feature (1)..(345): Homolog of NCBI NO: 15218388 NR Description: cytochrome P450, putative; protein id: supported by cDNA: gi_17473540 [Arabidopsis thaliana]
  misc_feature (346)..(455): Homolog of NCBI NO: 15218388 NR Description: cytochrome P450, putative; protein id: supported by cDNA: gi_17473540 [Arabidopsis thaliana]
  misc_feature (1)..(343): Homolog of NCBI NO: 15222806 NR Description: cytochrome P450, putative; protein id:
MNLFWNTGFCVIVLVVARVGHWWYQWSNPKSNGKLPPGSMGFPIIGETLDFFKPYGFYEISPYLKKKMLRYGPLFRTNILGVKTVVSTDKDVNMEILRQENKSFILSYPDGLMKPLGKDSLFLKIGNIHKHIKQITLHLLSSEGLKRKILKDMDRVTREHLSSKAKTGRLDVKDAVSKLIIAHLTPKMMSNLKPQTQAKLMGIFKAFTFDWFRTSYLISAGKGLYNTLWACREGMREIKDIYTMRKTSEEKYDDFLNTAIEESEKAGELLNENAIITLIFTLSCVTQDTTSKAICLAVKFLLENPKVLAELKKEHEVILESREDKEGGVTWEEYRHKMTFTNMKSGYTIPAGWIVMIIPSVVHFDPEIYENPFEFNPWRWEGKELRAGSKTFMVFGTGLRQCAGAEFARLQISVFLHHLVTTYNFSLHQDCEVLRVPAAHLPNGISINISKCPKK

SEQ ID NO: 73319 - protein, 416 aa, Arabidopsis thaliana
  peptide (1)..(416): Ceres Seq. ID no. 4963125
  misc_feature: Pfam Name: p450 Pfam Description: Cytochrome P450
  misc_feature (1)..(416): Homolog of NCBI NO: 15230572 NR Description: cytochrome P450 - like protein; protein id:
  misc_feature (1)..(310): Homolog of NCBI NO: 22530982 NR Description: cytochrome P450-like protein [Arabidopsis
  misc_feature (295)..(412): Homolog of NCBI NO: 22530982 NR Description: cytochrome P450-like protein [Arabidopsis
  misc_feature (1)..(310): Homolog of NCBI NO: 30695347 NR Description: cytochrome p450 family [Arabidopsis thaliana]
  misc_feature (1)..(310): Homolog of NCBI NO: 30695352 NR Description: cytochrome p450 family [Arabidopsis thaliana]
  misc_feature (295)..(412): Homolog of NCBI NO: 30695347 NR Description: cytochrome p450 family [Arabidopsis thaliana]
  misc_feature (295)..(412): Homolog of NCBI NO: 30695352 NR Description: cytochrome p450 family [Arabidopsis thaliana]
  misc_feature (1)..(306): Homolog of NCBI NO: 15218388 NR Description: cytochrome P450, putative; protein id: supported by cDNA: gi_17473540 [Arabidopsis thaliana]
  misc_feature (307)..(416): Homolog of NCBI NO: 15218388 NR Description: cytochrome P450, putative; protein id: supported by cDNA: gi_17473540 [Arabidopsis thaliana]
  misc_feature (1)..(304): Homolog of NCBI NO: 15222806 NR Description: cytochrome P450, putative; protein id:
MGFPIIGETLDFFKPYGFYEISPYLKKKMLRYGPLFRTNILGVKTVVSTDKDVNMEILRQENKSFILSYPDGLMKPLGKDSLFLKIGNIHKHIKQITLHLLSSEGLKRKILKDMDRVTREHLSSKAKTGRLDVKDAVSKLIIAHLTPKMMSNLKPQTQAKLMGIFKAFTFDWFRTSYLISAGKGLYNTLWACREGMREIKDIYTMRKTSEEKYDDFLNTAIEESEKAGELLNENAIITLIFTLSCVTQDTTSKAICLAVKFLLENPKVLAELKKEHEVILESREDKEGGVTWEEYRHKMTFTNMKSGYTIPAGWIVMIIPSVVHFDPEIYENPFEFNPWRWEGKELRAGSKTFMVFGTGLRQCAGAEFARLQISVFLHHLVTTYNFSLHQDCEVLRVPAAHLPNGISINISKCPKK

SEQ ID NO: 73320 - protein, 388 aa, Arabidopsis thaliana
  peptide (1)..(388): Ceres Seq. ID no. 4963126
  misc_feature: Pfam Name: p450 Pfam Description: Cytochrome P450
  misc_feature (1)..(388): Homolog of NCBI NO: 15230572 NR Description: cytochrome P450 - like protein; protein id:
  misc_feature (1)..(282): Homolog of NCBI NO: 22530982 NR Description: cytochrome P450-like protein [Arabidopsis
  misc_feature (267)..(384): Homolog of NCBI NO: 22530982 NR Description: cytochrome P450-like protein [Arabidopsis
  misc_feature (1)..(282): Homolog of NCBI NO: 30695347 NR Description: cytochrome p450 family [Arabidopsis thaliana]
  misc_feature (1)..(282): Homolog of NCBI NO: 30695352 NR Description: cytochrome p450 family [Arabidopsis thaliana]
  misc_feature (267)..(384): Homolog of NCBI NO: 30695347 NR Description: cytochrome p450 family [Arabidopsis thaliana]
  misc_feature (267)..(384): Homolog of NCBI NO: 30695352 NR Description: cytochrome p450 family [Arabidopsis thaliana]
  misc_feature (1)..(278): Homolog of NCBI NO: 15218388 NR Description: cytochrome P450, putative; protein id: supported by cDNA: gi_17473540 [Arabidopsis thaliana]
  misc_feature (279)..(388): Homolog of NCBI NO: 15218388 NR Description: cytochrome P450, putative; protein id: supported by cDNA: gi_17473540 [Arabidopsis thaliana]
  misc_feature (1)..(276): Homolog of NCBI NO: 15222806 NR Description: cytochrome P450, putative; protein id:
MLRYGPLFRTNILGVKTVVSTDKDVNMEILRQENKSFILSYPDGLMKPLGKDSLFLKIGNIHKHIKQITLHLLSSEGLKRKILKDMDRVTREHLSSKAKTGRLDVKDAVSKLIIAHLTPKMMSNLKPQTQAKLMGIFKAFTFDWFRTSYLISAGKGLYNTLWACREGMREIKDIYTMRKTSEEKYDDFLNTAIEESEKAGELLNENAIITLIFTLSCVTQDTTSKAICLAVKFLLENPKVLAELKKEHEVILESREDKEGGVTWEEYRHKMTFTNMKSGYTIPAGWIVMIIPSVVHFDPEIYENPFEFNPWRWEGKELRAGSKTFMVFGTGLRQCAGAEFARLQISVFLHHLVTTYNFSLHQDCEVLRVPAAHLPNGISINISKCPKK

SEQ ID NO: 73321 - DNA, 1086 bp, Arabidopsis thaliana
  misc_feature (1)..(1086): Ceres Seq. ID no. 4963170
  misc_feature: MA Experiment ID: 20000171 Result: Up-regulated in Transcription
  misc_feature: MA Experiment 20000171 PARAMETER Experiment Name: At_42deg_Heat_P Parameter: Age (day) Value: 14
  misc_feature: MA Experiment 20000171 PARAMETER Experiment Name: At_42deg_Heat_P Parameter: Organism Value: A. thaliana
  misc_feature: MA Experiment 20000171 PARAMETER Experiment Name: At_42deg_Heat_P Parameter: Plant Line Value: WS
  misc_feature: MA Experiment 20000171 PARAMETER Experiment Name: At_42deg_Heat_P Parameter: Temperature (deg C) Value: 42 vs. 22
  misc_feature: MA Experiment 20000171 PARAMETER Experiment Name: At_42deg_Heat_P Parameter: Timepoint (hr) Value: 1
  misc_feature: MA Experiment 20000171 PARAMETER Experiment Name: At_42deg_Heat_P Parameter: Tissue Value: Aerial
  misc_feature: MA Experiment ID: 20000173 Result: Up-regulated in Transcription
  misc_feature: MA Experiment 20000173 PARAMETER Experiment Name: At_42deg_Heat_P Parameter: Age (day) Value: 14
  misc_feature: MA Experiment 20000173 PARAMETER Experiment Name: At_42deg_Heat_P Parameter: Organism Value: A. thaliana
  misc_feature: MA Experiment 20000173 PARAMETER Experiment Name: At_42deg_Heat_P Parameter: Plant Line Value: WS
  misc_feature: MA Experiment 20000173 PARAMETER Experiment Name: At_42deg_Heat_P Parameter: Temperature (deg C) Value: 42 vs. 22
  misc_feature: MA Experiment 20000173 PARAMETER Experiment Name: At_42deg_Heat_P Parameter: Timepoint (hr) Value: 6
  misc_feature: MA Experiment 20000173 PARAMETER Experiment Name: At_42deg_Heat_P Parameter: Tissue Value: Aerial
atggaagaagataaccaagaaatacaacgtgacaatgtcggatcttcatctttctttaaaacatgtttcaacgcactcaatgctctttcaggaattggaatattatcggtaccatattcacttgctcgtggaggatggttgagtctttcacttttgttactcctagccgtaaccgccttctacacatccttactcattacaaaatgtatgaatgcggaccgcaacatcaaaacatatcccgacataggagaacgcgcatttggtagaccgggaagaatcattgtgtcagtcttcatgcacctagagctctatctagtcaccacgggtttcttgatcctcgagggcgacaatcttcacaatcttttcccgggttttaccatcgaaatgatcggattgagattgaatggcaaacaagctttcatggcgaccgtcgcctttgtcattatgccaactctatggtgggataatctcagcgtcttgtcgtatgtttctatgagtggcgttttagctacgactgtgacgcttggatcaatatcttggattggcgcatttgatgggattgggtttcatcaaaaaggaaagttgataaattggagtgggatccctactgctttgagcttatatgctttttgctatggtgcgcatccagttttgcccactttgtattcttctatgaaaagcaaacatcagttcaacaatgtggcaatatacacaactctcgtaaacccggtagccaaatacgcactgatgatcacaccaaccgtgaacactataaaagattggtttccttcacggtactccaaaaaggcatacttacatctcttgataagcacatttttcatcataagtagtgtcgtgatcgccgagacacttcccttttttggttatatgatgtcgctggttggagcattattgagcgttacggtttctatacttctgccttgtttatgttacttgaagatctttggaaactacaagaaaattgggtgtgagactataatgttgtttggaatggtagtgatgagtgtttttgttggggtaataggtacttacattgcacttcgagatataattggtagtgtataa

SEQ ID NO: 73322 - protein, 361 aa, Arabidopsis thaliana
  peptide (1)..(361): Ceres Seq. ID no. 4963171
  misc_feature (31)..(316): Pfam Name: Tryptophan/tyrosine permease family Pfam Description: Tryptophan/tyrosine permease family
  misc_feature (1)..(361): Homolog of NCBI NO: 15228542 NR Description: hypothetical protein; protein id: At3g28960.1
  misc_feature (1)..(236): Homolog of NCBI NO: 7939546 NR Description: gb|AAC79623.2~gene_id:K5K13.9~similar to unknown
  misc_feature (203)..(358): Homolog of NCBI NO: 7939546 NR Description: gb|AAC79623.2~gene_id:K5K13.9~similar to unknown
  misc_feature (2)..(241): Homolog of NCBI NO: 15290054 NR Description: P0025A05.3 [Oryza sativa (japonica
  misc_feature (224)..(360): Homolog of NCBI NO: 15290054 NR Description: P0025A05.3 [Oryza sativa (japonica
  misc_feature (13)..(241): Homolog of NCBI NO: 20521331 NR Description: B1103C09.36 [Oryza sativa (japonica
  misc_feature (231)..(360): Homolog of NCBI NO: 20521331 NR Description: B1103C09.36 [Oryza sativa (japonica
  misc_feature (17)..(247): Homolog of NCBI NO: 18405629 NR Description: expressed protein; protein id: At2g41190.1, by cDNA: gi_14532707, supported by cDNA: gi_19310728 [Arabidopsis >gi|14532708|gb|AAK64155.1| unknown protein [Arabidopsis
  misc_feature (17)..(247): Homolog of NCBI NO: 23397299 NR Description: unknown protein [Arabidopsis thaliana]
  misc_feature (224)..(358): Homolog of NCBI NO: 18405629 NR Description: expressed protein; protein id: At2g41190.1, by cDNA: gi_14532707, supported by cDNA: gi_19310728 [Arabidopsis >gi|14532708|gb|AAK64155.1| unknown protein [Arabidopsis
MEEDNQEIQRDNVGSSSFFKTCFNALNALSGIGILSVPYSLARGGWLSLSLLLLLAVTAFYTSLLITKCMNADRNIKTYPDIGERAFGRPGRIIVSVFMHLELYLVTTGFLILEGDNLHNLFPGFTIEMIGLRLNGKQAFMATVAFVIMPTLWWDNLSVLSYVSMSGVLATTVTLGSISWIGAFDGIGFHQKGKLINWSGIPTALSLYAFCYGAHPVLPTLYSSMKSKHQFNNVAIYTTLVNPVAKYALMITPTVNTIKDWFPSRYSKKAYLHLLISTFFIISSVVIAETLPFFGYMMSLVGALLSVTVSILLPCLCYLKIFGNYKKIGCETIMLFGMVVMSVFVGVIGTYIALRDIIGSV

SEQ ID NO: 73323 - protein, 292 aa, Arabidopsis thaliana
  peptide (1)..(292): Ceres Seq. ID no. 4963172
  misc_feature (1)..(247): Pfam Name: Tryptophan/tyrosine permease family Pfam Description: Tryptophan/tyrosine permease family
  misc_feature (1)..(292): Homolog of NCBI NO: 15228542 NR Description: hypothetical protein; protein id: At3g28960.1
  misc_feature (1)..(167): Homolog of NCBI NO: 7939546 NR Description: gb|AAC79623.2~gene_id:K5K13.9~similar to unknown
  misc_feature (134)..(289): Homolog of NCBI NO: 7939546 NR Description: gb|AAC79623.2~gene_id:K5K13.9~similar to unknown
  misc_feature (1)..(172): Homolog of NCBI NO: 15290054 NR Description: P0025A05.3 [Oryza sativa (japonica
  misc_feature (155)..(291): Homolog of NCBI NO: 15290054 NR Description: P0025A05.3 [Oryza sativa (japonica
  misc_feature (1)..(172): Homolog of NCBI NO: 20521331 NR Description: B1103C09.36 [Oryza sativa (japonica
  misc_feature (162)..(291): Homolog of NCBI NO: 20521331 NR Description: B1103C09.36 [Oryza sativa (japonica
  misc_feature (1)..(178): Homolog of NCBI NO: 18405629 NR Description: expressed protein; protein id: At2g41190.1, by cDNA: gi_14532707, supported by cDNA: gi_19310728 [Arabidopsis >gi|14532708|gb|AAK64155.1| unknown protein [Arabidopsis
  misc_feature (1)..(178): Homolog of NCBI NO: 23397299 NR Description: unknown protein [Arabidopsis thaliana]
  misc_feature (155)..(289): Homolog of NCBI NO: 18405629 NR Description: expressed protein; protein id: At2g41190.1, by cDNA: gi_14532707, supported by cDNA: gi_19310728 [Arabidopsis >gi|14532708|gb|AAK64155.1| unknown protein [Arabidopsis
MNADRNIKTYPDIGERAFGRPGRIIVSVFMHLELYLVTTGFLILEGDNLHNLFPGFTIEMIGLRLNGKQAFMATVAFVIMPTLWWDNLSVLSYVSMSGVLATTVTLGSISWIGAFDGIGFHQKGKLINWSGIPTALSLYAFCYGAHPVLPTLYSSMKSKHQFNNVAIYTTLVNPVAKYALMITPTVNTIKDWFPSRYSKKAYLHLLISTFFIISSVVIAETLPFFGYMMSLVGALLSVTVSILLPCLCYLKIFGNYKKIGCETIMLFGMVVMSVFVGVIGTYIALRDIIGSV

SEQ ID NO: 73324 - protein, 263 aa, Arabidopsis thaliana
  peptide (1)..(263): Ceres Seq. ID no. 4963173
  misc_feature (1)..(218): Pfam Name: Tryptophan/tyrosine permease family Pfam Description: Tryptophan/tyrosine permease family
  misc_feature (1)..(263): Homolog of NCBI NO: 15228542 NR Description: hypothetical protein; protein id: At3g28960.1
  misc_feature (1)..(138): Homolog of NCBI NO: 7939546 NR Description: gb|AAC79623.2~gene_id:K5K13.9~similar to unknown
  misc_feature (105)..(260): Homolog of NCBI NO: 7939546 NR Description: gb|AAC79623.2~gene_id:K5K13.9~similar to unknown
  misc_feature (1)..(143): Homolog of NCBI NO: 15290054 NR Description: P0025A05.3 [Oryza sativa (japonica
  misc_feature (126)..(262): Homolog of NCBI NO: 15290054 NR Description: P0025A05.3 [Oryza sativa (japonica
  misc_feature (1)..(143): Homolog of NCBI NO: 20521331 NR Description: B1103C09.36 [Oryza sativa (japonica
  misc_feature (133)..(262): Homolog of NCBI NO: 20521331 NR Description: B1103C09.36 [Oryza sativa (japonica
  misc_feature (1)..(149): Homolog of NCBI NO: 18405629 NR Description: expressed protein; protein id: At2g41190.1, by cDNA: gi_14532707, supported by cDNA: gi_19310728 [Arabidopsis >gi|14532708|gb|AAK64155.1| unknown protein [Arabidopsis
  misc_feature (1)..(149): Homolog of NCBI NO: 23397299 NR Description: unknown protein [Arabidopsis thaliana]
  misc_feature (126)..(260): Homolog of NCBI NO: 18405629 NR Description: expressed protein; protein id: At2g41190.1, by cDNA: gi_14532707, supported by cDNA: gi_19310728 [Arabidopsis >gi|14532708|gb|AAK64155.1| unknown protein [Arabidopsis
MHLELYLVTTGFLILEGDNLHNLFPGFTIEMIGLRLNGKQAFMATVAFVIMPTLWWDNLSVLSYVSMSGVLATTVTLGSISWIGAFDGIGFHQKGKLINWSGIPTALSLYAFCYGAHPVLPTLYSSMKSKHQFNNVAIYTTLVNPVAKYALMITPTVNTIKDWFPSRYSKKAYLHLLISTFFIISSVVIAETLPFFGYMMSLVGALLSVTVSILLPCLCYLKIFGNYKKIGCETIMLFGMVVMSVFVGVIGTYIALRDIIGSV

SEQ ID NO: 73325 - DNA, 747 bp, Arabidopsis thaliana
  misc_feature (1)..(747): Ceres Seq. ID no. 4963193
  misc_feature: MA Experiment ID: 20000355 Result: Down-regulated in Transcription
  misc_feature: MA Experiment 20000355 PARAMETER Experiment Name: At_Siliques_Sub_P Parameter: Age (day) Value: 21
  misc_feature: MA Experiment 20000355 PARAMETER Experiment Name: At_Siliques_Sub_P Parameter: Organism Value: A. thaliana
  misc_feature: MA Experiment 20000355 PARAMETER Experiment Name: At_Siliques_Sub_P Parameter: Plant Line Value: WS
  misc_feature: MA Experiment 20000355 PARAMETER Experiment Name: At_Siliques_Sub_P Parameter: Tissue Value: Less Than 5mm Siliques vs. Whole Plant
  misc_feature: MA Experiment ID: 20000440 Result: Up-regulated in Transcription
  misc_feature: MA Experiment 20000440 PARAMETER Experiment Name: At_Closed-Flower__Sub_P Parameter: Tissue Value: Closed Flower vs. Whole Plant
atggtggccatgcaactcctccttatacgcatagtttcttcccaaaacgttacgaatgagtatttgaaccaccaatgcaacaacacacaagggacatacacgcggggtagtacgtttgagaagaatctcaaccaagtcatccgtaacatctctcacctccatcttcgctacggttacacctacaactccaatgttgaggcttacgaagttagtaaagatcccaacattgtcttcgttttgctccagtgtcgtggtgactcttacgggtccaagtgccactcctgcctccacacagccttctctgggcttcgtgagagatgtcggggaaacaaaggagcaataatatggtacgaccaatgtgttttggagatttcttccgtgaataccaaggggaggattcgttacgatagttttttcaatatgaccaacgtgaagaatgtgagcagcaatgcggagcagtttaaaaataaaaggaaggatctcttccacaagctattgttgggagccaccaaggatgtaagcgacagcaatgatgcgtacgcagtgggggagacgaggataggaagaaataagatgtatgcaatgatgcagtgtgcactagacttaacgacgaatggatgctatgtgtgtctagaatggattataggcaggtatgatagcttctactttgaccgtagacaaggaacgagagttttgagtaggagttgtagcttaagatatgagctttacccttttcttaggaggtaa

SEQ ID NO: 73326 - protein, 248 aa, Arabidopsis thaliana; identical to SEQ ID NO: 71344
  peptide (1)..(248): Ceres Seq. ID no. 4963194
  misc_feature (192)..(247): Pfam Name: Domain of unknown function DUF26 Pfam Description: Domain of unknown function DUF26
  misc_feature (1)..(248): Homolog of NCBI NO: 11994708 NR Description: contains similarity to serine/threonine
  misc_feature (1)..(248): Homolog of NCBI NO: 15228583 NR Description: receptor kinase, putative; protein id:
  misc_feature (1)..(248): Homolog of NCBI NO: 15233228 NR Description: hypothetical protein; protein id: At3g21970.1
  misc_feature (1)..(240): Homolog of NCBI NO: 9279753 NR Description: emb|CAB45833.1~gene_id:MZN24.14~similar to
  misc_feature (1)..(247): Homolog of NCBI NO: 15233235 NR Description: receptor kinase common family, putative; protein At3g21990.1 [Arabidopsis thaliana] >gi|9279756|dbj|BAB01382.1| similarity to receptor kinase~gene_id:MZN24.17 [Arabidopsis
  misc_feature (12)..(246): Homolog of NCBI NO: 9279746 NR Description: contains similarity to receptor protein
  misc_feature (1)..(247): Homolog of NCBI NO: 15233366 NR Description: pollen coat receptor kinase, putative; protein At4g20670.1 [Arabidopsis thaliana] >gi|7485931|pir||T10609
  misc_feature (1)..(248): Homolog of NCBI NO: 9279762 NR Description: emb|CAB45834.1~gene_id:MZN24.23~similar to
  misc_feature (1)..(246): Homolog of NCBI NO: 15233201 NR Description: hypothetical protein; protein id: At3g21910.1 thaliana] >gi|9279742|dbj|BAB01368.1| contains similarity to
  misc_feature (1)..(246): Homolog of NCBI NO: 15233204 NR Description: pollen coat receptor kinase, putative; protein At3g21920.1 [Arabidopsis thaliana] >gi|9279743|dbj|BAB01369.1| similarity to receptor protein kinase~gene_id:MZN24.4

SEQ ID NO: 73327 - protein, 245 aa, Arabidopsis thaliana; identical to SEQ ID NO: 71345
  peptide (1)..(245): Ceres Seq. ID no. 4963195
  misc_feature (189)..(244): Pfam Name: Domain of unknown function DUF26 Pfam Description: Domain of unknown function DUF26
  misc_feature (1)..(245): Homolog of NCBI NO: 11994708 NR Description: contains similarity to serine/threonine
  misc_feature (1)..(245): Homolog of NCBI NO: 15228583 NR Description: receptor kinase, putative; protein id:
  misc_feature (1)..(245): Homolog of NCBI NO: 15233228 NR Description: hypothetical protein; protein id: At3g21970.1
  misc_feature (1)..(237): Homolog of NCBI NO: 9279753 NR Description: emb|CAB45833.1~gene_id:MZN24.14~similar to
  misc_feature (1)..(244): Homolog of NCBI NO: 15233235 NR Description: receptor kinase common family, putative; protein At3g21990.1 [Arabidopsis thaliana] >gi|9279756|dbj|BAB01382.1| similarity to receptor kinase~gene_id:MZN24.17 [Arabidopsis
  misc_feature (9)..(243): Homolog of NCBI NO: 9279746 NR Description: contains similarity to receptor protein
  misc_feature (1)..(244): Homolog of NCBI NO: 15233366 NR Description: pollen coat receptor kinase, putative; protein At4g20670.1 [Arabidopsis thaliana] >gi|7485931|pir||T10609
  misc_feature (1)..(245): Homolog of NCBI NO: 9279762 NR Description: emb|CAB45834.1~gene_id:MZN24.23~similar to
  misc_feature (1)..(243): Homolog of NCBI NO: 15233201 NR Description: hypothetical protein; protein id: At3g21910.1 thaliana] >gi|9279742|dbj|BAB01368.1| contains similarity to
  misc_feature (1)..(243): Homolog of NCBI NO: 15233204 NR Description: pollen coat receptor kinase, putative; protein At3g21920.1 [Arabidopsis thaliana] >gi|9279743|dbj|BAB01369.1| similarity to receptor protein kinase~gene_id:MZN24.4

SEQ ID NO: 73328 - DNA, 1332 bp, Arabidopsis thaliana
  misc_feature (1)..(1332): Ceres Seq. ID no. 4963484
atggaattcacggaggcttacaagcaaacaggtccttgttgtttctccccaaactctcgttacgtcgccgtcgccaatgattatcgtctcgtgatccgtgatacgttttcgtttcaggttgtgcaattgttttcttgcttagataaaataagctacatagaatgggctcttgattcagagtacattctttgtggtctttataaaaaaccgatgattcaagcttggtctttgactcaaccagaatggacttgcaagattgatgaaggtcctgctggtatttcatacgctaggtggagtccagatagccgtcatatactcactacgtcagagtttcagctgcggttaacggtttggtctcttttaaacacggcgtgtgttcatgttcagtggccaaagcatggttccaagggagtttcattcaatcaagatgggaagtttgcggctatatgtacacggcgtgactgtaaggattatgttaaccttttgtcttgtcaatcatgggagataatgggtagctttgctgttgataccttggacttggctgatcttgagtggtcacctgatgatagttctattgtagtgtgggattcgcctcttgaatataaggcatatgaatgtggacttggtgtcaagactgtttcctggtctccgtgtggtcagtttcttgccattggtagctatgatcaaatgttgcgggtcctgaatcaccttacttggaaaacattcgctgagttcttacacctatcaacggttcgtgcgccctgttctgcggctattttcaaggaaatcgatgaaccattacagcttgatatgtctgagttatcgttggatgaaaactttatgccaagcaattatgatgcttcagaaggctatataagtgtcaggtatgaagtcatggaattaccggtagcttttcctttccagaaacctcctgcggacaagcctaacccaaaacaaggagtcggccttctagcttggagcaaagacagccagtacatatgcacacgaaacgacagtatgcccactgctctgtggatatgggacatgcgcctcctcgaggttgcagccatcctggtccagaaggaacccatccgagcagctgtgtgggacccaacctgcacacgcctcctcctgtgcactggaagctctcacctttacatgtggactccctcgggtgctttctgtgtatgcaatccccttccgggcttctccatatcggacctcaaatggaacattgatggaagctgtctccttctcaaagacaaagatgcgttctgttgtgccacggtcccgtctctgcctgagtccagcgactacagttctgatgactga

SEQ ID NO: 73329 - protein, 443 aa, Arabidopsis thaliana
  peptide (1)..(443): Ceres Seq. ID no. 4963485
  misc_feature (353)..(389): Pfam Name: WD domain, G-beta repeat Pfam Description: WD domain, G-beta repeat
  misc_feature (1)..(443): Homolog of NCBI NO: 15240819 NR Description: WD-repeat protein-like; protein id: At5g07590.1
  misc_feature (1)..(280): Homolog of NCBI NO: 37536890 NR Description: putative WD-40 protein [Oryza sativa (japonica group)] >gi|12597885|gb|AAG60193.1| putative WD40 protein [Oryza
  misc_feature (1)..(429): Homolog of NCBI NO: 29791584 NR Description: Similar to WD repeat domain 8 [Danio rerio]
  misc_feature (1)..(426): Homolog of NCBI NO: 16445434 NR Description: WD repeat domain 8 protein; WD repeat-containing
  misc_feature (1)..(426): Homolog of NCBI NO: 17380347 NR Description: WD-repeat protein 8 >gi|7209723|dbj|BAA92312.1|
  misc_feature (1)..(426): Homolog of NCBI NO: 10946908 NR Description: WD repeat domain 8; DD57 [Mus musculus]
  misc_feature (1)..(426): Homolog of NCBI NO: 26342120 NR Description: unnamed protein product [Mus musculus]
  misc_feature (1)..(426): Homolog of NCBI NO: 7020525 NR Description: unnamed protein product [Homo sapiens]
  misc_feature (1)..(402): Homolog of NCBI NO: 12803559 NR Description: Similar to hypothetical protein FLJ20430 [Homo
  misc_feature (178)..(443): Homolog of NCBI NO: 37536890 NR Description: putative WD-40 protein [Oryza sativa (japonica group)] >gi|12597885|gb|AAG60193.1| putative WD40 protein [Oryza
MEFTEAYKQTGPCCFSPNSRYVAVANDYRLVIRDTFSFQVVQLFSCLDKISYIEWALDSEYILCGLYKKPMIQAWSLTQPEWTCKIDEGPAGISYARWSPDSRHILTTSEFQLRLTVWSLLNTACVHVQWPKHGSKGVSFNQDGKFAAICTRRDCKDYVNLLSCQSWEIMGSFAVDTLDLADLEWSPDDSSIVVWDSPLEYKAYECGLGVKTVSWSPCGQFLAIGSYDQMLRVLNHLTWKTFAEFLHLSTVRAPCSAAIFKEIDEPLQLDMSELSLDENFMPSNYDASEGYISVRYEVMELPVAFPFQKPPADKPNPKQGVGLLAWSKDSQYICTRNDSMPTALWIWDMRLLEVAAILVQKEPIRAAVWDPTCTRLLLCTGSSHLYMWTPSGAFCVCNPLPGFSISDLKWNIDGSCLLLKDKDAFCCATVPSLPESSDYSSDD

SEQ ID NO: 73330 - protein, 373 aa, Arabidopsis thaliana
  peptide (1)..(373): Ceres Seq. ID no. 4963486
  misc_feature (283)..(319): Pfam Name: WD domain, G-beta repeat Pfam Description: WD domain, G-beta repeat
  misc_feature (1)..(373): Homolog of NCBI NO: 15240819 NR Description: WD-repeat protein-like; protein id: At5g07590.1
  misc_feature (1)..(210): Homolog of NCBI NO: 37536890 NR Description: putative WD-40 protein [Oryza sativa (japonica group)] >gi|12597885|gb|AAG60193.1| putative WD40 protein [Oryza
  misc_feature (1)..(359): Homolog of NCBI NO: 29791584 NR Description: Similar to WD repeat domain 8 [Danio rerio]
  misc_feature (1)..(356): Homolog of NCBI NO: 16445434 NR Description: WD repeat domain 8 protein; WD repeat-containing
  misc_feature (1)..(356): Homolog of NCBI NO: 17380347 NR Description: WD-repeat protein 8 >gi|7209723|dbj|BAA92312.1|
  misc_feature (1)..(356): Homolog of NCBI NO: 10946908 NR Description: WD repeat domain 8; DD57 [Mus musculus]
  misc_feature (1)..(356): Homolog of NCBI NO: 26342120 NR Description: unnamed protein product [Mus musculus]
  misc_feature (1)..(356): Homolog of NCBI NO: 7020525 NR Description: unnamed protein product [Homo sapiens]
  misc_feature (1)..(332): Homolog of NCBI NO: 12803559 NR Description: Similar to hypothetical protein FLJ20430 [Homo
  misc_feature (108)..(373): Homolog of NCBI NO: 37536890 NR Description: putative WD-40 protein [Oryza sativa (japonica group)] >gi|12597885|gb|AAG60193.1| putative WD40 protein [Oryza
MIQAWSLTQPEWTCKIDEGPAGISYARWSPDSRHILTTSEFQLRLTVWSLLNTACVHVQWPKHGSKGVSFNQDGKFAAICTRRDCKDYVNLLSCQSWEIMGSFAVDTLDLADLEWSPDDSSIVVWDSPLEYKAYECGLGVKTVSWSPCGQFLAIGSYDQMLRVLNHLTWKTFAEFLHLSTVRAPCSAAIFKEIDEPLQLDMSELSLDENFMPSNYDASEGYISVRYEVMELPVAFPFQKPPADKPNPKQGVGLLAWSKDSQYICTRNDSMPTALWIWDMRLLEVAAILVQKEPIRAAVWDPTCTRLLLCTGSSHLYMWTPSGAFCVCNPLPGFSISDLKWNIDGSCLLLKDKDAFCCATVPSLPESSDYSSDD

SEQ ID NO: 73331 - protein, 274 aa, Arabidopsis thaliana
  peptide (1)..(274): Ceres Seq. ID no. 4963487
  misc_feature (184)..(220): Pfam Name: WD domain, G-beta repeat Pfam Description: WD domain, G-beta repeat
  misc_feature (1)..(274): Homolog of NCBI NO: 15240819 NR Description: WD-repeat protein-like; protein id: At5g07590.1
  misc_feature (1)..(111): Homolog of NCBI NO: 37536890 NR Description: putative WD-40 protein [Oryza sativa (japonica group)] >gi|12597885|gb|AAG60193.1| putative WD40 protein [Oryza
  misc_feature (1)..(260): Homolog of NCBI NO: 29791584 NR Description: Similar to WD repeat domain 8 [Danio rerio]
  misc_feature (1)..(257): Homolog of NCBI NO: 16445434 NR Description: WD repeat domain 8 protein; WD repeat-containing
  misc_feature (1)..(257): Homolog of NCBI NO: 17380347 NR Description: WD-repeat protein 8 >gi|7209723|dbj|BAA92312.1|
  misc_feature (1)..(257): Homolog of NCBI NO: 10946908 NR Description: WD repeat domain 8; DD57 [Mus musculus]
  misc_feature (1)..(257): Homolog of NCBI NO: 26342120 NR Description: unnamed protein product [Mus musculus]
  misc_feature (1)..(257): Homolog of NCBI NO: 7020525 NR Description: unnamed protein product [Homo sapiens]
  misc_feature (1)..(233): Homolog of NCBI NO: 12803559 NR Description: Similar to hypothetical protein FLJ20430 [Homo
  misc_feature (9)..(274): Homolog of NCBI NO: 37536890 NR Description: putative WD-40 protein [Oryza sativa (japonica group)] >gi|12597885|gb|AAG60193.1| putative WD40 protein [Oryza
MGSFAVDTLDLADLEWSPDDSSIVVWDSPLEYKAYECGLGVKTVSWSPCGQFLAIGSYDQMLRVLNHLTWKTFAEFLHLSTVRAPCSAAIFKEIDEPLQLDMSELSLDENFMPSNYDASEGYISVRYEVMELPVAFPFQKPPADKPNPKQGVGLLAWSKDSQYICTRNDSMPTALWIWDMRLLEVAAILVQKEPIRAAVWDPTCTRLLLCTGSSHLYMWTPSGAFCVCNPLPGFSISDLKWNIDGSCLLLKDKDAFCCATVPSLPESSDYSSDD

SEQ ID NO: 73332 - DNA, 1290 bp, Arabidopsis thaliana
  misc_feature (1)..(1290): Ceres Seq. ID no. 4963595
  misc_feature: MA Experiment ID: 20001773 Result: Up-regulated in Transcription
  misc_feature: MA Experiment 20001773 PARAMETER Experiment Name: At_Far-red-enriched-adult_P Parameter: Age (day) Value: 30
  misc_feature: MA Experiment 20001773 PARAMETER Experiment Name: At_Far-red-enriched-adult_P Parameter: Light Value: Far-red enriched vs. White
  misc_feature: MA Experiment 20001773 PARAMETER Experiment Name: At_Far-red-enriched-adult_P Parameter: Organism Value: A. thaliana
  misc_feature: MA Experiment 20001773 PARAMETER Experiment Name: At_Far-red-enriched-adult_P Parameter: Plant Line Value: Columbia
  misc_feature: MA Experiment 20001773 PARAMETER Experiment Name: At_Far-red-enriched-adult_P Parameter: Timepoint (hr) Value: 48
  misc_feature: MA Experiment 20001773 PARAMETER Experiment Name: At_Far-red-enriched-adult_P Parameter: Tissue Value: Aerial
  misc_feature: Pfam Name: Pkinase Pfam Description: Protein kinase domain
atgctaaaatgtgtttctgtccaaattcaaaccagttttgtcttgtcttgtcttcttcttcttcagagcattgcaatgaaagttccagattcttcttcaccgaccggagttctcgaagaattcttcagaaccgaagaattcaatagctcctccgagacggtcaagaacccttcctcttctcgtttccgcaagatggttcagcttctcagaagcaaatccaaaaagtctcttgagaatgtcaagattccgtttcacaacaatggtgttattaagagttcttttagaagatgcagtagcatgagagaaaatctcagatttagctccaatgattctcactttcttctacattctcctagaagaatcttcaccttctctgacctcaagtctgctacaaacaatttctctttagaaaatctaattgggaaaggaggttatgctgaagtttacaaagggatgttaccaaatggacaaatggtagcgataaaacggttgatgcggggaaatagtgaagagatcattgtagactttctttcggagatgggtataatggcacatgttaaccatcccaacatagctaagcttttaggctatggagttgaaggaggaatgcatcttgttcttgagttatcacctcatggcagcttagcttctatgctctatagctccaaggagaagatgaaatggagcattaggtacaagatagcattaggagttgcggagggtctagtgtatcttcatagaggatgtcataggagaattatacatagagatatcaaagccgcaaacattcttctcacacatgatttttctcctcagatatgtgactttgggcttgcgaagtggttacctgaaaattggacacaccacattgtttccaaatttgagggcacattcgggtatcttgctccagagtacttaacacatgggatagtagatgaaaagaccgatgtattcgccttgggtgtacttttactggaacttgttaccggacgacgagctctcgattactccaagcaaagtcttgttctatgggctaaaccattgatgaagaagaacaaaattagagagctaatcgatccatctctggcgggtgagtacgaatggaggcagataaaacttgtgcttttggctgctgcgttatcaatccaacaatcatcgatagagaggcctgaaatgagtcaggttgttgagatcctcaaaggcaacttgaaagatctcaagtgcatcatgaaatgcagagttcccttttataggaaagctttcagggatgaagttggcaaaaaagattag

SEQ ID NO: 73333 - protein, 429 aa, Arabidopsis thaliana
  peptide (1)..(429): Ceres Seq. ID no. 4963596
  misc_feature: Pfam Name: Pkinase Pfam Description: Protein kinase domain
  misc_feature (1)..(429): Homolog of NCBI NO: 15239245 NR Description: serine/threonine protein kinase-like; protein id: [Arabidopsis thaliana] >gi|9758799|dbj|BAB09252.1|
  misc_feature (20)..(402): Homolog of NCBI NO: 30687061 NR Description: protein kinase family [Arabidopsis thaliana] putative protein kinase [Arabidopsis thaliana]
  misc_feature (48)..(425): Homolog of NCBI NO: 22330852 NR Description: putative serine/threonine protein kinase; protein At3g05140.1, supported by cDNA: gi_19698986 [Arabidopsis >gi|19698987|gb|AAL91229.1| putative serine/threonine protein
  misc_feature (48)..(402): Homolog of NCBI NO: 26452369 NR Description: unknown protein [Arabidopsis thaliana]
  misc_feature (48)..(402): Homolog of NCBI NO: 30698132 NR Description: protein kinase, putative [Arabidopsis thaliana]
  misc_feature (51)..(401): Homolog of NCBI NO: 15810235 NR Description: putative Pto kinase interactor [Arabidopsis
  misc_feature (51)..(401): Homolog of NCBI NO: 18416299 NR Description: Pto kinase interactor - like protein; protein id: supported by cDNA: gi_15810234 [Arabidopsis thaliana]
  misc_feature (51)..(396): Homolog of NCBI NO: 11358733 NR Description: Pto kinase interactor-like protein - Arabidopsis
  misc_feature (102)..(415): Homolog of NCBI NO: 40253745 NR Description: SERK1 protein-like [Oryza sativa (japonica
  misc_feature (66)..(401): Homolog of NCBI NO: 15224251 NR Description: putative protein kinase; protein id: At2g18890.1
MLKCVSVQIQTSFVLSCLLLLQSIAMKVPDSSSPTGVLEEFFRTEEFNSSSETVKNPSSSRFRKMVQLLRSKSKKSLENVKIPFHNNGVIKSSFRRCSSMRENLRFSSNDSHFLLHSPRRIFTFSDLKSATNNFSLENLIGKGGYAEVYKGMLPNGQMVAIKRLMRGNSEEIIVDFLSEMGIMAHVNHPNIAKLLGYGVEGGMHLVLELSPHGSLASMLYSSKEKMKWSIRYKIALGVAEGLVYLHRGCHRRIIHRDIKAANILLTHDFSPQICDFGLAKWLPENWTHHIVSKFEGTFGYLAPEYLTHGIVDEKTDVFALGVLLLELVTGRRALDYSKQSLVLWAKPLMKKNKIRELIDPSLAGEYEWRQIKLVLLAAALSIQQSSIERPEMSQVVEILKGNLKDLKCIMKCRVPFYRKAFRDEVGKKD

SEQ ID NO: 73334 - protein, 404 aa, Arabidopsis thaliana
  peptide (1)..(404): Ceres Seq. ID no. 4963597
  misc_feature: Pfam Name: Pkinase Pfam Description: Protein kinase domain
  misc_feature (1)..(404): Homolog of NCBI NO: 15239245 NR Description: serine/threonine protein kinase-like; protein id: [Arabidopsis thaliana] >gi|9758799|dbj|BAB09252.1|
  misc_feature (1)..(377): Homolog of NCBI NO: 30687061 NR Description: protein kinase family [Arabidopsis thaliana] putative protein kinase [Arabidopsis thaliana]
  misc_feature (23)..(400): Homolog of NCBI NO: 22330852 NR Description: putative serine/threonine protein kinase; protein At3g05140.1, supported by cDNA: gi_19698986 [Arabidopsis >gi|19698987|gb|AAL91229.1| putative serine/threonine protein
  misc_feature (23)..(377): Homolog of NCBI NO: 26452369 NR Description: unknown protein [Arabidopsis thaliana]
  misc_feature (23)..(377): Homolog of NCBI NO: 30698132 NR Description: protein kinase, putative [Arabidopsis thaliana]
  misc_feature (26)..(376): Homolog of NCBI NO: 15810235 NR Description: putative Pto kinase interactor [Arabidopsis
  misc_feature (26)..(376): Homolog of NCBI NO: 18416299 NR Description: Pto kinase interactor - like protein; protein id: supported by cDNA: gi_15810234 [Arabidopsis thaliana]
  misc_feature (26)..(371): Homolog of NCBI NO: 11358733 NR Description: Pto kinase interactor-like protein - Arabidopsis
  misc_feature (77)..(390): Homolog of NCBI NO: 40253745 NR Description: SERK1 protein-like [Oryza sativa (japonica
  misc_feature (41)..(376): Homolog of NCBI NO: 15224251 NR Description: putative protein kinase; protein id: At2g18890.1
MKVPDSSSPTGVLEEFFRTEEFNSSSETVKNPSSSRFRKMVQLLRSKSKKSLENVKIPFHNNGVIKSSFRRCSSMRENLRFSSNDSHFLLHSPRRIFTFSDLKSATNNFSLENLIGKGGYAEVYKGMLPNGQMVAIKRLMRGNSEEIIVDFLSEMGIMAHVNHPNIAKLLGYGVEGGMHLVLELSPHGSLASMLYSSKEKMKWSIRYKIALGVAEGLVYLHRGCHRRIIHRDIKAANILLTHDFSPQICDFGLAKWLPENWTHHIVSKFEGTFGYLAPEYLTHGIVDEKTDVFALGVLLLELVTGRRALDYSKQSLVLWAKPLMKKNKIRELIDPSLAGEYEWRQIKLVLLAAALSIQQSSIERPEMSQVVEILKGNLKDLKCIMKCRVPFYRKAFRDEVGKKD

SEQ ID NO: 73335 - protein, 365 aa, Arabidopsis thaliana
  peptide (1)..(365): Ceres Seq. ID no. 4963598
  misc_feature: Pfam Name: Pkinase Pfam Description: Protein kinase domain
  misc_feature (1)..(365): Homolog of NCBI NO: 15239245 NR Description: serine/threonine protein kinase-like; protein id: [Arabidopsis thaliana] >gi|9758799|dbj|BAB09252.1|
  misc_feature (1)..(338): Homolog of NCBI NO: 30687061 NR Description: protein kinase family [Arabidopsis thaliana] putative protein kinase [Arabidopsis thaliana]
  misc_feature (1)..(361): Homolog of NCBI NO: 22330852 NR Description: putative serine/threonine protein kinase; protein At3g05140.1, supported by cDNA: gi_19698986 [Arabidopsis >gi|19698987|gb|AAL91229.1| putative serine/threonine protein
  misc_feature (1)..(338): Homolog of NCBI NO: 26452369 NR Description: unknown protein [Arabidopsis thaliana]
  misc_feature (1)..(338): Homolog of NCBI NO: 30698132 NR Description: protein kinase, putative [Arabidopsis thaliana]
  misc_feature (1)..(337): Homolog of NCBI NO: 15810235 NR Description: putative Pto kinase interactor [Arabidopsis
  misc_feature (1)..(337): Homolog of NCBI NO: 18416299 NR Description: Pto kinase interactor - like protein; protein id: supported by cDNA: gi_15810234 [Arabidopsis thaliana]
  misc_feature (1)..(332): Homolog of NCBI NO: 11358733 NR Description: Pto kinase interactor-like protein - Arabidopsis
  misc_feature (38)..(351): Homolog of NCBI NO: 40253745 NR Description: SERK1 protein-like [Oryza sativa (japonica
  misc_feature (2)..(337): Homolog of NCBI NO: 15224251 NR Description: putative protein kinase; protein id: At2g18890.1
MVQLLRSKSKKSLENVKIPFHNNGVIKSSFRRCSSMRENLRFSSNDSHFLLHSPRRIFTFSDLKSATNNFSLENLIGKGGYAEVYKGMLPNGQMVAIKRLMRGNSEEIIVDFLSEMGIMAHVNHPNIAKLLGYGVEGGMHLVLELSPHGSLASMLYSSKEKMKWSIRYKIALGVAEGLVYLHRGCHRRIIHRDIKAANILLTHDFSPQICDFGLAKWLPENWTHHIVSKFEGTFGYLAPEYLTHGIVDEKTDVFALGVLLLELVTGRRALDYSKQSLVLWAKPLMKKNKIRELIDPSLAGEYEWRQIKLVLLAAALSIQQSSIERPEMSQVVEILKGNLKDLKCIMKCRVPFYRKAFRDEVGKKD

SEQ ID NO: 73336 - DNA, 1311 bp, Arabidopsis thaliana
  misc_feature (1)..(1311): Ceres Seq. ID no. 4963751
  misc_feature: MA Experiment ID: 20000180 Result: Up-regulated in Transcription
  misc_feature: MA Experiment 20000180 PARAMETER Experiment Name: At_Germinating_Seeds_P Parameter: Age (hr) Value: 24 vs. 0
  misc_feature: MA Experiment 20000180 PARAMETER Experiment Name: At_Germinating_Seeds_P Parameter: Tissue Value: Germinating Seeds
  misc_feature: MA Experiment ID: 20000182 Result: Up-regulated in Transcription
  misc_feature: MA Experiment 20000182 PARAMETER Experiment Name: At_2mM_SA_P Parameter: Age (day) Value: 14
  misc_feature: MA Experiment 20000182 PARAMETER Experiment Name: At_2mM_SA_P Parameter: Organism Value: A. thaliana
  misc_feature: MA Experiment 20000182 PARAMETER Experiment Name: At_2mM_SA_P Parameter: Plant Line Value: WS
  misc_feature: MA Experiment 20000182 PARAMETER Experiment Name: At_2mM_SA_P Parameter: Timepoint (hr) Value: 6
  misc_feature: MA Experiment 20000182 PARAMETER Experiment Name: At_2mM_SA_P Parameter: Tissue Value: Aerial
  misc_feature: MA Experiment 20000182 PARAMETER Experiment Name: At_2mM_SA_P Parameter: Treatment Value: 2mM SA vs. No Treatment
  misc_feature: MA Experiment ID: 20000185 Result: Up-regulated in Transcription
  misc_feature: MA Experiment 20000185 PARAMETER Experiment Name: At_Roots__P Parameter: Age (day) Value: 7 vs. 21
  misc_feature: MA Experiment 20000185 PARAMETER Experiment Name: At_Roots__P Parameter: Organism Value: A. thaliana
  misc_feature: MA Experiment 20000185 PARAMETER Experiment Name: At_Roots__P Parameter: Tissue Value: Roots vs. Whole Plant
  misc_feature: MA Experiment ID: 20000438 Result: Down-regulated in Transcription
  misc_feature: MA Experiment 20000438 PARAMETER Experiment Name: At_Shoots__P Parameter: Age (day) Value: 14
  misc_feature: MA Experiment 20000438 PARAMETER Experiment Name: At_Shoots__P Parameter: Tissue Value: Shoots vs. Whole Plant
  misc_feature: MA Experiment ID: 20000439 Result: Up-regulated in Transcription
  misc_feature: MA Experiment 20000439 PARAMETER Experiment Name: At_Roots__P Parameter: Age (day) Value: 14 vs. 21
  misc_feature: MA Experiment 20000439 PARAMETER Experiment Name: At_Roots__P Parameter: Organism Value: A. thaliana
  misc_feature: MA Experiment 20000439 PARAMETER Experiment Name: At_Roots__P Parameter: Tissue Value: Roots vs. Whole Plant
  misc_feature: MA Experiment ID: 20001757 Result: Down-regulated in Transcription
  misc_feature: MA Experiment 20001757 PARAMETER Experiment Name: At_50mM_NH4NO3_L-to-H_P Parameter: Timepoint (hr) Value: 6
  misc_feature: MA Experiment 20001757 PARAMETER Experiment Name: At_50mM_NH4NO3_L-to-H_P Parameter: Tissue Value: Leaf
  misc_feature: MA Experiment 20001757 PARAMETER Experiment Name: At_50mM_NH4NO3_L-to-H_P Parameter: Treatment Value: 50mM NH4NO3 vs 100mM Mannitol
  misc_feature: MA Experiment ID: 20001905 Result: Up-regulated in Transcription
  misc_feature: MA Experiment 20001905 PARAMETER Experiment Name: At_Drought_Reproduction_P Parameter: Age (day) Value: 40
  misc_feature: MA Experiment 20001905 PARAMETER Experiment Name: At_Drought_Reproduction_P Parameter: Organism Value: A. thaliana
  misc_feature: MA Experiment 20001905 PARAMETER Experiment Name: At_Drought_Reproduction_P Parameter: Plant Line Value: WS
  misc_feature: MA Experiment 20001905 PARAMETER Experiment Name: At_Drought_Reproduction_P Parameter: Timepoint (day) Value: 10
  misc_feature: MA Experiment 20001905 PARAMETER Experiment Name: At_Drought_Reproduction_P Parameter: Tissue Value: Rosettes
  misc_feature: MA Experiment 20001905 PARAMETER Experiment Name: At_Drought_Reproduction_P Parameter: Treatment Value: Drought vs. No Drought
  misc_feature: MA Experiment ID: 20001906 Result: Up-regulated in Transcription
  misc_feature: MA Experiment 20001906 PARAMETER Experiment Name: At_Drought_Reproduction_P Parameter: Age (day) Value: 35
  misc_feature: MA Experiment 20001906 PARAMETER Experiment Name: At_Drought_Reproduction_P Parameter: Organism Value: A. thaliana
  misc_feature: MA Experiment 20001906 PARAMETER Experiment Name: At_Drought_Reproduction_P Parameter: Plant Line Value: WS
  misc_feature: MA Experiment 20001906 PARAMETER Experiment Name: At_Drought_Reproduction_P Parameter: Timepoint (day) Value: 5
  misc_feature: MA Experiment 20001906 PARAMETER Experiment Name: At_Drought_Reproduction_P Parameter: Tissue Value: Siliques
  misc_feature: MA Experiment 20001906 PARAMETER Experiment Name: At_Drought_Reproduction_P Parameter: Treatment Value: Drought vs. No Drought
atgctaaattcgtctggagtaagaactcaacgaagaagcccaagacctttgtctctaggaggtagaaagattattactccaacaaaatttgcttatgatcatcataatcctgataaagttttggattttgtagaaatggattgcttagaacccaaaacaaagaacaatctcactggaaagcttctcttagtagcttcactcttaattttagccattattgtgatcagtcaatcttcaagtttcacatctccaagcgcgttttctcaaagagaggaaggagtgactcatgtgttagtcactggtggtgctggttatatcgggtcacatgcggctttaagacttcttagagattcataccgcgtaaccattgtggacaatctttcgcgtggaaatcttggtgcggttaagactttacagcaattattcccgcagacaggaagacttcagttcatttatgctgacttaggagatcccttagcggtcgagaaaatcttctcggagaatgcttttgacgctgtaatgcattttgctgcggtagcttatgtcggagaaagcactctttatcctctaaaatattaccataacattacatcaaacacgttaggagttcttgaagctatggctagacataaagtaaagaaactgatatattctagcacttgtgctacatatggagagcctgaaaaaatgccgattactgaagacactccacaggtaccgattaatccatacggaaaagctaaaaagatggcagaggatatgatcttggatttctcaaagaactctgacatggcggttatgatcttaagatacttcaatgtgattggttcagatccaggaggtagattaggagaagcgccaagacccgaacttcgtgagcaaggaaggatttctggtgcttgtttcgatgcagctcgtggtttcattcccggactacaagtgaaaggaacggattacaaaacatcggacggtacttgcattagagactatatagatgttactgacctcgtggatgctcacgtgaaggctctcgagaaagctcagcctcgaaaagtcggtatctacaatgttggaaccggaaaagggagatcggttaaagaattcgttgaggcatgtaagaaggcgacaggagttgagatcaaagtagatttcttgcctcgacgaccgggagattacgcagaggtttacagtgatccaacaaagattttgaaagatttgaattggactgctcgattcactaatcttcaagatagtcttcaagttgcttggagatggcaaaaaattcatcctcatggatataattcttattaa

SEQ ID NO: 73337 - protein, 436 aa, Arabidopsis thaliana
  peptide (1)..(436): Ceres Seq. ID no. 4963752
  misc_feature (97)..(430): Pfam Name: NAD dependent epimerase/dehydratase family Pfam Description: NAD dependent epimerase/dehydratase family
  misc_feature (1)..(436): Homolog of NCBI NO: 15241503 NR Description: putative protein; protein id: At5g44480.1
  misc_feature (59)..(435): Homolog of NCBI NO: 15237098 NR Description: UDP-glucose 4-epimerase - like protein; protein
  misc_feature (46)..(433): Homolog of NCBI NO: 22329866 NR Description: UDP-galactose 4-epimerase-like protein; protein At1g30620.1, supported by cDNA: gi_13272474, supported by cDNA: [Arabidopsis thaliana] >gi|25292360|pir||E86431 T5I8.7 Strong
  misc_feature (46)..(433): Homolog of NCBI NO: 24417398 NR Description: unknown [Arabidopsis thaliana]
  misc_feature (46)..(435): Homolog of NCBI NO: 26106016 NR Description: UDP-galactose 4-epimerase-like protein [Oryza
  misc_feature (46)..(435): Homolog of NCBI NO: 27529690 NR Description: UDP-galactose 4-epimerase-like protein [Oryza
  misc_feature (59)..(435): Homolog of NCBI NO: 7437275 NR Description: probable UDPglucose 4-epimerase (EC 5.1.3.2)
  misc_feature (27)..(433): Homolog of NCBI NO: 25553524 NR Description: UDP-galactose 4-epimerase-like protein [Oryza
  misc_feature (46)..(433): Homolog of NCBI NO: 27260937 NR Description: OJ1417_E01.21 [Oryza sativa (japonica
  misc_feature (269)..(432): Homolog of NCBI NO: 5852089 NR Description: zwh12.1 [Oryza sativa (indica cultivar-group)]
MLNSSGVRTQRRSPRPLSLGGRKIITPTKFAYDHHNPDKVLDFVEMDCLEPKTKNNLTGKLLLVASLLILAIIVISQSSSFTSPSAFSQREEGVTHVLVTGGAGYIGSHAALRLLRDSYRVTIVDNLSRGNLGAVKTLQQLFPQTGRLQFIYADLGDPLAVEKIFSENAFDAVMHFAAVAYVGESTLYPLKYYHNITSNTLGVLEAMARHKVKKLIYSSTCATYGEPEKMPITEDTPQVPINPYGKAKKMAEDMILDFSKNSDMAVMILRYFNVIGSDPGGRLGEAPRPELREQGRISGACFDAARGFIPGLQVKGTDYKTSDGTCIRDYIDVTDLVDAHVKALEKAQPRKVGIYNVGTGKGRSVKEFVEACKKATGVEIKVDFLPRRPGDYAEVYSDPTKILKDLNWTARFTNLQDSLQVAWRWQKIHPHGYNSY

SEQ ID NO: 73338 - protein, 391 aa, Arabidopsis thaliana; identical to SEQ ID NO: 71137
  peptide (1)..(391): Ceres Seq. ID no. 4963753
  misc_feature (52)..(385): Pfam Name: NAD dependent epimerase/dehydratase family Pfam Description: NAD dependent epimerase/dehydratase family
  misc_feature (1)..(391): Homolog of NCBI NO: 15241503 NR Description: putative protein; protein id: At5g44480.1
  misc_feature (14)..(390): Homolog of NCBI NO: 15237098 NR Description: UDP-glucose 4-epimerase - like protein; protein
  misc_feature (1)..(388): Homolog of NCBI NO: 22329866 NR Description: UDP-galactose 4-epimerase-like protein; protein At1g30620.1, supported by cDNA: gi_13272474, supported by cDNA: [Arabidopsis thaliana] >gi|25292360|pir||E86431 T5I8.7 Strong
  misc_feature (1)..(388): Homolog of NCBI NO: 24417398 NR Description: unknown [Arabidopsis thaliana]
  misc_feature (1)..(390): Homolog of NCBI NO: 26106016 NR Description: UDP-galactose 4-epimerase-like protein [Oryza
  misc_feature (1)..(390): Homolog of NCBI NO: 27529690 NR Description: UDP-galactose 4-epimerase-like protein [Oryza
  misc_feature (14)..(390): Homolog of NCBI NO: 7437275 NR Description: probable UDPglucose 4-epimerase (EC 5.1.3.2)
  misc_feature (1)..(388): Homolog of NCBI NO: 25553524 NR Description: UDP-galactose 4-epimerase-like protein [Oryza
  misc_feature (1)..(388): Homolog of NCBI NO: 27260937 NR Description: OJ1417_E01.21 [Oryza sativa (japonica
  misc_feature (224)..(387): Homolog of NCBI NO: 5852089 NR Description: zwh12.1 [Oryza sativa (indica cultivar-group)]

SEQ ID NO: 73339 - protein, 263 aa, Arabidopsis thaliana; identical to SEQ ID NO: 71138
  peptide (1)..(263): Ceres Seq. ID no. 4963754
  misc_feature (1)..(257): Pfam Name: NAD dependent epimerase/dehydratase family Pfam Description: NAD dependent epimerase/dehydratase family
  misc_feature (1)..(263): Homolog of NCBI NO: 15241503 NR Description: putative protein; protein id: At5g44480.1
  misc_feature (1)..(262): Homolog of NCBI NO: 15237098 NR Description: UDP-glucose 4-epimerase - like protein; protein
  misc_feature (1)..(260): Homolog of NCBI NO: 22329866 NR Description: UDP-galactose 4-epimerase-like protein; protein At1g30620.1, supported by cDNA: gi_13272474, supported by cDNA: [Arabidopsis thaliana] >gi|25292360|pir||E86431 T5I8.7 Strong
  misc_feature (1)..(260): Homolog of NCBI NO: 24417398 NR Description: unknown [Arabidopsis thaliana]
  misc_feature (1)..(262): Homolog of NCBI NO: 26106016 NR Description: UDP-galactose 4-epimerase-like protein [Oryza
  misc_feature (1)..(262): Homolog of NCBI NO: 27529690 NR Description: UDP-galactose 4-epimerase-like protein [Oryza
  misc_feature (1)..(262): Homolog of NCBI NO: 7437275 NR Description: probable UDPglucose 4-epimerase (EC 5.1.3.2)
  misc_feature (1)..(260): Homolog of NCBI NO: 25553524 NR Description: UDP-galactose 4-epimerase-like protein [Oryza
  misc_feature (1)..(260): Homolog of NCBI NO: 27260937 NR Description: OJ1417_E01.21 [Oryza sativa (japonica
  misc_feature (96)..(259): Homolog of NCBI NO: 5852089 NR Description: zwh12.1 [Oryza sativa (indica cultivar-group)]

SEQ ID NO: 73340 - DNA, 819 bp, Arabidopsis thaliana
  misc_feature (1)..(819): Ceres Seq. ID no. 4963830
  misc_feature: MA Experiment ID: 20000185 Result: Up-regulated in Transcription
  misc_feature: MA Experiment 20000185 PARAMETER Experiment Name: At_Roots__P Parameter: Age (day) Value: 7 vs. 21
  misc_feature: MA Experiment 20000185 PARAMETER Experiment Name: At_Roots__P Parameter: Organism Value: A. thaliana
  misc_feature: MA Experiment 20000185 PARAMETER Experiment Name: At_Roots__P Parameter: Tissue Value: Roots vs. Whole Plant
  misc_feature: MA Experiment ID: 20000227 Result: Down-regulated in Transcription
  misc_feature: MA Experiment 20000227 PARAMETER Experiment Name: At_Root-Tips-vs-Tops_P Parameter: Tissue Value: Root Tips vs. Root Tops
  misc_feature: MA Experiment ID: 20000235 Result: Up-regulated in Transcription
  misc_feature: MA Experiment 20000235 PARAMETER Experiment Name: At_Siliques_P Parameter: Age (day) Value: 21
  misc_feature: MA Experiment 20000235 PARAMETER Experiment Name: At_Siliques_P Parameter: Organism Value: A. thaliana
  misc_feature: MA Experiment 20000235 PARAMETER Experiment Name: At_Siliques_P Parameter: Plant Line Value: WS
  misc_feature: MA Experiment 20000235 PARAMETER Experiment Name: At_Siliques_P Parameter: Tissue Value: 5-10mm Siliques vs. Whole Plant
  misc_feature: MA Experiment ID: 20000264 Result: Up-regulated in Transcription
  misc_feature: MA Experiment 20000264 PARAMETER Experiment Name: At_Open_Flower_P Parameter: Age (day) Value: 21
  misc_feature: MA Experiment 20000264 PARAMETER Experiment Name: At_Open_Flower_P Parameter: Plant Line Value: WS
  misc_feature: MA Experiment 20000264 PARAMETER Experiment Name: At_Open_Flower_P Parameter: Tissue Value: Open Flower vs. Whole Plant
  misc_feature: MA Experiment ID: 20000265 Result: Up-regulated in Transcription
  misc_feature: MA Experiment 20000265 PARAMETER Experiment Name: At_Open_Flower_P Parameter: Age (day) Value: 21
  misc_feature: MA Experiment 20000265 PARAMETER Experiment Name: At_Open_Flower_P Parameter: Plant Line Value: WS
  misc_feature: MA Experiment 20000265 PARAMETER Experiment Name: At_Open_Flower_P Parameter: Tissue Value: Closed Flower vs. Whole Plant
  misc_feature: MA Experiment ID: 20000286 Result: Up-regulated in Transcription
  misc_feature: MA Experiment 20000286 PARAMETER Experiment Name: At_Open_Flower_P Parameter: Age (day) Value: 21
  misc_feature: MA Experiment 20000286 PARAMETER Experiment Name: At_Open_Flower_P Parameter: Plant Line Value: WS
  misc_feature: MA Experiment 20000286 PARAMETER Experiment Name: At_Open_Flower_P Parameter: Tissue Value: Half Open vs. Whole Plant
  misc_feature: MA Experiment ID: 20000437 Result: Up-regulated in Transcription
  misc_feature: MA Experiment 20000437 PARAMETER Experiment Name: At_Drought_P Parameter: Age (day) Value: 8
  misc_feature: MA Experiment 20000437 PARAMETER Experiment Name: At_Drought_P Parameter: Organism Value: A. thaliana
  misc_feature: MA Experiment 20000437 PARAMETER Experiment Name: At_Drought_P Parameter: Plant Line Value: WS
  misc_feature: MA Experiment 20000437 PARAMETER Experiment Name: At_Drought_P Parameter: Timepoint (hr) Value: 24
  misc_feature: MA Experiment 20000437 PARAMETER Experiment Name: At_Drought_P Parameter: Tissue Value: Whole Plant
  misc_feature: MA Experiment 20000437 PARAMETER Experiment Name: At_Drought_P Parameter: Treatment Value: Drought vs. No Drought
  misc_feature: MA Experiment ID: 20000439 Result: Up-regulated in Transcription
  misc_feature: MA Experiment 20000439 PARAMETER Experiment Name: At_Roots__P Parameter: Age (day) Value: 14 vs. 21
  misc_feature: MA Experiment 20000439 PARAMETER Experiment Name: At_Roots__P Parameter: Organism Value: A. thaliana
  misc_feature: MA Experiment 20000439 PARAMETER Experiment Name: At_Roots__P Parameter: Tissue Value: Roots vs. Whole Plant
  misc_feature: MA Experiment ID: 20000495 Result: Up-regulated in Transcription
  misc_feature: MA Experiment 20000495 PARAMETER Experiment Name: At_Guard_Cells_P Parameter: Harvest Date Value: 8/2/2002
  misc_feature: MA Experiment 20000495 PARAMETER Experiment Name: At_Guard_Cells_P Parameter: Organism Value: A. thaliana
  misc_feature: MA Experiment 20000495 PARAMETER Experiment Name: At_Guard_Cells_P Parameter: Tissue Value: Guard Cells vs. Leaves
  misc_feature: MA Experiment ID: 20000496 Result: Up-regulated in Transcription
  misc_feature: MA Experiment 20000496 PARAMETER Experiment Name: At_Guard_Cells_P Parameter: Harvest Date Value: 7/19/2002
  misc_feature: MA Experiment 20000496 PARAMETER Experiment Name: At_Guard_Cells_P Parameter: Organism Value: Canola
  misc_feature: MA Experiment 20000496 PARAMETER Experiment Name: At_Guard_Cells_P Parameter: Tissue Value: Guard Cells vs. Leaves
  misc_feature: MA Experiment ID: 20000794 Result: Up-regulated in Transcription
  misc_feature: MA Experiment 20000794 PARAMETER Experiment Name: At_Petals_P Parameter: Age (day) Value: 23-25 days
  misc_feature: MA Experiment 20000794 PARAMETER Experiment Name: At_Petals_P Parameter: Plant Line Value: WS
  misc_feature: MA Experiment 20000794 PARAMETER Experiment Name: At_Petals_P Parameter: Tissue Value: Petals vs. Whole plant
  misc_feature: MA Experiment ID: 20001911 Result: Up-regulated in Transcription
  misc_feature: MA Experiment 20001911 PARAMETER Experiment Name: At_Drought_Reproduction_P Parameter: Age (day) Value: 40
  misc_feature: MA Experiment 20001911 PARAMETER Experiment Name: At_Drought_Reproduction_P Parameter: Organism Value: A. thaliana
  misc_feature: MA Experiment 20001911 PARAMETER Experiment Name: At_Drought_Reproduction_P Parameter: Plant Line Value: WS
  misc_feature: MA Experiment 20001911 PARAMETER Experiment Name: At_Drought_Reproduction_P Parameter: Timepoint (day) Value: 10
  misc_feature: MA Experiment 20001911 PARAMETER Experiment Name: At_Drought_Reproduction_P Parameter: Tissue Value: Flowers
  misc_feature: MA Experiment 20001911 PARAMETER Experiment Name: At_Drought_Reproduction_P Parameter: Treatment Value: Drought vs. No Drought
atgggagacgtatatttcaaccatttcgctcagcaactgcagatgtctgaccaagagaagggtgaaatgtcaagacattcacaccctcattcaatcaatgaagaatctgagtcgtcaactctggaaagggtagcagcagagtcattaacaaacaaagtccttgatagaggactaatggagtatggatgtccacattacagaagaaggtgttgcattagagctccttgctgtaatgagatctttggttgccatcactgtcattatgaggcgaagcagaacaacataaatgtagatcagaagcagaggcatgatattcctcgccaccaagttgaacaggttatttgtttactttgtggtactgaacaagaggtgggccaaatttgtatccactgtggagtgtgcatggggaagtacttctgtaaagtctgcaagctctacgatgatgataacggtcacccttgtgtcgaaggagcaatgcatcacgactgccccatttgctttgagtttctgtttgaatcacggaacgatgtgacggttttaccatgtggacacacaattcatcagaagtgcttggaggaaatgagagatcattaccaatatgcgtgcccactttgctcaaaatctgtatgcgacatgtcaaaagtgtgggagaagtttgacatggagattgcggctacaccaatgccagaaccataccagaacagaatggttcagattctctgcaacgactgtgggaagaaagcagaggtacagtaccatgtggtggctcagaaatgcccaaactgcaaatcatacaacactcgccaaaccagaggctga

SEQ ID NO: 73341 - protein, 272 aa, Arabidopsis thaliana
  peptide (1)..(272): Ceres Seq. ID no. 4963831
  misc_feature (63)..(147): Pfam Name: CHY zinc finger Pfam Description: CHY zinc finger
  misc_feature (1)..(272): Homolog of NCBI NO: 15239467 NR Description: putative protein; protein id: At5g25560.1
  misc_feature (128)..(272): Homolog of NCBI NO: 4105798 NR Description: PGPD14 [Petunia x hybrida]
  misc_feature (114)..(269): Homolog of NCBI NO: 34910658 NR Description: putative PGPD14 protein (pollen germination
  misc_feature (128)..(272): Homolog of NCBI NO: 37535002 NR Description: putative PGPD14 protein (pollen germination
  misc_feature (128)..(272): Homolog of NCBI NO: 15237169 NR Description: PGPD14 protein; protein id: At5g22920.1, by cDNA: 41666., supported by cDNA: gi_15450520 [Arabidopsis >gi|10177239|dbj|BAB10613.1| PGPD14 protein [Arabidopsis
  misc_feature (128)..(272): Homolog of NCBI NO: 21593716 NR Description: PGPD14 protein [Arabidopsis thaliana]
  misc_feature (12)..(205): Homolog of NCBI NO: 34910658 NR Description: putative PGPD14 protein (pollen germination
  misc_feature (114)..(268): Homolog of NCBI NO: 15238890 NR Description: putative protein; protein id: At5g18650.1, by cDNA: gi_17381207, supported by cDNA: gi_20465812 [Arabidopsis >gi|17381208|gb|AAL36416.1| unknown protein [Arabidopsis
  misc_feature (140)..(237): Homolog of NCBI NO: 15451615 NR Description: Hypothetical protein with similarity to PGPD14
  misc_feature (46)..(214): Homolog of NCBI NO: 4105798 NR Description: PGPD14 [Petunia x hybrida]
MGDVYFNHFAQQLQMSDQEKGEMSRHSHPHSINEESESSTLERVAAESLTNKVLDRGLMEYGCPHYRRRCCIRAPCCNEIFGCHHCHYEAKQNNINVDQKQRHDIPRHQVEQVICLLCGTEQEVGQICIHCGVCMGKYFCKVCKLYDDDNGHPCVEGAMHHDCPICFEFLFESRNDVTVLPCGHTIHQKCLEEMRDHYQYACPLCSKSVCDMSKVWEKFDMEIAATPMPEPYQNRMVQILCNDCGKKAEVQYHVVAQKCPNCKSYNTRQTRG

SEQ ID NO: 73342 - protein, 258 aa, Arabidopsis thaliana
  peptide (1)..(258): Ceres Seq. ID no. 4963832
  misc_feature (49)..(133): Pfam Name: CHY zinc finger Pfam Description: CHY zinc finger
  misc_feature (1)..(258): Homolog of NCBI NO: 15239467 NR Description: putative protein; protein id: At5g25560.1
  misc_feature (114)..(258): Homolog of NCBI NO: 4105798 NR Description: PGPD14 [Petunia x hybrida]
  misc_feature (100)..(255): Homolog of NCBI NO: 34910658 NR Description: putative PGPD14 protein (pollen germination
  misc_feature (114)..(258): Homolog of NCBI NO: 37535002 NR Description: putative PGPD14 protein (pollen germination
  misc_feature (114)..(258): Homolog of NCBI NO: 15237169 NR Description: PGPD14 protein; protein id: At5g22920.1, by cDNA: 41666., supported by cDNA: gi_15450520 [Arabidopsis >gi|10177239|dbj|BAB10613.1| PGPD14 protein [Arabidopsis
  misc_feature (114)..(258): Homolog of NCBI NO: 21593716 NR Description: PGPD14 protein [Arabidopsis thaliana]
  misc_feature (1)..(191): Homolog of NCBI NO: 34910658 NR Description: putative PGPD14 protein (pollen germination
  misc_feature (100)..(254): Homolog of NCBI NO: 15238890 NR Description: putative protein; protein id: At5g18650.1, by cDNA: gi_17381207, supported by cDNA: gi_20465812 [Arabidopsis >gi|17381208|gb|AAL36416.1| unknown protein [Arabidopsis
  misc_feature (126)..(223): Homolog of NCBI NO: 15451615 NR Description: Hypothetical protein with similarity to PGPD14
  misc_feature (32)..(200): Homolog of NCBI NO: 4105798 NR Description: PGPD14 [Petunia x hybrida]
MSDQEKGEMSRHSHPHSINEESESSTLERVAAESLTNKVLDRGLMEYGCPHYRRRCCIRAPCCNEIFGCHHCHYEAKQNNINVDQKQRHDIPRHQVEQVICLLCGTEQEVGQICIHCGVCMGKYFCKVCKLYDDDNGHPCVEGAMHHDCPICFEFLFESRNDVTVLPCGHTIHQKCLEEMRDHYQYACPLCSKSVCDMSKVWEKFDMEIAATPMPEPYQNRMVQILCNDCGKKAEVQYHVVAQKCPNCKSYNTRQTRG

SEQ ID NO: 73343 - protein, 250 aa, Arabidopsis thaliana
  peptide (1)..(250): Ceres Seq. ID no. 4963833
  misc_feature (41)..(125): Pfam Name: CHY zinc finger Pfam Description: CHY zinc finger
  misc_feature (1)..(250): Homolog of NCBI NO: 15239467 NR Description: putative protein; protein id: At5g25560.1
  misc_feature (106)..(250): Homolog of NCBI NO: 4105798 NR Description: PGPD14 [Petunia x hybrida]
  misc_feature (92)..(247): Homolog of NCBI NO: 34910658 NR Description: putative PGPD14 protein (pollen germination
  misc_feature (106)..(250): Homolog of NCBI NO: 37535002 NR Description: putative PGPD14 protein (pollen germination
  misc_feature (106)..(250): Homolog of NCBI NO: 15237169 NR Description: PGPD14 protein; protein id: At5g22920.1, by cDNA: 41666., supported by cDNA: gi_15450520 [Arabidopsis >gi|10177239|dbj|BAB10613.1| PGPD14 protein [Arabidopsis
  misc_feature (106)..(250): Homolog of NCBI NO: 21593716 NR Description: PGPD14 protein [Arabidopsis thaliana]
  misc_feature (1)..(183): Homolog of NCBI NO: 34910658 NR Description: putative PGPD14 protein (pollen germination
  misc_feature (92)..(246): Homolog of NCBI NO: 15238890 NR Description: putative protein; protein id: At5g18650.1, by cDNA: gi_17381207, supported by cDNA: gi_20465812 [Arabidopsis >gi|17381208|gb|AAL36416.1| unknown protein [Arabidopsis
  misc_feature (118)..(215): Homolog of NCBI NO: 15451615 NR Description: Hypothetical protein with similarity to PGPD14
  misc_feature (24)..(192): Homolog of NCBI NO: 4105798 NR Description: PGPD14 [Petunia x hybrida]
MSRHSHPHSINEESESSTLERVAAESLTNKVLDRGLMEYGCPHYRRRCCIRAPCCNEIFGCHHCHYEAKQNNINVDQKQRHDIPRHQVEQVICLLCGTEQEVGQICIHCGVCMGKYFCKVCKLYDDDNGHPCVEGAMHHDCPICFEFLFESRNDVTVLPCGHTIHQKCLEEMRDHYQYACPLCSKSVCDMSKVWEKFDMEIAATPMPEPYQNRMVQILCNDCGKKAEVQYHVVAQKCPNCKSYNTRQTRG

SEQ ID NO: 73344 - DNA, 957 bp, Arabidopsis thaliana
  misc_feature (1)..(957): Ceres Seq. ID no. 4963861
  misc_feature: MA Experiment ID: 20000169 Result: Up-regulated in Transcription
  misc_feature: MA Experiment 20000169 PARAMETER Experiment Name: At_100uM_ABA_P Parameter: Age (day) Value: 14
  misc_feature: MA Experiment 20000169 PARAMETER Experiment Name: At_100uM_ABA_P Parameter: Organism Value: A. thaliana
  misc_feature: MA Experiment 20000169 PARAMETER Experiment Name: At_100uM_ABA_P Parameter: Plant Line Value: WS
  misc_feature: MA Experiment 20000169 PARAMETER Experiment Name: At_100uM_ABA_P Parameter: Timepoint (hr) Value: 6
  misc_feature: MA Experiment 20000169 PARAMETER Experiment Name: At_100uM_ABA_P Parameter: Tissue Value: Aerial
  misc_feature: MA Experiment 20000169 PARAMETER Experiment Name: At_100uM_ABA_P Parameter: Treatment Value: 100uM ABA vs. No Treatment
  misc_feature: MA Experiment ID: 20000173 Result: Down-regulated in Transcription
  misc_feature: MA Experiment 20000173 PARAMETER Experiment Name: At_42deg_Heat_P Parameter: Age (day) Value: 14
  misc_feature: MA Experiment 20000173 PARAMETER Experiment Name: At_42deg_Heat_P Parameter: Organism Value: A. thaliana
  misc_feature: MA Experiment 20000173 PARAMETER Experiment Name: At_42deg_Heat_P Parameter: Plant Line Value: WS
  misc_feature: MA Experiment 20000173 PARAMETER Experiment Name: At_42deg_Heat_P Parameter: Temperature (deg C) Value: 42 vs. 22
  misc_feature: MA Experiment 20000173 PARAMETER Experiment Name: At_42deg_Heat_P Parameter: Timepoint (hr) Value: 6
  misc_feature: MA Experiment 20000173 PARAMETER Experiment Name: At_42deg_Heat_P Parameter: Tissue Value: Aerial
  misc_feature: MA Experiment ID: 20000179 Result: Up-regulated in Transcription
  misc_feature: MA Experiment 20000179 PARAMETER Experiment Name: At_Germinating_Seeds_P Parameter: Age (hr) Value: 6 vs. 0
  misc_feature: MA Experiment 20000179 PARAMETER Experiment Name: At_Germinating_Seeds_P Parameter: Tissue Value: Germinating Seeds
  misc_feature: MA Experiment ID: 20000180 Result: Up-regulated in Transcription
  misc_feature: MA Experiment 20000180 PARAMETER Experiment Name: At_Germinating_Seeds_P Parameter: Age (hr) Value: 24 vs. 0
  misc_feature: MA Experiment 20000180 PARAMETER Experiment Name: At_Germinating_Seeds_P Parameter: Tissue Value: Germinating Seeds
  misc_feature: MA Experiment ID: 20000182 Result: Up-regulated in Transcription
  misc_feature: MA Experiment 20000182 PARAMETER Experiment Name: At_2mM_SA_P Parameter: Age (day) Value: 14
  misc_feature: MA Experiment 20000182 PARAMETER Experiment Name: At_2mM_SA_P Parameter: Organism Value: A. thaliana
  misc_feature: MA Experiment 20000182 PARAMETER Experiment Name: At_2mM_SA_P Parameter: Plant Line Value: WS
  misc_feature: MA Experiment 20000182 PARAMETER Experiment Name: At_2mM_SA_P Parameter: Timepoint (hr) Value: 6
  misc_feature: MA Experiment 20000182 PARAMETER Experiment Name: At_2mM_SA_P Parameter: Tissue Value: Aerial
  misc_feature: MA Experiment 20000182 PARAMETER Experiment Name: At_2mM_SA_P Parameter: Treatment Value: 2mM SA vs. No Treatment
  misc_feature: MA Experiment ID: 20000184 Result: Down-regulated in Transcription
  misc_feature: MA Experiment 20000184 PARAMETER Experiment Name: At_Shoots__P Parameter: Age (day) Value: 7
  misc_feature: MA Experiment 20000184 PARAMETER Experiment Name: At_Shoots__P Parameter: Tissue Value: Shoots vs. Whole Plant
  misc_feature: MA Experiment ID: 20000185 Result: Up-regulated in Transcription
  misc_feature: MA Experiment 20000185 PARAMETER Experiment Name: At_Roots__P Parameter: Age (day) Value: 7 vs. 21
  misc_feature: MA Experiment 20000185 PARAMETER Experiment Name: At_Roots__P Parameter: Organism Value: A. thaliana
  misc_feature: MA Experiment 20000185 PARAMETER Experiment Name: At_Roots__P Parameter: Tissue Value: Roots vs. Whole Plant
  misc_feature: MA Experiment ID: 20000264 Result: Up-regulated in Transcription
  misc_feature: MA Experiment 20000264 PARAMETER Experiment Name: At_Open_Flower_P Parameter: Age (day) Value: 21
  misc_feature: MA Experiment 20000264 PARAMETER Experiment Name: At_Open_Flower_P Parameter: Plant Line Value: WS
  misc_feature: MA Experiment 20000264 PARAMETER Experiment Name: At_Open_Flower_P Parameter: Tissue Value: Open Flower vs. Whole Plant
  misc_feature: MA Experiment ID: 20000438 Result: Down-regulated in Transcription
  misc_feature: MA Experiment 20000438 PARAMETER Experiment Name: At_Shoots__P Parameter: Age (day) Value: 14
  misc_feature: MA Experiment 20000438 PARAMETER Experiment Name: At_Shoots__P Parameter: Tissue Value: Shoots vs. Whole Plant
  misc_feature: MA Experiment ID: 20000495 Result: Up-regulated in Transcription
  misc_feature: MA Experiment 20000495 PARAMETER Experiment Name: At_Guard_Cells_P Parameter: Harvest Date Value: 8/2/2002
  misc_feature: MA Experiment 20000495 PARAMETER Experiment Name: At_Guard_Cells_P Parameter: Organism Value: A. thaliana
  misc_feature: MA Experiment 20000495 PARAMETER Experiment Name: At_Guard_Cells_P Parameter: Tissue Value: Guard Cells vs. Leaves
  misc_feature: MA Experiment ID: 20000794 Result: Up-regulated in Transcription
  misc_feature: MA Experiment 20000794 PARAMETER Experiment Name: At_Petals_P Parameter: Age (day) Value: 23-25 days
  misc_feature: MA Experiment 20000794 PARAMETER Experiment Name: At_Petals_P Parameter: Plant Line Value: WS
  misc_feature: MA Experiment 20000794 PARAMETER Experiment Name: At_Petals_P Parameter: Tissue Value: Petals vs. Whole plant
  misc_feature: MA Experiment ID: 20001757 Result: Down-regulated in Transcription
  misc_feature: MA Experiment 20001757 PARAMETER Experiment Name: At_50mM_NH4NO3_L-to-H_P Parameter: Timepoint (hr) Value: 6
  misc_feature: MA Experiment 20001757 PARAMETER Experiment Name: At_50mM_NH4NO3_L-to-H_P Parameter: Tissue Value: Leaf
  misc_feature: MA Experiment 20001757 PARAMETER Experiment Name: At_50mM_NH4NO3_L-to-H_P Parameter: Treatment Value: 50mM NH4NO3 vs 100mM Mannitol
  misc_feature: MA Experiment ID: 20001904 Result: Up-regulated in Transcription
  misc_feature: MA Experiment 20001904 PARAMETER Experiment Name: At_Drought_Reproduction_P Parameter: Age (day) Value: 37
  misc_feature: MA Experiment 20001904 PARAMETER Experiment Name: At_Drought_Reproduction_P Parameter: Organism Value: A. thaliana
  misc_feature: MA Experiment 20001904 PARAMETER Experiment Name: At_Drought_Reproduction_P Parameter: Plant Line Value: WS
  misc_feature: MA Experiment 20001904 PARAMETER Experiment Name: At_Drought_Reproduction_P Parameter: Timepoint (day) Value: 7
  misc_feature: MA Experiment 20001904 PARAMETER Experiment Name: At_Drought_Reproduction_P Parameter: Tissue Value: Rosettes
  misc_feature: MA Experiment 20001904 PARAMETER Experiment Name: At_Drought_Reproduction_P Parameter: Treatment Value: Drought vs. No Drought
  misc_feature: MA Experiment ID: 20001905 Result: Up-regulated in Transcription
  misc_feature: MA Experiment 20001905 PARAMETER Experiment Name: At_Drought_Reproduction_P Parameter: Age (day) Value: 40
  misc_feature: MA Experiment 20001905 PARAMETER Experiment Name: At_Drought_Reproduction_P Parameter: Organism Value: A. thaliana
  misc_feature: MA Experiment 20001905 PARAMETER Experiment Name: At_Drought_Reproduction_P Parameter: Plant Line Value: WS
  misc_feature: MA Experiment 20001905 PARAMETER Experiment Name: At_Drought_Reproduction_P Parameter: Timepoint (day) Value: 10
  misc_feature: MA Experiment 20001905 PARAMETER Experiment Name: At_Drought_Reproduction_P Parameter: Tissue Value: Rosettes
  misc_feature: MA Experiment 20001905 PARAMETER Experiment Name: At_Drought_Reproduction_P Parameter: Treatment Value: Drought vs. No Drought
  misc_feature: MA Experiment ID: 20001906 Result: Up-regulated in Transcription
  misc_feature: MA Experiment 20001906 PARAMETER Experiment Name: At_Drought_Reproduction_P Parameter: Age (day) Value: 35
  misc_feature: MA Experiment 20001906 PARAMETER Experiment Name: At_Drought_Reproduction_P Parameter: Organism Value: A. thaliana
  misc_feature: MA Experiment 20001906 PARAMETER Experiment Name: At_Drought_Reproduction_P Parameter: Plant Line Value: WS
  misc_feature: MA Experiment 20001906 PARAMETER Experiment Name: At_Drought_Reproduction_P Parameter: Timepoint (day) Value: 5
  misc_feature: MA Experiment 20001906 PARAMETER Experiment Name: At_Drought_Reproduction_P Parameter: Tissue Value: Siliques
  misc_feature: MA Experiment 20001906 PARAMETER Experiment Name: At_Drought_Reproduction_P Parameter: Treatment Value: Drought vs. No Drought
  misc_feature: MA Experiment ID: 20001908 Result: Up-regulated in Transcription
  misc_feature: MA Experiment 20001908 PARAMETER Experiment Name: At_Drought_Reproduction_P Parameter: Age (day) Value: 40
  misc_feature: MA Experiment 20001908 PARAMETER Experiment Name: At_Drought_Reproduction_P Parameter: Organism Value: A. thaliana
  misc_feature: MA Experiment 20001908 PARAMETER Experiment Name: At_Drought_Reproduction_P Parameter: Plant Line Value: WS
  misc_feature: MA Experiment 20001908 PARAMETER Experiment Name: At_Drought_Reproduction_P Parameter: Timepoint (day) Value: 10
  misc_feature: MA Experiment 20001908 PARAMETER Experiment Name: At_Drought_Reproduction_P Parameter: Tissue Value: Siliques
  misc_feature: MA Experiment 20001908 PARAMETER Experiment Name: At_Drought_Reproduction_P Parameter: Treatment Value: Drought vs. No Drought
  misc_feature: MA Experiment ID: 20001911 Result: Up-regulated in Transcription
  misc_feature: MA Experiment 20001911 PARAMETER Experiment Name: At_Drought_Reproduction_P Parameter: Age (day) Value: 40
  misc_feature: MA Experiment 20001911 PARAMETER Experiment Name: At_Drought_Reproduction_P Parameter: Organism Value: A. thaliana
  misc_feature: MA Experiment 20001911 PARAMETER Experiment Name: At_Drought_Reproduction_P Parameter: Plant Line Value: WS
  misc_feature: MA Experiment 20001911 PARAMETER Experiment Name: At_Drought_Reproduction_P Parameter: Timepoint (day) Value: 10
  misc_feature: MA Experiment 20001911 PARAMETER Experiment Name: At_Drought_Reproduction_P Parameter: Tissue Value: Flowers
  misc_feature: MA Experiment 20001911 PARAMETER Experiment Name: At_Drought_Reproduction_P Parameter: Treatment Value: Drought vs. No Drought
atgcttaaagaagaaaacattcatttgcacactgaggattcagagcaagggaaattacctttgcttattttaagcttgaaagagagaagtgaagaaaaaaggccagcgattgtgtttatgcatggcacaaacacaaacaaagaatggttaaggccatggcttgaagcatatgcttcgcggggatatgtagccatcggtttagactctcgttaccacggtgaacgtgctgattgcaaaactgcatatcgagatgctcttatatcatcttggagaaatggaaacactatgccttttatctttgatactgtatgggatttgatcaaactagctgaatatcttactcagagggatgatatagacccgaaaaagataggaatcaccggtatttcgctaggagggatgcatgcttggtttgctgctgcagctgacactcgctattccgtggttgtcccattaatcggtgttcaggtgcttaacaagatagcagcaactatgaggcctattcttccttgtatgagtgagtatgaggatggtttcggttttagatgggcaatagagaatgatgagtgggaagcaagagtcaacagtatcaaacctttatttgaagaagcaaggattgatctcggaaagaacataatcgacaaagaactagtcgagaaggtgtggaacagaatagctcctggcctagcttcgaagtttgattcaccgtactcattaccagtgattgctccacggcctctttacatccttaacggcgcaaatgatcctcgatgtcctcttggcggactagaacttgcgttaaagagagctgaaaaggcgtataaggaaacagcttctcctggaaacttcaagttcaaagcagaagatggagttggacacgaagcgacgagtttcatgatcaaagaatcatcagactggtttgacaaattccttaaacaagaagatatgacaacttga

SEQ ID NO: 73345 - protein, 318 aa, Arabidopsis thaliana
  peptide (1)..(318): Ceres Seq. ID no. 4963862
  misc_feature (1)..(156): Homolog of NCBI NO: 30689997 NR Description: expressed protein [Arabidopsis thaliana] putative protein [Arabidopsis thaliana]
  misc_feature (180)..(318): Homolog of NCBI NO: 30689997 NR Description: expressed protein [Arabidopsis thaliana] putative protein [Arabidopsis thaliana]
  misc_feature (180)..(311): Homolog of NCBI NO: 34898368 NR Description: ESTs C19441(E10423),C99201(E10423) correspond to
  misc_feature (78)..(156): Homolog of NCBI NO: 34898368 NR Description: ESTs C19441(E10423),C99201(E10423) correspond to
  misc_feature (2)..(59): Homolog of NCBI NO: 34898368 NR Description: ESTs C19441(E10423),C99201(E10423) correspond to
  misc_feature (10)..(310): Homolog of NCBI NO: 27381386 NR Description: bll6275 [Bradyrhizobium japonicum]
MLKEENIHLHTEDSEQGKLPLLILSLKERSEEKRPAIVFMHGTNTNKEWLRPWLEAYASRGYVAIGLDSRYHGERADCKTAYRDALISSWRNGNTMPFIFDTVWDLIKLAEYLTQRDDIDPKKIGITGISLGGMHAWFAAAADTRYSVVVPLIGVQVLNKIAATMRPILPCMSEYEDGFGFRWAIENDEWEARVNSIKPLFEEARIDLGKNIIDKELVEKVWNRIAPGLASKFDSPYSLPVIAPRPLYILNGANDPRCPLGGLELALKRAEKAYKETASPGNFKFKAEDGVGHEATSFMIKESSDWFDKFLKQEDMTT

SEQ ID NO: 73346 - protein, 279 aa, Arabidopsis thaliana
  peptide (1)..(279): Ceres Seq. ID no. 4963863
  misc_feature (1)..(117): Homolog of NCBI NO: 30689997 NR Description: expressed protein [Arabidopsis thaliana] putative protein [Arabidopsis thaliana]
  misc_feature (141)..(279): Homolog of NCBI NO: 30689997 NR Description: expressed protein [Arabidopsis thaliana] putative protein [Arabidopsis thaliana]
  misc_feature (141)..(272): Homolog of NCBI NO: 34898368 NR Description: ESTs C19441(E10423),C99201(E10423) correspond to
  misc_feature (39)..(117): Homolog of NCBI NO: 34898368 NR Description: ESTs C19441(E10423),C99201(E10423) correspond to
  misc_feature (1)..(20): Homolog of NCBI NO: 34898368 NR Description: ESTs C19441(E10423),C99201(E10423) correspond to
  misc_feature (1)..(271): Homolog of NCBI NO: 27381386 NR Description: bll6275 [Bradyrhizobium japonicum]
MHGTNTNKEWLRPWLEAYASRGYVAIGLDSRYHGERADCKTAYRDALISSWRNGNTMPFIFDTVWDLIKLAEYLTQRDDIDPKKIGITGISLGGMHAWFAAAADTRYSVVVPLIGVQVLNKIAATMRPILPCMSEYEDGFGFRWAIENDEWEARVNSIKPLFEEARIDLGKNIIDKELVEKVWNRIAPGLASKFDSPYSLPVIAPRPLYILNGANDPRCPLGGLELALKRAEKAYKETASPGNFKFKAEDGVGHEATSFMIKESSDWFDKFLKQEDMTT

SEQ ID NO: 73347 - protein, 223 aa, Arabidopsis thaliana
  peptide (1)..(223): Ceres Seq. ID no. 4963864
  misc_feature (1)..(61): Homolog of NCBI NO: 30689997 NR Description: expressed protein [Arabidopsis thaliana] putative protein [Arabidopsis thaliana]
  misc_feature (85)..(223): Homolog of NCBI NO: 30689997 NR Description: expressed protein [Arabidopsis thaliana] putative protein [Arabidopsis thaliana]
  misc_feature (85)..(216): Homolog of NCBI NO: 34898368 NR Description: ESTs C19441(E10423),C99201(E10423) correspond to
  misc_feature (1)..(61): Homolog of NCBI NO: 34898368 NR Description: ESTs C19441(E10423),C99201(E10423) correspond to
  misc_feature (1)..(215): Homolog of NCBI NO: 27381386 NR Description: bll6275 [Bradyrhizobium japonicum]
MPFIFDTVWDLIKLAEYLTQRDDIDPKKIGITGISLGGMHAWFAAAADTRYSVVVPLIGVQVLNKIAATMRPILPCMSEYEDGFGFRWAIENDEWEARVNSIKPLFEEARIDLGKNIIDKELVEKVWNRIAPGLASKFDSPYSLPVIAPRPLYILNGANDPRCPLGGLELALKRAEKAYKETASPGNFKFKAEDGVGHEATSFMIKESSDWFDKFLKQEDMTT

SEQ ID NO: 73348 - DNA, 2679 bp, Arabidopsis thaliana
  misc_feature (1)..(2679): Ceres Seq. ID no. 4963955
  misc_feature: Pfam Name: Pkinase Pfam Description: Protein kinase domain
atggatagtccttgttggcttttgctgctgctattaggagcttttgccattattggttgtgttcaagctcaggatcaacaagagtttatcagtttggattgcgggttacccatgactgaaccgtcttcttatactgagtcagtaaccggactacggttctcgtctgatgctgaattcatccagactggtgaaagtggtaaaatccaggcgagtatggagaatgactaccttaagccgtacacgaggctgaggtattttccagaggagagaaggaactgctatagtttgagtgttgacaagaacaggaaatatttgatcagggctaggttcatttatgggaattacgatggtcgtaactctaacccgatatttgaactgcatctaggacctaatctgtgggcaactatagatttgcaaaagtttgtgaatggtacaatggaggagatccttcacactccaacatcaaactctttgaacgtttgtcttgttaagacagggacaactacacccttgatctcagccttggaattacggccattaggaaataattcttatctcacagatggttctttgaatcttttcgttcggatatatctcaacaagacagatggctttcttcggtacccggatgatatttatgatcgcagatggcataattactttatggtggatgattggacccaaattttcaccactctcgaagtgaccaatgataacaattatgaaccaccaaaaaaggctcttgcagcggctgccacgccttctaatgccagcgcgccattgacaatcagttggccaccagacaatcctggtgaccaatattacttgtacagccacttctctgagatacaagatttacagaccaatgataccagagaatttgacatattatgggatggagctgttgttgaagaaggtttcatccctccaaagttaggggtgactactatccataatctttctccagtgacatgcaaaggagaaaattgcatttaccagctaataaaaacctcgaggtcaactcttccttctctacttaacgctcttgaaatctacacagttatccaatttccacgaaatcaacttcacctgctaattctcacatccttgagctctacatcagtggttgctgttaaaaatatcgaagctgcctataaattgagtagaatcaggtggcaaggagatccttgcgtccctcaaaagtatgcgtgggatggtttgaactgtagcaacaacacagatgtttctaaacctccaagagtattatccttaaatttgtcttcgagcggtttaactggaatcattgcggccgcaattcaaaaccttacacatttagaaaaactggacttgtcaaataacacactaactggagtggtgccggaatttctagcccagatgaaatcgttggtgatcataaacttaagcggcaacaatcttagtggtccccttcctcaaggtcttcgaagagagggactagaattactagttcaaggcaacccaaggctttgtctctctggttcctgcacagaaaaaaactcgaagaagaaattcccggtggtgattgttgcatcagttgcttctgtggccataattgttgctgtgttggttattatttttgttctcagtaagaaaaagtcatctactgtgggagctctacaacctccactgagtatgccaatggttcatgataattcacctgaaccatcaatcgagacgaaaaagagaaggtttacttattcagaggttatcaaaatgacgaataattttcaaagagttgtaggggaaggaggattcggtgttgtttgtcatggtactataaatggttctgaacaggtggctgttaaagttctctctcaatcatcaagtcaaggatataagcattttaaggcagaggttgatcttcttctacgagttcaccatacaaatttggtgagtcttgttggatattgcgatgaaagagatcacttggctctcatctatgagtttttgcccaagggagacttaagacaacatctatctggaaaaagcggtgggtcctttatcaactggggtaatcgtctacgaatagctctggaggctgcactaggattggaatatctacattctggatgcacaccaccaattgtacatagagatataaaaacgacaaacatattgctggacgaacagttaaaggccaagcttgccgatttcggcctttcgagatctttccctattggaggtgaaacacatatttcaactgtggttgctggtactcctggataccttgatcctgaatattaccagacaactcgactgggtgagaagagcgatgtgtacagcttcggaattgtgttattggagattatcacaaaccaacctgtgattgaccagtcccgttcaaagtctcacatatcacaatgggttggatttgagcttacccgaggagatattactaagatcatggatccaaacctgaacggggattacgaatctcgttctgtatggagagttcttgaactggcaatgtcgtgtgcgaatccttcttctgtgaaccgaccaaacatgtcccaagttgctaatgaactgaaagaatgtcttgtttctgaaaacttgagggaaaatatgaatatggactctcagaattctcttaaagtgagcatgagctttgacacagagttgtttccgagggcaaggtag

SEQ ID NO: 73349 - protein, 892 aa, Arabidopsis thaliana
  peptide (1)..(892): Ceres Seq. ID no. 4963956
  misc_feature: Pfam Name: Pkinase Pfam Description: Protein kinase domain
  misc_feature (7)..(892): Homolog of NCBI NO: 15231403 NR Description: receptor-like protein kinase homolog; protein id:
  misc_feature (1)..(537): Homolog of NCBI NO: 15231428 NR Description: hypothetical protein; protein id: At3g46420.1
  misc_feature (582)..(892): Homolog of NCBI NO: 15231428 NR Description: hypothetical protein; protein id: At3g46420.1
  misc_feature (9)..(892): Homolog of NCBI NO: 9294681 NR Description: receptor-like protein kinase [Arabidopsis
  misc_feature (7)..(892): Homolog of NCBI NO: 15227017 NR Description: putative receptor-like protein kinase; protein id:
  misc_feature (7)..(487): Homolog of NCBI NO: 15222436 NR Description: protein kinase, putative; protein id: At1g07560.1
  misc_feature (445)..(892): Homolog of NCBI NO: 15222436 NR Description: protein kinase, putative; protein id: At1g07560.1
  misc_feature (10)..(892): Homolog of NCBI NO: 25387148 NR Description: probable protein kinase [imported] - Arabidopsis >gi|9802795|gb|AAF99864.1|AC015448_14 Putative protein kinase
  misc_feature (69)..(892): Homolog of NCBI NO: 15227007 NR Description: putative receptor-like protein kinase; protein id:
  misc_feature (3)..(892): Homolog of NCBI NO: 39104601 NR Description: unknown protein [Arabidopsis thaliana]
MDSPCWLLLLLLGAFAIIGCVQAQDQQEFISLDCGLPMTEPSSYTESVTGLRFSSDAEFIQTGESGKIQASMENDYLKPYTRLRYFPEERRNCYSLSVDKNRKYLIRARFIYGNYDGRNSNPIFELHLGPNLWATIDLQKFVNGTMEEILHTPTSNSLNVCLVKTGTTTPLISALELRPLGNNSYLTDGSLNLFVRIYLNKTDGFLRYPDDIYDRRWHNYFMVDDWTQIFTTLEVTNDNNYEPPKKALAAAATPSNASAPLTISWPPDNPGDQYYLYSHFSEIQDLQTNDTREFDILWDGAVVEEGFIPPKLGVTTIHNLSPVTCKGENCIYQLIKTSRSTLPSLLNALEIYTVIQFPRNQLHLLILTSLSSTSVVAVKNIEAAYKLSRIRWQGDPCVPQKYAWDGLNCSNNTDVSKPPRVLSLNLSSSGLTGIIAAAIQNLTHLEKLDLSNNTLTGVVPEFLAQMKSLVIINLSGNNLSGPLPQGLRREGLELLVQGNPRLCLSGSCTEKNSKKKFPVVIVASVASVAIIVAVLVIIFVLSKKKSSTVGALQPPLSMPMVHDNSPEPSIETKKRRFTYSEVIKMTNNFQRVVGEGGFGVVCHGTINGSEQVAVKVLSQSSSQGYKHFKAEVDLLLRVHHTNLVSLVGYCDERDHLALIYEFLPKGDLRQHLSGKSGGSFINWGNRLRIALEAALGLEYLHSGCTPPIVHRDIKTTNILLDEQLKAKLADFGLSRSFPIGGETHISTVVAGTPGYLDPEYYQTTRLGEKSDVYSFGIVLLEIITNQPVIDQSRSKSHISQWVGFELTRGDITKIMDPNLNGDYESRSVWRVLELAMSCANPSSVNRPNMSQVANELKECLVSENLRENMNMDSQNSLKVSMSFDTELFPRAR

SEQ ID NO: 73350 - protein, 855 aa, Arabidopsis thaliana
  peptide (1)..(855): Ceres Seq. ID no. 4963957
  misc_feature: Pfam Name: Pkinase Pfam Description: Protein kinase domain
  misc_feature (1)..(855): Homolog of NCBI NO: 15231403 NR Description: receptor-like protein kinase homolog; protein id:
  misc_feature (1)..(500): Homolog of NCBI NO: 15231428 NR Description: hypothetical protein; protein id: At3g46420.1
  misc_feature (545)..(855): Homolog of NCBI NO: 15231428 NR Description: hypothetical protein; protein id: At3g46420.1
  misc_feature (1)..(855): Homolog of NCBI NO: 9294681 NR Description: receptor-like protein kinase [Arabidopsis
  misc_feature (1)..(855): Homolog of NCBI NO: 15227017 NR Description: putative receptor-like protein kinase; protein id:
  misc_feature (1)..(450): Homolog of NCBI NO: 15222436 NR Description: protein kinase, putative; protein id: At1g07560.1
  misc_feature (408)..(855): Homolog of NCBI NO: 15222436 NR Description: protein kinase, putative; protein id: At1g07560.1
  misc_feature (1)..(855): Homolog of NCBI NO: 25387148 NR Description: probable protein kinase [imported] - Arabidopsis >gi|9802795|gb|AAF99864.1|AC015448_14 Putative protein kinase
  misc_feature (32)..(855): Homolog of NCBI NO: 15227007 NR Description: putative receptor-like protein kinase; protein id:
  misc_feature (1)..(855): Homolog of NCBI NO: 39104601 NR Description: unknown protein [Arabidopsis thaliana]
MTEPSSYTESVTGLRFSSDAEFIQTGESGKIQASMENDYLKPYTRLRYFPEERRNCYSLSVDKNRKYLIRARFIYGNYDGRNSNPIFELHLGPNLWATIDLQKFVNGTMEEILHTPTSNSLNVCLVKTGTTTPLISALELRPLGNNSYLTDGSLNLFVRIYLNKTDGFLRYPDDIYDRRWHNYFMVDDWTQIFTTLEVTNDNNYEPPKKALAAAATPSNASAPLTISWPPDNPGDQYYLYSHFSEIQDLQTNDTREFDILWDGAVVEEGFIPPKLGVTTIHNLSPVTCKGENCIYQLIKTSRSTLPSLLNALEIYTVIQFPRNQLHLLILTSLSSTSVVAVKNIEAAYKLSRIRWQGDPCVPQKYAWDGLNCSNNTDVSKPPRVLSLNLSSSGLTGIIAAAIQNLTHLEKLDLSNNTLTGVVPEFLAQMKSLVIINLSGNNLSGPLPQGLRREGLELLVQGNPRLCLSGSCTEKNSKKKFPVVIVASVASVAIIVAVLVIIFVLSKKKSSTVGALQPPLSMPMVHDNSPEPSIETKKRRFTYSEVIKMTNNFQRVVGEGGFGVVCHGTINGSEQVAVKVLSQSSSQGYKHFKAEVDLLLRVHHTNLVSLVGYCDERDHLALIYEFLPKGDLRQHLSGKSGGSFINWGNRLRIALEAALGLEYLHSGCTPPIVHRDIKTTNILLDEQLKAKLADFGLSRSFPIGGETHISTVVAGTPGYLDPEYYQTTRLGEKSDVYSFGIVLLEIITNQPVIDQSRSKSHISQWVGFELTRGDITKIMDPNLNGDYESRSVWRVLELAMSCANPSSVNRPNMSQVANELKECLVSENLRENMNMDSQNSLKVSMSFDTELFPRAR

SEQ ID NO: 73351 - protein, 821 aa, Arabidopsis thaliana
  peptide (1)..(821): Ceres Seq. ID no. 4963958
  misc_feature: Pfam Name: Pkinase Pfam Description: Protein kinase domain
  misc_feature (1)..(821): Homolog of NCBI NO: 15231403 NR Description: receptor-like protein kinase homolog; protein id:
  misc_feature (1)..(466): Homolog of NCBI NO: 15231428 NR Description: hypothetical protein; protein id: At3g46420.1
  misc_feature (511)..(821): Homolog of NCBI NO: 15231428 NR Description: hypothetical protein; protein id: At3g46420.1
  misc_feature (1)..(821): Homolog of NCBI NO: 9294681 NR Description: receptor-like protein kinase [Arabidopsis
  misc_feature (1)..(821): Homolog of NCBI NO: 15227017 NR Description: putative receptor-like protein kinase; protein id:
  misc_feature (1)..(416): Homolog of NCBI NO: 15222436 NR Description: protein kinase, putative; protein id: At1g07560.1
  misc_feature (374)..(821): Homolog of NCBI NO: 15222436 NR Description: protein kinase, putative; protein id: At1g07560.1
  misc_feature (1)..(821): Homolog of NCBI NO: 25387148 NR Description: probable protein kinase [imported] - Arabidopsis >gi|9802795|gb|AAF99864.1|AC015448_14 Putative protein kinase
  misc_feature (1)..(821): Homolog of NCBI NO: 15227007 NR Description: putative receptor-like protein kinase; protein id:
  misc_feature (1)..(821): Homolog of NCBI NO: 39104601 NR Description: unknown protein [Arabidopsis thaliana]
MENDYLKPYTRLRYFPEERRNCYSLSVDKNRKYLIRARFIYGNYDGRNSNPIFELHLGPNLWATIDLQKFVNGTMEEILHTPTSNSLNVCLVKTGTTTPLISALELRPLGNNSYLTDGSLNLFVRIYLNKTDGFLRYPDDIYDRRWHNYFMVDDWTQIFTTLEVTNDNNYEPPKKALAAAATPSNASAPLTISWPPDNPGDQYYLYSHFSEIQDLQTNDTREFDILWDGAVVEEGFIPPKLGVTTIHNLSPVTCKGENCIYQLIKTSRSTLPSLLNALEIYTVIQFPRNQLHLLILTSLSSTSVVAVKNIEAAYKLSRIRWQGDPCVPQKYAWDGLNCSNNTDVSKPPRVLSLNLSSSGLTGIIAAAIQNLTHLEKLDLSNNTLTGVVPEFLAQMKSLVIINLSGNNLSGPLPQGLRREGLELLVQGNPRLCLSGSCTEKNSKKKFPVVIVASVASVAIIVAVLVIIFVLSKKKSSTVGALQPPLSMPMVHDNSPEPSIETKKRRFTYSEVIKMTNNFQRVVGEGGFGVVCHGTINGSEQVAVKVLSQSSSQGYKHFKAEVDLLLRVHHTNLVSLVGYCDERDHLALIYEFLPKGDLRQHLSGKSGGSFINWGNRLRIALEAALGLEYLHSGCTPPIVHRDIKTTNILLDEQLKAKLADFGLSRSFPIGGETHISTVVAGTPGYLDPEYYQTTRLGEKSDVYSFGIVLLEIITNQPVIDQSRSKSHISQWVGFELTRGDITKIMDPNLNGDYESRSVWRVLELAMSCANPSSVNRPNMSQVANELKECLVSENLRENMNMDSQNSLKVSMSFDTELFPRAR

SEQ ID NO: 73352 - DNA, 2649 bp, Arabidopsis thaliana
  misc_feature (1)..(2649): Ceres Seq. ID no. 4963967
  misc_feature: MA Experiment ID: 20000166 Result: Down-regulated in Transcription
  misc_feature: MA Experiment 20000166 PARAMETER Experiment Name: At_100uM_ABA_P Parameter: Age (day) Value: 14
  misc_feature: MA Experiment 20000166 PARAMETER Experiment Name: At_100uM_ABA_P Parameter: Organism Value: A. thaliana
  misc_feature: MA Experiment 20000166 PARAMETER Experiment Name: At_100uM_ABA_P Parameter: Plant Line Value: WS
  misc_feature: MA Experiment 20000166 PARAMETER Experiment Name: At_100uM_ABA_P Parameter: Timepoint (hr) Value: 1
  misc_feature: MA Experiment 20000166 PARAMETER Experiment Name: At_100uM_ABA_P Parameter: Tissue Value: Aerial
  misc_feature: MA Experiment 20000166 PARAMETER Experiment Name: At_100uM_ABA_P Parameter: Treatment Value: 100uM ABA vs. No Treatment
  misc_feature: MA Experiment ID: 20000179 Result: Up-regulated in Transcription
  misc_feature: MA Experiment 20000179 PARAMETER Experiment Name: At_Germinating_Seeds_P Parameter: Age (hr) Value: 6 vs. 0
  misc_feature: MA Experiment 20000179 PARAMETER Experiment Name: At_Germinating_Seeds_P Parameter: Tissue Value: Germinating Seeds
  misc_feature: MA Experiment ID: 20000180 Result: Up-regulated in Transcription
  misc_feature: MA Experiment 20000180 PARAMETER Experiment Name: At_Germinating_Seeds_P Parameter: Age (hr) Value: 24 vs. 0
  misc_feature: MA Experiment 20000180 PARAMETER Experiment Name: At_Germinating_Seeds_P Parameter: Tissue Value: Germinating Seeds
  misc_feature: MA Experiment ID: 20000185 Result: Up-regulated in Transcription
  misc_feature: MA Experiment 20000185 PARAMETER Experiment Name: At_Roots__P Parameter: Age (day) Value: 7 vs. 21
  misc_feature: MA Experiment 20000185 PARAMETER Experiment Name: At_Roots__P Parameter: Organism Value: A. thaliana
  misc_feature: MA Experiment 20000185 PARAMETER Experiment Name: At_Roots__P Parameter: Tissue Value: Roots vs. Whole Plant
  misc_feature: MA Experiment ID: 20000235 Result: Down-regulated in Transcription
  misc_feature: MA Experiment 20000235 PARAMETER Experiment Name: At_Siliques_P Parameter: Age (day) Value: 21
  misc_feature: MA Experiment 20000235 PARAMETER Experiment Name: At_Siliques_P Parameter: Organism Value: A. thaliana
  misc_feature: MA Experiment 20000235 PARAMETER Experiment Name: At_Siliques_P Parameter: Plant Line Value: WS
  misc_feature: MA Experiment 20000235 PARAMETER Experiment Name: At_Siliques_P Parameter: Tissue Value: 5-10mm Siliques vs. Whole Plant
  misc_feature: MA Experiment ID: 20000439 Result: Up-regulated in Transcription
  misc_feature: MA Experiment 20000439 PARAMETER Experiment Name: At_Roots__P Parameter: Age (day) Value: 14 vs. 21
  misc_feature: MA Experiment 20000439 PARAMETER Experiment Name: At_Roots__P Parameter: Organism Value: A. thaliana
  misc_feature: MA Experiment 20000439 PARAMETER Experiment Name: At_Roots__P Parameter: Tissue Value: Roots vs. Whole Plant
  misc_feature: MA Experiment ID: 20000460 Result: Down-regulated in Transcription
  misc_feature: MA Experiment 20000460 PARAMETER Experiment Name: At_10percent_PEG_P Parameter: Age (day) Value: 12
  misc_feature: MA Experiment 20000460 PARAMETER Experiment Name: At_10percent_PEG_P Parameter: Organism Value: A. thaliana
  misc_feature: MA Experiment 20000460 PARAMETER Experiment Name: At_10percent_PEG_P Parameter: Plant Line Value: WS
  misc_feature: MA Experiment 20000460 PARAMETER Experiment Name: At_10percent_PEG_P Parameter: Timepoint (day) Value: 12
  misc_feature: MA Experiment 20000460 PARAMETER Experiment Name: At_10percent_PEG_P Parameter: Tissue Value: Whole Plant
  misc_feature: MA Experiment 20000460 PARAMETER Experiment Name: At_10percent_PEG_P Parameter: Treatment Value: 10percent PEG vs. No Treatment
  misc_feature: MA Experiment ID: 20001451 Result: Up-regulated in Transcription
  misc_feature: MA Experiment 20001451 PARAMETER Experiment Name: At_Far-red-induction_P Parameter: Age (day) Value: 7
  misc_feature: MA Experiment 20001451 PARAMETER Experiment Name: At_Far-red-induction_P Parameter: Light Value: Far-red vs. White
  misc_feature: MA Experiment 20001451 PARAMETER Experiment Name: At_Far-red-induction_P Parameter: Organism Value: A. thaliana
  misc_feature: MA Experiment 20001451 PARAMETER Experiment Name: At_Far-red-induction_P Parameter: Plant Line Value: Columbia
  misc_feature: MA Experiment 20001451 PARAMETER Experiment Name: At_Far-red-induction_P Parameter: Timepoint (hr) Value: 24
  misc_feature: MA Experiment 20001451 PARAMETER Experiment Name: At_Far-red-induction_P Parameter: Tissue Value: Whole Plant
  misc_feature: MA Experiment ID: 20001554 Result: Down-regulated in Transcription
  misc_feature: MA Experiment 20001554 PARAMETER Experiment Name: At_Drought_Soil_Dry_P Parameter: Age (day) Value: 21
  misc_feature: MA Experiment 20001554 PARAMETER Experiment Name: At_Drought_Soil_Dry_P Parameter: Organism Value: A. thaliana
  misc_feature: MA Experiment 20001554 PARAMETER Experiment Name: At_Drought_Soil_Dry_P Parameter: Plant Line Value: WS
  misc_feature: MA Experiment 20001554 PARAMETER Experiment Name: At_Drought_Soil_Dry_P Parameter: Post Timepoint (hr) Value: None
  misc_feature: MA Experiment 20001554 PARAMETER Experiment Name: At_Drought_Soil_Dry_P Parameter: Post-Treatment Value: None
  misc_feature: MA Experiment 20001554 PARAMETER Experiment Name: At_Drought_Soil_Dry_P Parameter: Timepoint (day) Value: 7
  misc_feature: MA Experiment 20001554 PARAMETER Experiment Name: At_Drought_Soil_Dry_P Parameter: Treatment Value: Drought vs. No Drought
  misc_feature: MA Experiment ID: 20001555 Result: Down-regulated in Transcription
  misc_feature: MA Experiment 20001555 PARAMETER Experiment Name: At_Drought_Soil_Dry_P Parameter: Age (day) Value: 24
  misc_feature: MA Experiment 20001555 PARAMETER Experiment Name: At_Drought_Soil_Dry_P Parameter: Organism Value: A. thaliana
  misc_feature: MA Experiment 20001555 PARAMETER Experiment Name: At_Drought_Soil_Dry_P Parameter: Plant Line Value: WS
  misc_feature: MA Experiment 20001555 PARAMETER Experiment Name: At_Drought_Soil_Dry_P Parameter: Post Timepoint (hr) Value: None
  misc_feature: MA Experiment 20001555 PARAMETER Experiment Name: At_Drought_Soil_Dry_P Parameter: Post-Treatment Value: None
  misc_feature: MA Experiment 20001555 PARAMETER Experiment Name: At_Drought_Soil_Dry_P Parameter: Timepoint (day) Value: 10
  misc_feature: MA Experiment 20001555 PARAMETER Experiment Name: At_Drought_Soil_Dry_P Parameter: Treatment Value: Drought vs. No Drought
  misc_feature: MA Experiment ID: 20001556 Result: Down-regulated in Transcription
  misc_feature: MA Experiment 20001556 PARAMETER Experiment Name: At_Drought_Soil_Dry_P Parameter: Age (day) Value: 26
  misc_feature: MA Experiment 20001556 PARAMETER Experiment Name: At_Drought_Soil_Dry_P Parameter: Organism Value: A. thaliana
  misc_feature: MA Experiment 20001556 PARAMETER Experiment Name: At_Drought_Soil_Dry_P Parameter: Plant Line Value: WS
  misc_feature: MA Experiment 20001556 PARAMETER Experiment Name: At_Drought_Soil_Dry_P Parameter: Post Timepoint (hr) Value: None
  misc_feature: MA Experiment 20001556 PARAMETER Experiment Name: At_Drought_Soil_Dry_P Parameter: Post-Treatment Value: None
  misc_feature: MA Experiment 20001556 PARAMETER Experiment Name: At_Drought_Soil_Dry_P Parameter: Timepoint (day) Value: 12
  misc_feature: MA Experiment 20001556 PARAMETER Experiment Name: At_Drought_Soil_Dry_P Parameter: Treatment Value: Drought vs. No Drought
  misc_feature: MA Experiment ID: 20001560 Result: Down-regulated in Transcription
  misc_feature: MA Experiment 20001560 PARAMETER Experiment Name: At_Drought_Soil_Dry_P Parameter: Age (day) Value: 28
  misc_feature: MA Experiment 20001560 PARAMETER Experiment Name: At_Drought_Soil_Dry_P Parameter: Organism Value: A. thaliana
  misc_feature: MA Experiment 20001560 PARAMETER Experiment Name: At_Drought_Soil_Dry_P Parameter: Plant Line Value: WS
  misc_feature: MA Experiment 20001560 PARAMETER Experiment Name: At_Drought_Soil_Dry_P Parameter: Post Timepoint (hr) Value: None
  misc_feature: MA Experiment 20001560 PARAMETER Experiment Name: At_Drought_Soil_Dry_P Parameter: Post-Treatment Value: None
  misc_feature: MA Experiment 20001560 PARAMETER Experiment Name: At_Drought_Soil_Dry_P Parameter: Timepoint (day) Value: 14
  misc_feature: MA Experiment 20001560 PARAMETER Experiment Name: At_Drought_Soil_Dry_P Parameter: Treatment Value: Drought vs. No Drought
  misc_feature: MA Experiment ID: 20001757 Result: Up-regulated in Transcription
  misc_feature: MA Experiment 20001757 PARAMETER Experiment Name: At_50mM_NH4NO3_L-to-H_P Parameter: Timepoint (hr) Value: 6
  misc_feature: MA Experiment 20001757 PARAMETER Experiment Name: At_50mM_NH4NO3_L-to-H_P Parameter: Tissue Value: Leaf
  misc_feature: MA Experiment 20001757 PARAMETER Experiment Name: At_50mM_NH4NO3_L-to-H_P Parameter: Treatment Value: 50mM NH4NO3 vs 100mM Mannitol
  misc_feature: MA Experiment ID: 20001904 Result: Down-regulated in Transcription
  misc_feature: MA Experiment 20001904 PARAMETER Experiment Name: At_Drought_Reproduction_P Parameter: Age (day) Value: 37
  misc_feature: MA Experiment 20001904 PARAMETER Experiment Name: At_Drought_Reproduction_P Parameter: Organism Value: A. thaliana
  misc_feature: MA Experiment 20001904 PARAMETER Experiment Name: At_Drought_Reproduction_P Parameter: Plant Line Value: WS
  misc_feature: MA Experiment 20001904 PARAMETER Experiment Name: At_Drought_Reproduction_P Parameter: Timepoint (day) Value: 7
  misc_feature: MA Experiment 20001904 PARAMETER Experiment Name: At_Drought_Reproduction_P Parameter: Tissue Value: Rosettes
  misc_feature: MA Experiment 20001904 PARAMETER Experiment Name: At_Drought_Reproduction_P Parameter: Treatment Value: Drought vs. No Drought
  misc_feature: Pfam Name: Pkinase Pfam Description: Protein kinase domain
atggagaggtctcttgagctcttgttgctccttatcagaactttggccatcattcatatttctcaagctcaaagccaacaagggttcatcagtttggattgtggtctacccgcgaatgaaccatctccttatacagagccgaggactggattgcagttttcttcggacgcagcattcatccagagtggaaaaattggtaggattcaagcaaatctggaggctgacttcctgaagccatcaacgacgatgagatattttccagacggaaaacggaactgctacaatctaaacgttgagaagggaagaaatcatcttatcagggctcggtttgtatatggaaattatgatggtcgtgacactggccccaagtttgatctgtatcttggacctaatccatgggccacgatagatttggcaaaacaagtgaatggtacacgtcccgagatcatgcacatcccaacatcaaacaagttgcaggtttgtcttgttaagactggggaaactacaccgctaatatcggttttggaagtacggccgatgggaagtggtacttatctcaccaagtctggctctctgaaactttactatcgagaatattttagcaagtctgattcttctctaaggtaccctgatgatatctatgaccgccaatggacttcgttctttgatacagagtggacacaaattaacaccactagcgatgtgggaaattccaatgactataagccaccaaaagtcgctctcactactgcggccattccaactaatgccagtgcgccattgacgaatgaatggagttcagtaaaccccgatgaacagtattacgtatacgcccatttttctgagatccaagagttgcaggcaaatgaaaccagggaattcaacatgttactaaatgggaaacttttttttggccctgtggttcctccaaagctagcaataagtactatcctaagtgtgtcgccgaatacttgtgaaggaggggagtgcaatttacagctgataagaaccaacagatcaactcttccacctctacttaacgcttatgaggtctacaaagttattcagtttccgcagttggaaacaaatgaaaccgacgtttctgctgtgaaaaacatccaagccacctatgaattgagtagaatcaactggcaaagcgatccatgcgtccctcaacagtttatgtgggatggtttaaactgcagcatcacagatataaccacgccaccaagaatcactactttaaacttgtcatcaagtggtttaactggaacgataacagctgccattcaaaatcttacgacactagaaaagctggacttgtcgaataataacttgaccggagaggtgccagaatttctaagcaacatgaaatcgctgttggtcataaacttaagcgggaacgatcttaacggtacaattcctcaatctctacaaaggaaaggacttgagctactttatcaaggaaaccccaggcttatttcccctggttcaactgaaaccaaatctggcaagagctttccagtaacaatagttgcatcagttggttctgcagccattcttattgttgtgctggttcttgtactttttctccgaaagaaaaagccgtcggctgttgaagttgttctcccgcgtccaagtaggccaacgatgaatgttccttatgctaactcacctgagccgtcaatcgagatgaaaaagagaaagtttacttattcagaggttacgaaaatgactaataatttcggaagagttgtaggggaaggaggatttggcgttgtctgccatggtactgtaaatggttctgaacaggtggctgttaaactactttcacaatcatcaactcaaggctataaagagttcaaggcagaggttgatcttcttctgagagttcaccatacgaatttggtaagccttgtcggatattgtgatgaaggagaccacttggcccttatctacgagtttgtacccaatggagacttaagacaacatttgtctggaaaaggaggtaaacccatcgtcaattggggtactcggctaagaatagcggcggaggcagcactaggtttggagtacttacacattggatgcacaccaccaatggttcatagagatgtcaaaactacaaacatattgctggacgagcattataaggccaaacttgctgattttgggctctcgagatctttccctgttggaggtgaatctcatgtttcgacggtgattgctggtactcctggttaccttgatccagatcggttgagtgagaaaagtgatgtttacagtttcgggattgttttattagagatgatcacaaaccaagcagtgattgatcgaaaccgcagaaagtctcacataacacaatgggtagggtctgagcttaacggaggagatattgctaagatcatggatctaaagcttaacggtgattatgattctcgttctgcgtggagagctcttgagctagcaatgtcgtgcgcggatcctacctcagcaagacgaccaaccatgtctcatgttgttattgaactaaaagagtgtctcgtgtctgaaaactcgaggagaaatatgagtcgaggcatggatacactaagttcccctgaagtgagcatgatctttgatgctgagatgattcccagagcaagatag

SEQ ID NO: 73353 - protein, 882 aa, Arabidopsis thaliana
  peptide (1)..(882): Ceres Seq. ID no. 4963968
  misc_feature: Pfam Name: Pkinase Pfam Description: Protein kinase domain
  misc_feature (1)..(882): Homolog of NCBI NO: 22327979 NR Description: serine/threonine-specific protein kinase - like; id: At5g59670.1, supported by cDNA: gi_20466279 [Arabidopsis
  misc_feature (4)..(882): Homolog of NCBI NO: 15231403 NR Description: receptor-like protein kinase homolog; protein id:
  misc_feature (9)..(882): Homolog of NCBI NO: 9294681 NR Description: receptor-like protein kinase [Arabidopsis
  misc_feature (1)..(526): Homolog of NCBI NO: 15231428 NR Description: hypothetical protein; protein id: At3g46420.1
  misc_feature (575)..(882): Homolog of NCBI NO: 15231428 NR Description: hypothetical protein; protein id: At3g46420.1
  misc_feature (5)..(882): Homolog of NCBI NO: 25387123 NR Description: probable protein kinase [imported] - Arabidopsis >gi|9802784|gb|AAF99853.1|AC015448_3 Putative protein kinase
  misc_feature (9)..(882): Homolog of NCBI NO: 15232537 NR Description: serine/threonine-specific protein kinase,
  misc_feature (28)..(882): Homolog of NCBI NO: 25387154 NR Description: protein F22G5.6 [imported] - Arabidopsis thaliana
  misc_feature (302)..(624): Homolog of NCBI NO: 15238490 NR Description: leucine-rich repeat transmembrane protein kinase,
  misc_feature (650)..(882): Homolog of NCBI NO: 15238490 NR Description: leucine-rich repeat transmembrane protein kinase,
MERSLELLLLLIRTLAIIHISQAQSQQGFISLDCGLPANEPSPYTEPRTGLQFSSDAAFIQSGKIGRIQANLEADFLKPSTTMRYFPDGKRNCYNLNVEKGRNHLIRARFVYGNYDGRDTGPKFDLYLGPNPWATIDLAKQVNGTRPEIMHIPTSNKLQVCLVKTGETTPLISVLEVRPMGSGTYLTKSGSLKLYYREYFSKSDSSLRYPDDIYDRQWTSFFDTEWTQINTTSDVGNSNDYKPPKVALTTAAIPTNASAPLTNEWSSVNPDEQYYVYAHFSEIQELQANETREFNMLLNGKLFFGPVVPPKLAISTILSVSPNTCEGGECNLQLIRTNRSTLPPLLNAYEVYKVIQFPQLETNETDVSAVKNIQATYELSRINWQSDPCVPQQFMWDGLNCSITDITTPPRITTLNLSSSGLTGTITAAIQNLTTLEKLDLSNNNLTGEVPEFLSNMKSLLVINLSGNDLNGTIPQSLQRKGLELLYQGNPRLISPGSTETKSGKSFPVTIVASVGSAAILIVVLVLVLFLRKKKPSAVEVVLPRPSRPTMNVPYANSPEPSIEMKKRKFTYSEVTKMTNNFGRVVGEGGFGVVCHGTVNGSEQVAVKLLSQSSTQGYKEFKAEVDLLLRVHHTNLVSLVGYCDEGDHLALIYEFVPNGDLRQHLSGKGGKPIVNWGTRLRIAAEAALGLEYLHIGCTPPMVHRDVKTTNILLDEHYKAKLADFGLSRSFPVGGESHVSTVIAGTPGYLDPDRLSEKSDVYSFGIVLLEMITNQAVIDRNRRKSHITQWVGSELNGGDIAKIMDLKLNGDYDSRSAWRALELAMSCADPTSARRPTMSHVVIELKECLVSENSRRNMSRGMDTLSSPEVSMIFDAEMIPRAR

SEQ ID NO: 73354 - protein, 800 aa, Arabidopsis thaliana
  peptide (1)..(800): Ceres Seq. ID no. 4963969
  misc_feature: Pfam Name: Pkinase Pfam Description: Protein kinase domain
  misc_feature (1)..(800): Homolog of NCBI NO: 22327979 NR Description: serine/threonine-specific protein kinase - like; id: At5g59670.1, supported by cDNA: gi_20466279 [Arabidopsis
  misc_feature (1)..(800): Homolog of NCBI NO: 15231403 NR Description: receptor-like protein kinase homolog; protein id:
  misc_feature (1)..(800): Homolog of NCBI NO: 9294681 NR Description: receptor-like protein kinase [Arabidopsis
  misc_feature (1)..(444): Homolog of NCBI NO: 15231428 NR Description: hypothetical protein; protein id: At3g46420.1
  misc_feature (493)..(800): Homolog of NCBI NO: 15231428 NR Description: hypothetical protein; protein id: At3g46420.1
  misc_feature (1)..(800): Homolog of NCBI NO: 25387123 NR Description: probable protein kinase [imported] - Arabidopsis >gi|9802784|gb|AAF99853.1|AC015448_3 Putative protein kinase
  misc_feature (1)..(800): Homolog of NCBI NO: 15232537 NR Description: serine/threonine-specific protein kinase,
  misc_feature (1)..(800): Homolog of NCBI NO: 25387154 NR Description: protein F22G5.6 [imported] - Arabidopsis thaliana
  misc_feature (220)..(542): Homolog of NCBI NO: 15238490 NR Description: leucine-rich repeat transmembrane protein kinase,
  misc_feature (568)..(800): Homolog of NCBI NO: 15238490 NR Description: leucine-rich repeat transmembrane protein kinase,
MRYFPDGKRNCYNLNVEKGRNHLIRARFVYGNYDGRDTGPKFDLYLGPNPWATIDLAKQVNGTRPEIMHIPTSNKLQVCLVKTGETTPLISVLEVRPMGSGTYLTKSGSLKLYYREYFSKSDSSLRYPDDIYDRQWTSFFDTEWTQINTTSDVGNSNDYKPPKVALTTAAIPTNASAPLTNEWSSVNPDEQYYVYAHFSEIQELQANETREFNMLLNGKLFFGPVVPPKLAISTILSVSPNTCEGGECNLQLIRTNRSTLPPLLNAYEVYKVIQFPQLETNETDVSAVKNIQATYELSRINWQSDPCVPQQFMWDGLNCSITDITTPPRITTLNLSSSGLTGTITAAIQNLTTLEKLDLSNNNLTGEVPEFLSNMKSLLVINLSGNDLNGTIPQSLQRKGLELLYQGNPRLISPGSTETKSGKSFPVTIVASVGSAAILIVVLVLVLFLRKKKPSAVEVVLPRPSRPTMNVPYANSPEPSIEMKKRKFTYSEVTKMTNNFGRVVGEGGFGVVCHGTVNGSEQVAVKLLSQSSTQGYKEFKAEVDLLLRVHHTNLVSLVGYCDEGDHLALIYEFVPNGDLRQHLSGKGGKPIVNWGTRLRIAAEAALGLEYLHIGCTPPMVHRDVKTTNILLDEHYKAKLADFGLSRSFPVGGESHVSTVIAGTPGYLDPDRLSEKSDVYSFGIVLLEMITNQAVIDRNRRKSHITQWVGSELNGGDIAKIMDLKLNGDYDSRSAWRALELAMSCADPTSARRPTMSHVVIELKECLVSENSRRNMSRGMDTLSSPEVSMIFDAEMIPRAR

SEQ ID NO: 73355 - protein, 733 aa, Arabidopsis thaliana
  peptide (1)..(733): Ceres Seq. ID no. 4963970
  misc_feature: Pfam Name: Pkinase Pfam Description: Protein kinase domain
  misc_feature (1)..(733): Homolog of NCBI NO: 22327979 NR Description: serine/threonine-specific protein kinase - like; id: At5g59670.1, supported by cDNA: gi_20466279 [Arabidopsis
  misc_feature (1)..(733): Homolog of NCBI NO: 15231403 NR Description: receptor-like protein kinase homolog; protein id:
  misc_feature (1)..(733): Homolog of NCBI NO: 9294681 NR Description: receptor-like protein kinase [Arabidopsis
  misc_feature (1)..(377): Homolog of NCBI NO: 15231428 NR Description: hypothetical protein; protein id: At3g46420.1
  misc_feature (426)..(733): Homolog of NCBI NO: 15231428 NR Description: hypothetical protein; protein id: At3g46420.1
  misc_feature (1)..(733): Homolog of NCBI NO: 25387123 NR Description: probable protein kinase [imported] - Arabidopsis >gi|9802784|gb|AAF99853.1|AC015448_3 Putative protein kinase
  misc_feature (1)..(733): Homolog of NCBI NO: 15232537 NR Description: serine/threonine-specific protein kinase,
  misc_feature (1)..(733): Homolog of NCBI NO: 25387154 NR Description: protein F22G5.6 [imported] - Arabidopsis thaliana
  misc_feature (153)..(475): Homolog of NCBI NO: 15238490 NR Description: leucine-rich repeat transmembrane protein kinase,
  misc_feature (501)..(733): Homolog of NCBI NO: 15238490 NR Description: leucine-rich repeat transmembrane protein kinase,
MHIPTSNKLQVCLVKTGETTPLISVLEVRPMGSGTYLTKSGSLKLYYREYFSKSDSSLRYPDDIYDRQWTSFFDTEWTQINTTSDVGNSNDYKPPKVALTTAAIPTNASAPLTNEWSSVNPDEQYYVYAHFSEIQELQANETREFNMLLNGKLFFGPVVPPKLAISTILSVSPNTCEGGECNLQLIRTNRSTLPPLLNAYEVYKVIQFPQLETNETDVSAVKNIQATYELSRINWQSDPCVPQQFMWDGLNCSITDITTPPRITTLNLSSSGLTGTITAAIQNLTTLEKLDLSNNNLTGEVPEFLSNMKSLLVINLSGNDLNGTIPQSLQRKGLELLYQGNPRLISPGSTETKSGKSFPVTIVASVGSAAILIVVLVLVLFLRKKKPSAVEVVLPRPSRPTMNVPYANSPEPSIEMKKRKFTYSEVTKMTNNFGRVVGEGGFGVVCHGTVNGSEQVAVKLLSQSSTQGYKEFKAEVDLLLRVHHTNLVSLVGYCDEGDHLALIYEFVPNGDLRQHLSGKGGKPIVNWGTRLRIAAEAALGLEYLHIGCTPPMVHRDVKTTNILLDEHYKAKLADFGLSRSFPVGGESHVSTVIAGTPGYLDPDRLSEKSDVYSFGIVLLEMITNQAVIDRNRRKSHITQWVGSELNGGDIAKIMDLKLNGDYDSRSAWRALELAMSCADPTSARRPTMSHVVIELKECLVSENSRRNMSRGMDTLSSPEVSMIFDAEMIPRAR

SEQ ID NO: 73356 - DNA, 1500 bp, Arabidopsis thaliana
  misc_feature (1)..(1500): Ceres Seq. ID no. 4964030
  misc_feature: MA Experiment ID: 20000171 Result: Up-regulated in Transcription
  misc_feature: MA Experiment 20000171 PARAMETER Experiment Name: At_42deg_Heat_P Parameter: Age (day) Value: 14
  misc_feature: MA Experiment 20000171 PARAMETER Experiment Name: At_42deg_Heat_P Parameter: Organism Value: A. thaliana
  misc_feature: MA Experiment 20000171 PARAMETER Experiment Name: At_42deg_Heat_P Parameter: Plant Line Value: WS
  misc_feature: MA Experiment 20000171 PARAMETER Experiment Name: At_42deg_Heat_P Parameter: Temperature (deg C) Value: 42 vs. 22
  misc_feature: MA Experiment 20000171 PARAMETER Experiment Name: At_42deg_Heat_P Parameter: Timepoint (hr) Value: 1
  misc_feature: MA Experiment 20000171 PARAMETER Experiment Name: At_42deg_Heat_P Parameter: Tissue Value: Aerial
  misc_feature: MA Experiment ID: 20000184 Result: Down-regulated in Transcription
  misc_feature: MA Experiment 20000184 PARAMETER Experiment Name: At_Shoots__P Parameter: Age (day) Value: 7
  misc_feature: MA Experiment 20000184 PARAMETER Experiment Name: At_Shoots__P Parameter: Tissue Value: Shoots vs. Whole Plant
  misc_feature: MA Experiment ID: 20000437 Result: Up-regulated in Transcription
  misc_feature: MA Experiment 20000437 PARAMETER Experiment Name: At_Drought_P Parameter: Age (day) Value: 8
  misc_feature: MA Experiment 20000437 PARAMETER Experiment Name: At_Drought_P Parameter: Organism Value: A. thaliana
  misc_feature: MA Experiment 20000437 PARAMETER Experiment Name: At_Drought_P Parameter: Plant Line Value: WS
  misc_feature: MA Experiment 20000437 PARAMETER Experiment Name: At_Drought_P Parameter: Timepoint (hr) Value: 24
  misc_feature: MA Experiment 20000437 PARAMETER Experiment Name: At_Drought_P Parameter: Tissue Value: Whole Plant
  misc_feature: MA Experiment 20000437 PARAMETER Experiment Name: At_Drought_P Parameter: Treatment Value: Drought vs. No Drought
  misc_feature: MA Experiment ID: 20001247 Result: Down-regulated in Transcription
  misc_feature: MA Experiment 20001247 PARAMETER Experiment Name: At_Far-red-induction_P Parameter: Age (day) Value: 7
  misc_feature: MA Experiment 20001247 PARAMETER Experiment Name: At_Far-red-induction_P Parameter: Light Value: Far-red vs. White
  misc_feature: MA Experiment 20001247 PARAMETER Experiment Name: At_Far-red-induction_P Parameter: Organism Value: A. thaliana
  misc_feature: MA Experiment 20001247 PARAMETER Experiment Name: At_Far-red-induction_P Parameter: Plant Line Value: Columbia
  misc_feature: MA Experiment 20001247 PARAMETER Experiment Name: At_Far-red-induction_P Parameter: Timepoint (hr) Value: 1
  misc_feature: MA Experiment 20001247 PARAMETER Experiment Name: At_Far-red-induction_P Parameter: Tissue Value: Whole Plant
atgataaattatagtagttgttcatatctcttgaagctgtgtagaacccttaaacatctgcatcagtttcatgcccaattcatcacttccggcagaatctctaatgatttcaaacaaaactctgttttcgccaatgtcctcttcgccatcacctctatttcaccgtctgcgtcggcgtcgaaggaggtcgtgagctacgcgacttcagttttcagattcatcacaaacccttcaacgttttgtttcaatacgatcattaggatttgtacgcttcatgagccgtcgtctctgtcttctaaacgtttcttcgtcgagatgcgacgtcgctctgttcctccagatttccacactttccctttcgtattcaaggcttgtgcagcaaagaagaatggtgatcttacattagtcaagactctgcattgtcaagctttgagattcggattgttatctgatttgttcactttgaacactctgattcgtgtttactcattgattgctccaatcgatagtgccttgcaactgttcgacgaaaatcctcaaagagatgttgttacctacaatgtgttgatcgacgggttagtgaaggcacgtgagattgttcgtgcaagagagttgtttgattcaatgcccttacgtgatttggtttcgtggaatagtctcatttctggttatgcgcagatgaatcattgcagagaagcaatcaaactcttcgacgagatggttgctttgggtctaaaacccgataatgtcgccattgtttcaactctttcagcttgtgcacaatcaggggattggcaaaaagggaaagctattcatgattacacgaaaaggaagagacttttcattgattccttcttagctactggattggtggatttctatgcaaaatgtggtttcatcgatacagcgatggagatcttcgaattatgttcagataaaactttattcacatggaatgcaatgatcactggtcttgcaatgcacggtaacggtgagctaacggttgattacttccgtaagatggttagttctggaatcaaaccagacggagtaaccttcataagtgttttagtgggttgcagccattctggtctagttgatgaagccaggaacctttttgaccaaatgagatctttgtatgatgttaatagagagatgaagcattacgggtgtatggcggatttgcttggaagagcaggattgatcgaagaagcagcggaaatgatcgagcaaatgcctaaagatggaggaaacagagagaaactcttagcatggagcggtttgttaggcggatgcagaatccacgggaacatagagatcgcggagaaagccgcaaatcgagtcaaggcgttgagtcccgaagatggaggagtgtataaagttatggtggaaatgtatgcaaacgcagagagatgggaggaagtagttaaggttagagaaataatagacagagacaagaaagtgaagaagaatgttggatttagtaaagttttgtcatag

SEQ ID NO: 73357 - protein, 499 aa, Arabidopsis thaliana
  peptide (1)..(499): Ceres Seq. ID no. 4964031
  misc_feature (316)..(350): Pfam Name: PPR repeat Pfam Description: PPR repeat
  misc_feature (1)..(499): Homolog of NCBI NO: 15240355 NR Description: putative protein; protein id: At5g61800.1
  misc_feature (108)..(497): Homolog of NCBI NO: 21740620 NR Description: OSJNBb0012E08.2 [Oryza sativa (japonica
  misc_feature (14)..(497): Homolog of NCBI NO: 15239745 NR Description: selenium-binding protein-like; protein id:
  misc_feature (4)..(497): Homolog of NCBI NO: 15239979 NR Description: selenium-binding protein-like; protein id:
  misc_feature (17)..(497): Homolog of NCBI NO: 15225375 NR Description: unknown protein; protein id: At2g20540.1
  misc_feature (14)..(497): Homolog of NCBI NO: 15228028 NR Description: hypothetical protein; protein id: At2g42920.1
  misc_feature (14)..(495): Homolog of NCBI NO: 19071631 NR Description: putative pentatricopeptide repeat containing
  misc_feature (24)..(497): Homolog of NCBI NO: 34910298 NR Description: P0013F10.8 [Oryza sativa (japonica
  misc_feature (65)..(495): Homolog of NCBI NO: 34899952 NR Description: putative selenium-binding protein [Oryza sativa
  misc_feature (10)..(497): Homolog of NCBI NO: 15240085 NR Description: selenium-binding protein-like; protein id:
MINYSSCSYLLKLCRTLKHLHQFHAQFITSGRISNDFKQNSVFANVLFAITSISPSASASKEVVSYATSVFRFITNPSTFCFNTIIRICTLHEPSSLSSKRFFVEMRRRSVPPDFHTFPFVFKACAAKKNGDLTLVKTLHCQALRFGLLSDLFTLNTLIRVYSLIAPIDSALQLFDENPQRDVVTYNVLIDGLVKAREIVRARELFDSMPLRDLVSWNSLISGYAQMNHCREAIKLFDEMVALGLKPDNVAIVSTLSACAQSGDWQKGKAIHDYTKRKRLFIDSFLATGLVDFYAKCGFIDTAMEIFELCSDKTLFTWNAMITGLAMHGNGELTVDYFRKMVSSGIKPDGVTFISVLVGCSHSGLVDEARNLFDQMRSLYDVNREMKHYGCMADLLGRAGLIEEAAEMIEQMPKDGGNREKLLAWSGLLGGCRIHGNIEIAEKAANRVKALSPEDGGVYKVMVEMYANAERWEEVVKVREIIDRDKKVKKNVGFSKVLS

SEQ ID NO: 73358 - protein, 394 aa, Arabidopsis thaliana
  peptide (1)..(394): Ceres Seq. ID no. 4964032
  misc_feature (211)..(245): Pfam Name: PPR repeat Pfam Description: PPR repeat
  misc_feature (1)..(394): Homolog of NCBI NO: 15240355 NR Description: putative protein; protein id: At5g61800.1
  misc_feature (3)..(392): Homolog of NCBI NO: 21740620 NR Description: OSJNBb0012E08.2 [Oryza sativa (japonica
  misc_feature (1)..(392): Homolog of NCBI NO: 15239745 NR Description: selenium-binding protein-like; protein id:
  misc_feature (1)..(392): Homolog of NCBI NO: 15239979 NR Description: selenium-binding protein-like; protein id:
  misc_feature (1)..(392): Homolog of NCBI NO: 15225375 NR Description: unknown protein; protein id: At2g20540.1
  misc_feature (1)..(392): Homolog of NCBI NO: 15228028 NR Description: hypothetical protein; protein id: At2g42920.1
  misc_feature (1)..(390): Homolog of NCBI NO: 19071631 NR Description: putative pentatricopeptide repeat containing
  misc_feature (1)..(392): Homolog of NCBI NO: 34910298 NR Description: P0013F10.8 [Oryza sativa (japonica
  misc_feature (1)..(390): Homolog of NCBI NO: 34899952 NR Description: putative selenium-binding protein [Oryza sativa
  misc_feature (1)..(392): Homolog of NCBI NO: 15240085 NR Description: selenium-binding protein-like; protein id:
MRRRSVPPDFHTFPFVFKACAAKKNGDLTLVKTLHCQALRFGLLSDLFTLNTLIRVYSLIAPIDSALQLFDENPQRDVVTYNVLIDGLVKAREIVRARELFDSMPLRDLVSWNSLISGYAQMNHCREAIKLFDEMVALGLKPDNVAIVSTLSACAQSGDWQKGKAIHDYTKRKRLFIDSFLATGLVDFYAKCGFIDTAMEIFELCSDKTLFTWNAMITGLAMHGNGELTVDYFRKMVSSGIKPDGVTFISVLVGCSHSGLVDEARNLFDQMRSLYDVNREMKHYGCMADLLGRAGLIEEAAEMIEQMPKDGGNREKLLAWSGLLGGCRIHGNIEIAEKAANRVKALSPEDGGVYKVMVEMYANAERWEEVVKVREIIDRDKKVKKNVGFSKVLS

SEQ ID NO: 73359 - protein, 291 aa, Arabidopsis thaliana
  peptide (1)..(291): Ceres Seq. ID no. 4964033
  misc_feature (108)..(142): Pfam Name: PPR repeat Pfam Description: PPR repeat
  misc_feature (1)..(291): Homolog of NCBI NO: 15240355 NR Description: putative protein; protein id: At5g61800.1
  misc_feature (1)..(289): Homolog of NCBI NO: 21740620 NR Description: OSJNBb0012E08.2 [Oryza sativa (japonica
  misc_feature (1)..(289): Homolog of NCBI NO: 15239745 NR Description: selenium-binding protein-like; protein id:
  misc_feature (1)..(289): Homolog of NCBI NO: 15239979 NR Description: selenium-binding protein-like; protein id:
  misc_feature (1)..(289): Homolog of NCBI NO: 15225375 NR Description: unknown protein; protein id: At2g20540.1
  misc_feature (1)..(289): Homolog of NCBI NO: 15228028 NR Description: hypothetical protein; protein id: At2g42920.1
  misc_feature (1)..(287): Homolog of NCBI NO: 19071631 NR Description: putative pentatricopeptide repeat containing
  misc_feature (1)..(289): Homolog of NCBI NO: 34910298 NR Description: P0013F10.8 [Oryza sativa (japonica
  misc_feature (1)..(287): Homolog of NCBI NO: 34899952 NR Description: putative selenium-binding protein [Oryza sativa
  misc_feature (1)..(289): Homolog of NCBI NO: 15240085 NR Description: selenium-binding protein-like; protein id:
MPLRDLVSWNSLISGYAQMNHCREAIKLFDEMVALGLKPDNVAIVSTLSACAQSGDWQKGKAIHDYTKRKRLFIDSFLATGLVDFYAKCGFIDTAMEIFELCSDKTLFTWNAMITGLAMHGNGELTVDYFRKMVSSGIKPDGVTFISVLVGCSHSGLVDEARNLFDQMRSLYDVNREMKHYGCMADLLGRAGLIEEAAEMIEQMPKDGGNREKLLAWSGLLGGCRIHGNIEIAEKAANRVKALSPEDGGVYKVMVEMYANAERWEEVVKVREIIDRDKKVKKNVGFSKVLS

SEQ ID NO: 73360 - DNA, 1155 bp, Arabidopsis thaliana
  misc_feature (1)..(1155): Ceres Seq. ID no. 4964091
  misc_feature: MA Experiment ID: 20000179 Result: Down-regulated in Transcription
  misc_feature: MA Experiment 20000179 PARAMETER Experiment Name: At_Germinating_Seeds_P Parameter: Age (hr) Value: 6 vs. 0
  misc_feature: MA Experiment 20000179 PARAMETER Experiment Name: At_Germinating_Seeds_P Parameter: Tissue Value: Germinating Seeds
  misc_feature: MA Experiment ID: 20000182 Result: Up-regulated in Transcription
  misc_feature: MA Experiment 20000182 PARAMETER Experiment Name: At_2mM_SA_P Parameter: Age (day) Value: 14
  misc_feature: MA Experiment 20000182 PARAMETER Experiment Name: At_2mM_SA_P Parameter: Organism Value: A. thaliana
  misc_feature: MA Experiment 20000182 PARAMETER Experiment Name: At_2mM_SA_P Parameter: Plant Line Value: WS
  misc_feature: MA Experiment 20000182 PARAMETER Experiment Name: At_2mM_SA_P Parameter: Timepoint (hr) Value: 6
  misc_feature: MA Experiment 20000182 PARAMETER Experiment Name: At_2mM_SA_P Parameter: Tissue Value: Aerial
  misc_feature: MA Experiment 20000182 PARAMETER Experiment Name: At_2mM_SA_P Parameter: Treatment Value: 2mM SA vs. No Treatment
  misc_feature: MA Experiment ID: 20000227 Result: Up-regulated in Transcription
  misc_feature: MA Experiment 20000227 PARAMETER Experiment Name: At_Root-Tips-vs-Tops_P Parameter: Tissue Value: Root Tips vs. Root Tops
  misc_feature: MA Experiment ID: 20000234 Result: Up-regulated in Transcription
  misc_feature: MA Experiment 20000234 PARAMETER Experiment Name: At_Siliques_P Parameter: Age (day) Value: 21
  misc_feature: MA Experiment 20000234 PARAMETER Experiment Name: At_Siliques_P Parameter: Organism Value: A. thaliana
  misc_feature: MA Experiment 20000234 PARAMETER Experiment Name: At_Siliques_P Parameter: Plant Line Value: WS
  misc_feature: MA Experiment 20000234 PARAMETER Experiment Name: At_Siliques_P Parameter: Tissue Value: Less Than 5mm Siliques vs. Whole Plant
  misc_feature: MA Experiment ID: 20000264 Result: Up-regulated in Transcription
  misc_feature: MA Experiment 20000264 PARAMETER Experiment Name: At_Open_Flower_P Parameter: Age (day) Value: 21
  misc_feature: MA Experiment 20000264 PARAMETER Experiment Name: At_Open_Flower_P Parameter: Plant Line Value: WS
  misc_feature: MA Experiment 20000264 PARAMETER Experiment Name: At_Open_Flower_P Parameter: Tissue Value: Open Flower vs. Whole Plant
  misc_feature: MA Experiment ID: 20000265 Result: Up-regulated in Transcription
  misc_feature: MA Experiment 20000265 PARAMETER Experiment Name: At_Open_Flower_P Parameter: Age (day) Value: 21
  misc_feature: MA Experiment 20000265 PARAMETER Experiment Name: At_Open_Flower_P Parameter: Plant Line Value: WS
  misc_feature: MA Experiment 20000265 PARAMETER Experiment Name: At_Open_Flower_P Parameter: Tissue Value: Closed Flower vs. Whole Plant
  misc_feature: MA Experiment ID: 20000286 Result: Up-regulated in Transcription
  misc_feature: MA Experiment 20000286 PARAMETER Experiment Name: At_Open_Flower_P Parameter: Age (day) Value: 21
  misc_feature: MA Experiment 20000286 PARAMETER Experiment Name: At_Open_Flower_P Parameter: Plant Line Value: WS
  misc_feature: MA Experiment 20000286 PARAMETER Experiment Name: At_Open_Flower_P Parameter: Tissue Value: Half Open vs. Whole Plant
  misc_feature: MA Experiment ID: 20000495 Result: Up-regulated in Transcription
  misc_feature: MA Experiment 20000495 PARAMETER Experiment Name: At_Guard_Cells_P Parameter: Harvest Date Value: 8/2/2002
  misc_feature: MA Experiment 20000495 PARAMETER Experiment Name: At_Guard_Cells_P Parameter: Organism Value: A. thaliana
  misc_feature: MA Experiment 20000495 PARAMETER Experiment Name: At_Guard_Cells_P Parameter: Tissue Value: Guard Cells vs. Leaves
  misc_feature: MA Experiment ID: 20000794 Result: Up-regulated in Transcription
  misc_feature: MA Experiment 20000794 PARAMETER Experiment Name: At_Petals_P Parameter: Age (day) Value: 23-25 days
  misc_feature: MA Experiment 20000794 PARAMETER Experiment Name: At_Petals_P Parameter: Plant Line Value: WS
  misc_feature: MA Experiment 20000794 PARAMETER Experiment Name: At_Petals_P Parameter: Tissue Value: Petals vs. Whole plant
  misc_feature: MA Experiment ID: 20001558 Result: Up-regulated in Transcription
  misc_feature: MA Experiment 20001558 PARAMETER Experiment Name: At_Drought_Soil_Dry_P Parameter: Age (day) Value: 27
  misc_feature: MA Experiment 20001558 PARAMETER Experiment Name: At_Drought_Soil_Dry_P Parameter: Organism Value: A. thaliana
  misc_feature: MA Experiment 20001558 PARAMETER Experiment Name: At_Drought_Soil_Dry_P Parameter: Plant Line Value: WS
  misc_feature: MA Experiment 20001558 PARAMETER Experiment Name: At_Drought_Soil_Dry_P Parameter: Post Timepoint (hr) Value: 6
  misc_feature: MA Experiment 20001558 PARAMETER Experiment Name: At_Drought_Soil_Dry_P Parameter: Post-Treatment Value: Re-Water vs. No Drought
  misc_feature: MA Experiment 20001558 PARAMETER Experiment Name: At_Drought_Soil_Dry_P Parameter: Timepoint (day) Value: 13
  misc_feature: MA Experiment 20001558 PARAMETER Experiment Name: At_Drought_Soil_Dry_P Parameter: Treatment Value: Drought vs. No Drought
  misc_feature: MA Experiment ID: 20001560 Result: Up-regulated in Transcription
  misc_feature: MA Experiment 20001560 PARAMETER Experiment Name: At_Drought_Soil_Dry_P Parameter: Age (day) Value: 28
  misc_feature: MA Experiment 20001560 PARAMETER Experiment Name: At_Drought_Soil_Dry_P Parameter: Organism Value: A. thaliana
  misc_feature: MA Experiment 20001560 PARAMETER Experiment Name: At_Drought_Soil_Dry_P Parameter: Plant Line Value: WS
  misc_feature: MA Experiment 20001560 PARAMETER Experiment Name: At_Drought_Soil_Dry_P Parameter: Post Timepoint (hr) Value: None
  misc_feature: MA Experiment 20001560 PARAMETER Experiment Name: At_Drought_Soil_Dry_P Parameter: Post-Treatment Value: None
  misc_feature: MA Experiment 20001560 PARAMETER Experiment Name: At_Drought_Soil_Dry_P Parameter: Timepoint (day) Value: 14
  misc_feature: MA Experiment 20001560 PARAMETER Experiment Name: At_Drought_Soil_Dry_P Parameter: Treatment Value: Drought vs. No Drought
atgtataagaatcagcttcaagagcttgcacagagaagttgtttcaacttaccatcatatacttgcataagagaaggaccagatcatgctccaagattcaaagcttctgttaacttcaatggtgagatatttgagagtcccacttactgttctactctcagacaagctgagcatgcagctgctgaagtttcccttaatgtcctttcgtctagagtcccttcaaagtctctaactgctaagattcttgatgagacagggatttacaagaacctgcttcaagagacagcacatagagctggtcttgatctaccaatgtacacaagtgtgagatcaggatcttgtcacttcccaggtttctcttgtactgttgaacttgctgggatgacgtttacaggagaatcagcaaagacaaagaaacaagctgagaaaaacgcagccattgcagcttggtcctctttgaagaaaaagaaggaacaagaagcagtagcaagagtactctcaagatttaaacccaaagaagtaagaagacgagagacaacaaaccaatggagaagaagaacaagtcaacaagattcaaacaaggatttgttgattgagagattgagatggatcaatcttttgaccaatcaagcttcttcatcatcatcaacatcaacaccgaatcaacacaaaaactccagtttcatctctctaattcccccaccaccaccacctaaatcctccaaaattttgccatttatccagcaatacaaagacagatcatcacaagaagctaagacagagacagcgacagagatgatcaacagcaaagccaaagtcaatgaaacatcaaccagattgagtaagcaaatgcccttttccgacatgaacagatacaactttgtcggagggtgtagcgtaaacccttatagtctggctccagcggttcaaatgagatcagtgattccagttttcgcagctccaccaccgaaaccaaaccccaaccttaacccatcatcattatcatcatcagtcaatgaattcacctcatccaataattcctgctctgttctgaatacgccgggattgggaggccaagagaagaagaatctaactcgcgaaatgatcaaacttggttcagaatcgagaattttggatcaaacccatgatagttag

SEQ ID NO: 73361 - protein, 384 aa, Arabidopsis thaliana
  peptide (1)..(384): Ceres Seq. ID no. 4964092
  misc_feature (2)..(68): Pfam Name: Double-stranded RNA binding motif Pfam Description: Double-stranded RNA binding motif
  misc_feature (1)..(384): Homolog of NCBI NO: 9759153 NR Description: gb|AAD20688.1~gene_id:MEE6.14~similar to unknown
  misc_feature (1)..(384): Homolog of NCBI NO: 30693732 NR Description: expressed protein [Arabidopsis thaliana]
  misc_feature (1)..(332): Homolog of NCBI NO: 11994159 NR Description: gb|AAD20688.1~gene_id:MQP17.5~similar to unknown
  misc_feature (1)..(332): Homolog of NCBI NO: 15231653 NR Description: hypothetical protein; protein id: At3g26932.1
  misc_feature (1)..(334): Homolog of NCBI NO: 18401724 NR Description: expressed protein; protein id: At2g28380.1, by cDNA: gi_14334605, supported by cDNA: gi_17065633 [Arabidopsis >gi|25407980|pir||B84684 hypothetical protein At2g28380
  misc_feature (1)..(323): Homolog of NCBI NO: 37535422 NR Description: putative extensin [Oryza sativa (japonica
  misc_feature (1)..(259): Homolog of NCBI NO: 40788412 NR Description: hypothetical protein [Oryza sativa (japonica
  misc_feature (1)..(174): Homolog of NCBI NO: 18389232 NR Description: unknown protein [Arabidopsis thaliana]
  misc_feature (1)..(174): Homolog of NCBI NO: 22331912 NR Description: putative protein; protein id: At3g62800.1, by cDNA: gi_18389231 [Arabidopsis thaliana]
  misc_feature (1)..(160): Homolog of NCBI NO: 8346542 NR Description: BcpLH protein [Brassica rapa]
MYKNQLQELAQRSCFNLPSYTCIREGPDHAPRFKASVNFNGEIFESPTYCSTLRQAEHAAAEVSLNVLSSRVPSKSLTAKILDETGIYKNLLQETAHRAGLDLPMYTSVRSGSCHFPGFSCTVELAGMTFTGESAKTKKQAEKNAAIAAWSSLKKKKEQEAVARVLSRFKPKEVRRRETTNQWRRRTSQQDSNKDLLIERLRWINLLTNQASSSSSTSTPNQHKNSSFISLIPPPPPPKSSKILPFIQQYKDRSSQEAKTETATEMINSKAKVNETSTRLSKQMPFSDMNRYNFVGGCSVNPYSLAPAVQMRSVIPVFAAPPPKPNPNLNPSSLSSSVNEFTSSNNSCSVLNTPGLGGQEKKNLTREMIKLGSESRILDQTHDS

SEQ ID NO: 73362 - protein, 280 aa, Arabidopsis thaliana
  peptide (1)..(280): Ceres Seq. ID no. 4964093
  misc_feature (1)..(280): Homolog of NCBI NO: 9759153 NR Description: gb|AAD20688.1~gene_id:MEE6.14~similar to unknown
  misc_feature (1)..(280): Homolog of NCBI NO: 30693732 NR Description: expressed protein [Arabidopsis thaliana]
  misc_feature (1)..(228): Homolog of NCBI NO: 11994159 NR Description: gb|AAD20688.1~gene_id:MQP17.5~similar to unknown
  misc_feature (1)..(228): Homolog of NCBI NO: 15231653 NR Description: hypothetical protein; protein id: At3g26932.1
  misc_feature (1)..(230): Homolog of NCBI NO: 18401724 NR Description: expressed protein; protein id: At2g28380.1, by cDNA: gi_14334605, supported by cDNA: gi_17065633 [Arabidopsis >gi|25407980|pir||B84684 hypothetical protein At2g28380
  misc_feature (1)..(219): Homolog of NCBI NO: 37535422 NR Description: putative extensin [Oryza sativa (japonica
  misc_feature (1)..(155): Homolog of NCBI NO: 40788412 NR Description: hypothetical protein [Oryza sativa (japonica
  misc_feature (1)..(70): Homolog of NCBI NO: 18389232 NR Description: unknown protein [Arabidopsis thaliana]
  misc_feature (1)..(70): Homolog of NCBI NO: 22331912 NR Description: putative protein; protein id: At3g62800.1, by cDNA: gi_18389231 [Arabidopsis thaliana]
  misc_feature (1)..(56): Homolog of NCBI NO: 8346542 NR Description: BcpLH protein [Brassica rapa]
MYTSVRSGSCHFPGFSCTVELAGMTFTGESAKTKKQAEKNAAIAAWSSLKKKKEQEAVARVLSRFKPKEVRRRETTNQWRRRTSQQDSNKDLLIERLRWINLLTNQASSSSSTSTPNQHKNSSFISLIPPPPPPKSSKILPFIQQYKDRSSQEAKTETATEMINSKAKVNETSTRLSKQMPFSDMNRYNFVGGCSVNPYSLAPAVQMRSVIPVFAAPPPKPNPNLNPSSLSSSVNEFTSSNNSCSVLNTPGLGGQEKKNLTREMIKLGSESRILDQTHDS

SEQ ID NO: 73363 - protein, 257 aa, Arabidopsis thaliana
  peptide (1)..(257): Ceres Seq. ID no. 4964094
  misc_feature (1)..(257): Homolog of NCBI NO: 9759153 NR Description: gb|AAD20688.1~gene_id:MEE6.14~similar to unknown
  misc_feature (1)..(257): Homolog of NCBI NO: 30693732 NR Description: expressed protein [Arabidopsis thaliana]
  misc_feature (1)..(205): Homolog of NCBI NO: 11994159 NR Description: gb|AAD20688.1~gene_id:MQP17.5~similar to unknown
  misc_feature (1)..(205): Homolog of NCBI NO: 15231653 NR Description: hypothetical protein; protein id: At3g26932.1
  misc_feature (1)..(207): Homolog of NCBI NO: 18401724 NR Description: expressed protein; protein id: At2g28380.1, by cDNA: gi_14334605, supported by cDNA: gi_17065633 [Arabidopsis >gi|25407980|pir||B84684 hypothetical protein At2g28380
  misc_feature (1)..(196): Homolog of NCBI NO: 37535422 NR Description: putative extensin [Oryza sativa (japonica
  misc_feature (1)..(132): Homolog of NCBI NO: 40788412 NR Description: hypothetical protein [Oryza sativa (japonica
  misc_feature (1)..(47): Homolog of NCBI NO: 18389232 NR Description: unknown protein [Arabidopsis thaliana]
  misc_feature (1)..(47): Homolog of NCBI NO: 22331912 NR Description: putative protein; protein id: At3g62800.1, by cDNA: gi_18389231 [Arabidopsis thaliana]
  misc_feature (1)..(33): Homolog of NCBI NO: 8346542 NR Description: BcpLH protein [Brassica rapa]
MTFTGESAKTKKQAEKNAAIAAWSSLKKKKEQEAVARVLSRFKPKEVRRRETTNQWRRRTSQQDSNKDLLIERLRWINLLTNQASSSSSTSTPNQHKNSSFISLIPPPPPPKSSKILPFIQQYKDRSSQEAKTETATEMINSKAKVNETSTRLSKQMPFSDMNRYNFVGGCSVNPYSLAPAVQMRSVIPVFAAPPPKPNPNLNPSSLSSSVNEFTSSNNSCSVLNTPGLGGQEKKNLTREMIKLGSESRILDQTHDS

SEQ ID NO: 73364 - DNA, 708 bp, Arabidopsis thaliana
  misc_feature (1)..(708): Ceres Seq. ID no. 4964245
  misc_feature: MA Experiment ID: 20000184 Result: Up-regulated in Transcription
  misc_feature: MA Experiment 20000184 PARAMETER Experiment Name: At_Shoots__P Parameter: Age (day) Value: 7
  misc_feature: MA Experiment 20000184 PARAMETER Experiment Name: At_Shoots__P Parameter: Tissue Value: Shoots vs. Whole Plant
  misc_feature: MA Experiment ID: 20000185 Result: Up-regulated in Transcription
  misc_feature: MA Experiment 20000185 PARAMETER Experiment Name: At_Roots__P Parameter: Age (day) Value: 7 vs. 21
  misc_feature: MA Experiment 20000185 PARAMETER Experiment Name: At_Roots__P Parameter: Organism Value: A. thaliana
  misc_feature: MA Experiment 20000185 PARAMETER Experiment Name: At_Roots__P Parameter: Tissue Value: Roots vs. Whole Plant
  misc_feature: MA Experiment ID: 20000227 Result: Down-regulated in Transcription
  misc_feature: MA Experiment 20000227 PARAMETER Experiment Name: At_Root-Tips-vs-Tops_P Parameter: Tissue Value: Root Tips vs. Root Tops
  misc_feature: MA Experiment ID: 20000437 Result: Down-regulated in Transcription
  misc_feature: MA Experiment 20000437 PARAMETER Experiment Name: At_Drought_P Parameter: Age (day) Value: 8
  misc_feature: MA Experiment 20000437 PARAMETER Experiment Name: At_Drought_P Parameter: Organism Value: A. thaliana
  misc_feature: MA Experiment 20000437 PARAMETER Experiment Name: At_Drought_P Parameter: Plant Line Value: WS
  misc_feature: MA Experiment 20000437 PARAMETER Experiment Name: At_Drought_P Parameter: Timepoint (hr) Value: 24
  misc_feature: MA Experiment 20000437 PARAMETER Experiment Name: At_Drought_P Parameter: Tissue Value: Whole Plant
  misc_feature: MA Experiment 20000437 PARAMETER Experiment Name: At_Drought_P Parameter: Treatment Value: Drought vs. No Drought
  misc_feature: MA Experiment ID: 20000439 Result: Up-regulated in Transcription
  misc_feature: MA Experiment 20000439 PARAMETER Experiment Name: At_Roots__P Parameter: Age (day) Value: 14 vs. 21
  misc_feature: MA Experiment 20000439 PARAMETER Experiment Name: At_Roots__P Parameter: Organism Value: A. thaliana
  misc_feature: MA Experiment 20000439 PARAMETER Experiment Name: At_Roots__P Parameter: Tissue Value: Roots vs. Whole Plant
atggttttggagttttcccgacaagaaaccgacccgggtcatgattttgtgcaagagtcgaccaacctttttggtgtccaagaaagagggcagatctcgtttcccgaccagaatcttgattggtacaacaccgaaaccataaaccctaaaaaagataaacatcgttctaaaccaagttccgggagctacgatatactggagctagacgtagcggacctactagcgaaatacacgcattactgccagatttgtgggaaagggtttaagagagacgctaatctaaggatgcacatgagagcgcacggggatgagtacaagacacgtgaggccttgatcagcccaacgagccaagacaagaaaggaggatactcgttaaagaaacattactactcctgtcctcaacacgggtgtagatggaaccagaggcacgagaagtttcaaccgttgaaatctgtgatttgcgccaagaatcattacaagaggagtcattgtcccaaaatgtatatgtgcaggagatgtagtgtgaagcatttctcggttctgtctgatcttaggacacacgagaagcattgtggggatataaagtgggtttgctcttgtgggactaaattttctaggaaagacaagctgatgagccacgtttctttgtttttgggccacgtaccggcacatgggtcgtccaagccgccgacaatcaccctaaagtaa

SEQ ID NO: 73365 - protein, 235 aa, Arabidopsis thaliana
  peptide (1)..(235): Ceres Seq. ID no. 4964246
  misc_feature (196)..(220): Pfam Name: Zinc finger, C2H2 type Pfam Description: Zinc finger, C2H2 type
  misc_feature (1)..(235): Homolog of NCBI NO: 10177236 NR Description: contains similarity to C2H2-type zinc finger [Arabidopsis thaliana] >gi|28466935|gb|AAO44076.1| At5g22890
  misc_feature (1)..(235): Homolog of NCBI NO: 30688719 NR Description: expressed protein [Arabidopsis thaliana]
  misc_feature (61)..(233): Homolog of NCBI NO: 10241636 NR Description: putative zinc finger protein [Oryza sativa
  misc_feature (61)..(233): Homolog of NCBI NO: 38346456 NR Description: OSJNBa0019G23.4 [Oryza sativa (japonica
  misc_feature (61)..(223): Homolog of NCBI NO: 15218606 NR Description: zinc finger protein, putative; protein id: supported by cDNA: 40167. [Arabidopsis thaliana]
  misc_feature (61)..(223): Homolog of NCBI NO: 21593564 NR Description: zinc finger protein, putative [Arabidopsis
  misc_feature (61)..(223): Homolog of NCBI NO: 34908682 NR Description: putative zinc finger protein [Oryza sativa
  misc_feature (17)..(223): Homolog of NCBI NO: 28376689 NR Description: putative zinc finger protein [Oryza sativa
  misc_feature (16)..(213): Homolog of NCBI NO: 11357453 NR Description: hypothetical protein F15A17.180 - Arabidopsis >gi|7413592|emb|CAB86082.1| putative protein [Arabidopsis
  misc_feature (14)..(224): Homolog of NCBI NO: 15222242 NR Description: zinc finger protein, putative; protein id:
MVLEFSRQETDPGHDFVQESTNLFGVQERGQISFPDQNLDWYNTETINPKKDKHRSKPSSGSYDILELDVADLLAKYTHYCQICGKGFKRDANLRMHMRAHGDEYKTREALISPTSQDKKGGYSLKKHYYSCPQHGCRWNQRHEKFQPLKSVICAKNHYKRSHCPKMYMCRRCSVKHFSVLSDLRTHEKHCGDIKWVCSCGTKFSRKDKLMSHVSLFLGHVPAHGSSKPPTITLK

SEQ ID NO: 73366 - protein, 140 aa, Arabidopsis thaliana
  peptide (1)..(140): Ceres Seq. ID no. 4964247
  misc_feature (101)..(125): Pfam Name: Zinc finger, C2H2 type Pfam Description: Zinc finger, C2H2 type
  misc_feature (1)..(140): Homolog of NCBI NO: 10177236 NR Description: contains similarity to C2H2-type zinc finger [Arabidopsis thaliana] >gi|28466935|gb|AAO44076.1| At5g22890
  misc_feature (1)..(140): Homolog of NCBI NO: 30688719 NR Description: expressed protein [Arabidopsis thaliana]
  misc_feature (1)..(138): Homolog of NCBI NO: 10241636 NR Description: putative zinc finger protein [Oryza sativa
  misc_feature (1)..(138): Homolog of NCBI NO: 38346456 NR Description: OSJNBa0019G23.4 [Oryza sativa (japonica
  misc_feature (1)..(128): Homolog of NCBI NO: 15218606 NR Description: zinc finger protein, putative; protein id: supported by cDNA: 40167. [Arabidopsis thaliana]
  misc_feature (1)..(128): Homolog of NCBI NO: 21593564 NR Description: zinc finger protein, putative [Arabidopsis
  misc_feature (1)..(128): Homolog of NCBI NO: 34908682 NR Description: putative zinc finger protein [Oryza sativa
  misc_feature (1)..(128): Homolog of NCBI NO: 28376689 NR Description: putative zinc finger protein [Oryza sativa
  misc_feature (1)..(118): Homolog of NCBI NO: 11357453 NR Description: hypothetical protein F15A17.180 - Arabidopsis >gi|7413592|emb|CAB86082.1| putative protein [Arabidopsis
  misc_feature (1)..(129): Homolog of NCBI NO: 15222242 NR Description: zinc finger protein, putative; protein id:
MHMRAHGDEYKTREALISPTSQDKKGGYSLKKHYYSCPQHGCRWNQRHEKFQPLKSVICAKNHYKRSHCPKMYMCRRCSVKHFSVLSDLRTHEKHCGDIKWVCSCGTKFSRKDKLMSHVSLFLGHVPAHGSSKPPTITLK

SEQ ID NO: 73367 - protein, 138 aa, Arabidopsis thaliana
  peptide (1)..(138): Ceres Seq. ID no. 4964248
  misc_feature (99)..(123): Pfam Name: Zinc finger, C2H2 type Pfam Description: Zinc finger, C2H2 type
  misc_feature (1)..(138): Homolog of NCBI NO: 10177236 NR Description: contains similarity to C2H2-type zinc finger [Arabidopsis thaliana] >gi|28466935|gb|AAO44076.1| At5g22890
  misc_feature (1)..(138): Homolog of NCBI NO: 30688719 NR Description: expressed protein [Arabidopsis thaliana]
  misc_feature (1)..(136): Homolog of NCBI NO: 10241636 NR Description: putative zinc finger protein [Oryza sativa
  misc_feature (1)..(136): Homolog of NCBI NO: 38346456 NR Description: OSJNBa0019G23.4 [Oryza sativa (japonica
  misc_feature (1)..(126): Homolog of NCBI NO: 15218606 NR Description: zinc finger protein, putative; protein id: supported by cDNA: 40167. [Arabidopsis thaliana]
  misc_feature (1)..(126): Homolog of NCBI NO: 21593564 NR Description: zinc finger protein, putative [Arabidopsis
  misc_feature (1)..(126): Homolog of NCBI NO: 34908682 NR Description: putative zinc finger protein [Oryza sativa
  misc_feature (1)..(126): Homolog of NCBI NO: 28376689 NR Description: putative zinc finger protein [Oryza sativa
  misc_feature (1)..(116): Homolog of NCBI NO: 11357453 NR Description: hypothetical protein F15A17.180 - Arabidopsis >gi|7413592|emb|CAB86082.1| putative protein [Arabidopsis
  misc_feature (1)..(127): Homolog of NCBI NO: 15222242 NR Description: zinc finger protein, putative; protein id:
MRAHGDEYKTREALISPTSQDKKGGYSLKKHYYSCPQHGCRWNQRHEKFQPLKSVICAKNHYKRSHCPKMYMCRRCSVKHFSVLSDLRTHEKHCGDIKWVCSCGTKFSRKDKLMSHVSLFLGHVPAHGSSKPPTITLK

SEQ ID NO: 73368 - DNA, 1409 bp, Arabidopsis thaliana
  misc_feature (1)..(1409): Ceres Seq. ID no. 4964275
  misc_feature: MA Experiment ID: 108434 Result: Up-regulated in Transcription
  misc_feature: MA Experiment 108434 PARAMETER Experiment Name: At_Root_Tips_cDNA_P Parameter: Tissue Value: Root Tips
  misc_feature: MA Experiment ID: 108462 Result: Down-regulated in Transcription
  misc_feature: MA Experiment 108462 PARAMETER Experiment Name: At_Germinating_Seeds_cDNA_P Parameter: Age (day) Value: 2 vs. 0
  misc_feature: MA Experiment 108462 PARAMETER Experiment Name: At_Germinating_Seeds_cDNA_P Parameter: Tissue Value: Germinating Seeds
  misc_feature: MA Experiment ID: 108463 Result: Down-regulated in Transcription
  misc_feature: MA Experiment 108463 PARAMETER Experiment Name: At_Germinating_Seeds_cDNA_P Parameter: Age (day) Value: 3 vs. 0
  misc_feature: MA Experiment 108463 PARAMETER Experiment Name: At_Germinating_Seeds_cDNA_P Parameter: Tissue Value: Germinating Seeds
  misc_feature: MA Experiment ID: 108464 Result: Down-regulated in Transcription
  misc_feature: MA Experiment 108464 PARAMETER Experiment Name: At_Germinating_Seeds_cDNA_P Parameter: Age (day) Value: 4 vs. 0
  misc_feature: MA Experiment 108464 PARAMETER Experiment Name: At_Germinating_Seeds_cDNA_P Parameter: Tissue Value: Germinating Seeds
  misc_feature: MA Experiment ID: 108561 Result: Down-regulated in Transcription
  misc_feature: MA Experiment 108561 PARAMETER Experiment Name: At_100uM_ABA_cDNA_P Parameter: Timepoint (hr) Value: 6
  misc_feature: MA Experiment 108561 PARAMETER Experiment Name: At_100uM_ABA_cDNA_P Parameter: Tissue Value: Aerial
  misc_feature: MA Experiment 108561 PARAMETER Experiment Name: At_100uM_ABA_cDNA_P Parameter: Treatment Value: 100uM ABA vs. No Treatment
  misc_feature: MA Experiment ID: 108605 Result: Down-regulated in Transcription
  misc_feature: MA Experiment 108605 PARAMETER Experiment Name: At_100uM_ABA_cDNA_P Parameter: Timepoint (hr) Value: 6
  misc_feature: MA Experiment 108605 PARAMETER Experiment Name: At_100uM_ABA_cDNA_P Parameter: Tissue Value: Aerial
  misc_feature: MA Experiment 108605 PARAMETER Experiment Name: At_100uM_ABA_cDNA_P Parameter: Treatment Value: 100uM ABA vs. No Treatment
  misc_feature: MA Experiment ID: 20000069 Result: Down-regulated in Transcription
  misc_feature: MA Experiment 20000069 PARAMETER Experiment Name: At_100uM_ABA_Mutants_cDNA_P Parameter: Plant Line Value: CS23
  misc_feature: MA Experiment 20000069 PARAMETER Experiment Name: At_100uM_ABA_Mutants_cDNA_P Parameter: Timepoint (hr) Value: 6
  misc_feature: MA Experiment 20000069 PARAMETER Experiment Name: At_100uM_ABA_Mutants_cDNA_P Parameter: Tissue Value: Aerial
  misc_feature: MA Experiment 20000069 PARAMETER Experiment Name: At_100uM_ABA_Mutants_cDNA_P Parameter: Treatment Value: 100uM ABA vs. No Treatment
  misc_feature: MA Experiment ID: 20000117 Result: Down-regulated in Transcription
  misc_feature: MA Experiment 20000117 PARAMETER Experiment Name: At_100uM_ABA_Mutants_cDNA_P Parameter: Plant Line Value: Columbia
  misc_feature: MA Experiment 20000117 PARAMETER Experiment Name: At_100uM_ABA_Mutants_cDNA_P Parameter: Timepoint (hr) Value: 6
  misc_feature: MA Experiment 20000117 PARAMETER Experiment Name: At_100uM_ABA_Mutants_cDNA_P Parameter: Tissue Value: Aerial
  misc_feature: MA Experiment 20000117 PARAMETER Experiment Name: At_100uM_ABA_Mutants_cDNA_P Parameter: Treatment Value: 100uM ABA vs. No Treatment
  misc_feature: MA Experiment ID: 20001557 Result: Up-regulated in Transcription
  misc_feature: MA Experiment 20001557 PARAMETER Experiment Name: At_Drought_Soil_Dry_P Parameter: Age (day) Value: 27
  misc_feature: MA Experiment 20001557 PARAMETER Experiment Name: At_Drought_Soil_Dry_P Parameter: Organism Value: A. thaliana
  misc_feature: MA Experiment 20001557 PARAMETER Experiment Name: At_Drought_Soil_Dry_P Parameter: Plant Line Value: WS
  misc_feature: MA Experiment 20001557 PARAMETER Experiment Name: At_Drought_Soil_Dry_P Parameter: Post Timepoint (hr) Value: 3
  misc_feature: MA Experiment 20001557 PARAMETER Experiment Name: At_Drought_Soil_Dry_P Parameter: Post-Treatment Value: Re-Water vs. No Drought
  misc_feature: MA Experiment 20001557 PARAMETER Experiment Name: At_Drought_Soil_Dry_P Parameter: Timepoint (day) Value: 13
  misc_feature: MA Experiment 20001557 PARAMETER Experiment Name: At_Drought_Soil_Dry_P Parameter: Treatment Value: Drought vs. No Drought
aaaaagctcttttaggtcactctctatttttcgctccctcgccggactttgctgacgccgccggttatatcttctagtctcattcgtcgacatgaagctcactgttaagactctcaagggtagccattttgagattagggttcttcccaccgacacgataatggcggtgaagaagaatattgaagattcacaaagcaaagacaactatccttgtgggcagcaattactgattcacaatggaaaggttttgaaagatgaaactaccttggtggagaacaaggttaccgaggagggttttcttgtcgtgatgcttagcaagagcaaaactgcaagttcagctggtccctcttctactcagcctacttctaccacgacatctaccatatcttcaaccacgcttgcagctccgtcgacaacccagtctattgctgtgccggcttcaaattctactcccgttcaagaacaaccaacggcacaaagtgacacctatggtcaagctgcttcaactttagttagtggcagtagtattgagcaaatggttcaacaaataatggaaatgggaggaggcagttgggacaaagaaacggttactcgtgcacttcgtgcagcatataacaaccctgagagagcagtggattatctatattctggaattcctgaaacagtaaccattccagcaactaatttatctggagtaggatctggtagagaacttactgctcctcctccctctggaggccctaattcatctcctctggatttgtttccccaggaagcagtttctgatgcagcaggtggagatcttggaacgcttgaattcctcagaggcaatgatcagttccaacaattacgctccatggtcaattccaacccccagattctgcagcctatgcttcaagagctcggaaagcagaacccccaacttctgaggctaattcaagagaaccaagccgaatttcttcagttactaaacgagccctacgaaggatctgacggggatgtggatatcttcgatcaacctgatcaagaaatgccccactcagtcaacgttacccctgaagagcaagaatcaattgaacggcttgaggcaatggggtttgatagagcaatagtcatagaagccttcctttcctgtgaccgtaacgaggaattggctgcaaactatctactagagcactcagcagattttgaagactgagttccgagccttttaacctgaacaaagcacaagattttgttttgtttctccaccccttttatctgaactgttactatgctcagagaatcaaatgattatatcttacacctccatatttaccttgaagaataatctgcgttttccacactgtaaacacaattcattgtgtttctctctactgaaatgattattaacaatatgatatggtttt

SEQ ID NO: 73369 - protein, 368 aa, Arabidopsis thaliana; identical to SEQ ID NO: 21823
  peptide (1)..(368): Ceres Seq. ID no. 4964276
  misc_feature (1)..(78): Pfam Name: Ubiquitin family Pfam Description: Ubiquitin family
  misc_feature (1)..(368): Homolog of NCBI NO: 15221013 NR Description: hypothetical protein; protein id: At1g16190.1
  misc_feature (1)..(368): Homolog of NCBI NO: 30409722 NR Description: RAD23-like protein [Arabidopsis thaliana]
  misc_feature (1)..(368): Homolog of NCBI NO: 22330746 NR Description: DNA repair protein RAD23, putative; protein id: supported by cDNA: gi_14334441, supported by cDNA: gi_17104776 thaliana] >gi|14334442|gb|AAK59419.1| putative DNA repair protein
  misc_feature (1)..(368): Homolog of NCBI NO: 30409720 NR Description: RAD23-like protein [Arabidopsis thaliana]
  misc_feature (1)..(368): Homolog of NCBI NO: 30699439 NR Description: DNA repair protein RAD23 -related [Arabidopsis >gi|21593616|gb|AAM65583.1| DNA repair protein RAD23, putative
  misc_feature (1)..(368): Homolog of NCBI NO: 30409718 NR Description: RAD23-like protein [Arabidopsis thaliana]
  misc_feature (1)..(368): Homolog of NCBI NO: 25387250 NR Description: protein F20B17.8 [imported] - Arabidopsis >gi|7715605|gb|AAF68123.1|AC010793_18 F20B17.8 [Arabidopsis
  misc_feature (1)..(368): Homolog of NCBI NO: 7446460 NR Description: RAD23 protein, isoform II - carrot
  misc_feature (1)..(249): Homolog of NCBI NO: 25518044 NR Description: T24D18.27 protein - Arabidopsis thaliana Contains similarity to gb|Y12014 RAD23 protein isoform II from carota and is a member of the Ubiquitin PF|00240 family
  misc_feature (1)..(368): Homolog of NCBI NO: 15240922 NR Description: DNA repair protein RAD23 homolog; protein id: supported by cDNA: 36697., supported by cDNA: gi_14335003, by cDNA: gi_16648837, supported by cDNA: gi_19548080 [Arabidopsis

SEQ ID NO: 73370 - protein, 345 aa, Arabidopsis thaliana; identical to SEQ ID NO: 21824
  peptide (1)..(345): Ceres Seq. ID no. 4964277
  misc_feature (1)..(55): Pfam Name: Ubiquitin family Pfam Description: Ubiquitin family
  misc_feature (1)..(345): Homolog of NCBI NO: 15221013 NR Description: hypothetical protein; protein id: At1g16190.1
  misc_feature (1)..(345): Homolog of NCBI NO: 30409722 NR Description: RAD23-like protein [Arabidopsis thaliana]
  misc_feature (1)..(345): Homolog of NCBI NO: 22330746 NR Description: DNA repair protein RAD23, putative; protein id: supported by cDNA: gi_14334441, supported by cDNA: gi_17104776 thaliana] >gi|14334442|gb|AAK59419.1| putative DNA repair protein
  misc_feature (1)..(345): Homolog of NCBI NO: 30409720 NR Description: RAD23-like protein [Arabidopsis thaliana]
  misc_feature (1)..(345): Homolog of NCBI NO: 30699439 NR Description: DNA repair protein RAD23 -related [Arabidopsis >gi|21593616|gb|AAM65583.1| DNA repair protein RAD23, putative
  misc_feature (1)..(345): Homolog of NCBI NO: 30409718 NR Description: RAD23-like protein [Arabidopsis thaliana]
  misc_feature (1)..(345): Homolog of NCBI NO: 25387250 NR Description: protein F20B17.8 [imported] - Arabidopsis >gi|7715605|gb|AAF68123.1|AC010793_18 F20B17.8 [Arabidopsis
  misc_feature (1)..(345): Homolog of NCBI NO: 7446460 NR Description: RAD23 protein, isoform II - carrot
  misc_feature (1)..(226): Homolog of NCBI NO: 25518044 NR Description: T24D18.27 protein - Arabidopsis thaliana Contains similarity to gb|Y12014 RAD23 protein isoform II from carota and is a member of the Ubiquitin PF|00240 family
  misc_feature (1)..(345): Homolog of NCBI NO: 15240922 NR Description: DNA repair protein RAD23 homolog; protein id: supported by cDNA: 36697., supported by cDNA: gi_14335003, by cDNA: gi_16648837, supported by cDNA: gi_19548080 [Arabidopsis

SEQ ID NO: 73371 - protein, 296 aa, Arabidopsis thaliana; identical to SEQ ID NO: 21825
  peptide (1)..(296): Ceres Seq. ID no. 4964278
  misc_feature (73)..(115): Pfam Name: UBA/TS-N domain Pfam Description: UBA/TS-N domain
  misc_feature (1)..(296): Homolog of NCBI NO: 15221013 NR Description: hypothetical protein; protein id: At1g16190.1
  misc_feature (1)..(296): Homolog of NCBI NO: 30409722 NR Description: RAD23-like protein [Arabidopsis thaliana]
  misc_feature (1)..(296): Homolog of NCBI NO: 22330746 NR Description: DNA repair protein RAD23, putative; protein id: supported by cDNA: gi_14334441, supported by cDNA: gi_17104776 thaliana] >gi|14334442|gb|AAK59419.1| putative DNA repair protein
  misc_feature (1)..(296): Homolog of NCBI NO: 30409720 NR Description: RAD23-like protein [Arabidopsis thaliana]
  misc_feature (1)..(296): Homolog of NCBI NO: 30699439 NR Description: DNA repair protein RAD23 -related [Arabidopsis >gi|21593616|gb|AAM65583.1| DNA repair protein RAD23, putative
  misc_feature (1)..(296): Homolog of NCBI NO: 30409718 NR Description: RAD23-like protein [Arabidopsis thaliana]
  misc_feature (1)..(296): Homolog of NCBI NO: 25387250 NR Description: protein F20B17.8 [imported] - Arabidopsis >gi|7715605|gb|AAF68123.1|AC010793_18 F20B17.8 [Arabidopsis
  misc_feature (1)..(296): Homolog of NCBI NO: 7446460 NR Description: RAD23 protein, isoform II - carrot
  misc_feature (1)..(177): Homolog of NCBI NO: 25518044 NR Description: T24D18.27 protein - Arabidopsis thaliana Contains similarity to gb|Y12014 RAD23 protein isoform II from carota and is a member of the Ubiquitin PF|00240 family
  misc_feature (1)..(296): Homolog of NCBI NO: 15240922 NR Description: DNA repair protein RAD23 homolog; protein id: supported by cDNA: 36697., supported by cDNA: gi_14335003, by cDNA: gi_16648837, supported by cDNA: gi_19548080 [Arabidopsis

SEQ ID NO: 73372 - DNA, 1112 bp, Arabidopsis thaliana
  misc_feature (1)..(1112): Ceres Seq. ID no. 4964291
  misc_feature: MA Experiment ID: 108433 Result: Up-regulated in Transcription
  misc_feature: MA Experiment 108433 PARAMETER Experiment Name: At_rhl_Mutant2_cDNA_P Parameter: Age (day) Value: 7
  misc_feature: MA Experiment 108433 PARAMETER Experiment Name: At_rhl_Mutant2_cDNA_P Parameter: Organism Value: A. thaliana
  misc_feature: MA Experiment 108433 PARAMETER Experiment Name: At_rhl_Mutant2_cDNA_P Parameter: Plant Line Value: rhl Mutant vs. wt landsburg
  misc_feature: MA Experiment 108433 PARAMETER Experiment Name: At_rhl_Mutant2_cDNA_P Parameter: Tissue Value: Roots
  misc_feature: MA Experiment ID: 20000224 Result: Down-regulated in Transcription
atcagtttgctttcacagtggagtcggtgctctctttttttttcttctctctttcttttcacctctcgccggatcccggcgatcttataggaggcaaatctatcagtatcgttattctaggatctctaacaaacaatgaatcgccaccacgatcccaatcctttcgatgaggacgaagaaatcgtcaatcctttttcgaaaggtggtggaagggttcctgctgcatctaggccagttgaatatggtcaaagccttgatgctactgttgatattccattggataatatgaatgactcttcacagaaacagagaaagcttgctgactgggaagctgagctcaggaagaaagaaatggatataaagcgaagagaggaagctattgctaaatttggtgtgcagatagatgataaaaactggccaccgtttttcccaatcatacaccatgacattgctaaagagataccagttcatgcacaaaagctgcagtatctggctttcgctagttggttaggtatcgttctgtgtctggtattcaatgtcattgcaacgatggtctgctggattaaaggcggaggtgttaaaatctttttcctggccacaatatatgcattgatcggatgtccactctcttatgtactatggtacaggccactctaccgagccatgaggactgacagtgctttgaagtttggttggtttttcttcacctacttgattcacattggcttctgcatcgttgctgccatcgcccctccaatctttttccatggaaaatcattaacgggtgtgcttgcagcaattgatgtcatctcagacagtttattagctgggatcttctactttatcggattcggtctcttctgcttggagtcactgctgagtctatgggttcttcagaaaatttacctctactttaggggaaacaagtgaaaaggagataaagaggaagatgatggtaattttcccttacgatataaggtctgaaatatgtgtatctcctatgaatgtaattaccattttaccgtttgatgcgttgtgttgattgaggtaaattctttagttactatagtagcaagagagagtggttgttcggccatttctttatgtttttt

SEQ ID NO: 73373 - protein, 264 aa, Arabidopsis thaliana; identical to SEQ ID NO: 22900
  peptide (1)..(264): Ceres Seq. ID no. 4964292
  misc_feature (90)..(264): Pfam Name: SCAMP family Pfam Description: SCAMP family
  misc_feature (1)..(264): Homolog of NCBI NO: 15222550 NR Description: secretory carrier membrane protein, putative; id: At1g32050.1, supported by cDNA: 34837. [Arabidopsis thaliana]
  misc_feature (4)..(264): Homolog of NCBI NO: 38347080 NR Description: OSJNBa0006A01.21 [Oryza sativa (japonica
  misc_feature (1)..(262): Homolog of NCBI NO: 3941289 NR Description: similarity to SCAMP37 [Pisum sativum]
  misc_feature (1)..(263): Homolog of NCBI NO: 15226410 NR Description: putative secretory carrier-associated membrane protein id: At2g20840.1 [Arabidopsis thaliana]
  misc_feature (1)..(263): Homolog of NCBI NO: 7109232 NR Description: secretory carrier membrane protein [Oryza sativa]
  misc_feature (1)..(263): Homolog of NCBI NO: 15219893 NR Description: secretory carrier membrane protein; protein id: supported by cDNA: 27197., supported by cDNA: gi_15027862, by cDNA: gi_19310672, supported by cDNA: gi_7109227 [Arabidopsis
  misc_feature (4)..(254): Homolog of NCBI NO: 38567965 NR Description: OSJNBa0093F12.6 [Oryza sativa (japonica
  misc_feature (1)..(264): Homolog of NCBI NO: 15220305 NR Description: secretory carrier membrane protein, putative;
  misc_feature (28)..(264): Homolog of NCBI NO: 34899754 NR Description: putative secretory carrier membrane protein
  misc_feature (5)..(263): Homolog of NCBI NO: 18379111 NR Description: expressed protein; protein id: At1g03550.1, by cDNA: 30006. [Arabidopsis thaliana] F21B7.17 [Arabidopsis thaliana] >gi|21592580|gb|AAM64529.1|

SEQ ID NO: 73374 - protein, 214 aa, Arabidopsis thaliana; identical to SEQ ID NO: 22901
  peptide (1)..(214): Ceres Seq. ID no. 4964293
  misc_feature (40)..(214): Pfam Name: SCAMP family Pfam Description: SCAMP family
  misc_feature (1)..(214): Homolog of NCBI NO: 15222550 NR Description: secretory carrier membrane protein, putative; id: At1g32050.1, supported by cDNA: 34837. [Arabidopsis thaliana]
  misc_feature (1)..(214): Homolog of NCBI NO: 38347080 NR Description: OSJNBa0006A01.21 [Oryza sativa (japonica
  misc_feature (1)..(212): Homolog of NCBI NO: 3941289 NR Description: similarity to SCAMP37 [Pisum sativum]
  misc_feature (1)..(213): Homolog of NCBI NO: 15226410 NR Description: putative secretory carrier-associated membrane protein id: At2g20840.1 [Arabidopsis thaliana]
  misc_feature (1)..(213): Homolog of NCBI NO: 7109232 NR Description: secretory carrier membrane protein [Oryza sativa]
  misc_feature (1)..(213): Homolog of NCBI NO: 15219893 NR Description: secretory carrier membrane protein; protein id: supported by cDNA: 27197., supported by cDNA: gi_15027862, by cDNA: gi_19310672, supported by cDNA: gi_7109227 [Arabidopsis
  misc_feature (1)..(204): Homolog of NCBI NO: 38567965 NR Description: OSJNBa0093F12.6 [Oryza sativa (japonica
  misc_feature (1)..(214): Homolog of NCBI NO: 15220305 NR Description: secretory carrier membrane protein, putative;
  misc_feature (1)..(214): Homolog of NCBI NO: 34899754 NR Description: putative secretory carrier membrane protein
  misc_feature (1)..(213): Homolog of NCBI NO: 18379111 NR Description: expressed protein; protein id: At1g03550.1, by cDNA: 30006. [Arabidopsis thaliana] F21B7.17 [Arabidopsis thaliana] >gi|21592580|gb|AAM64529.1|

SEQ ID NO: 73375 - protein, 192 aa, Arabidopsis thaliana; identical to SEQ ID NO: 22902
  peptide (1)..(192): Ceres Seq. ID no. 4964294
  misc_feature (18)..(192): Pfam Name: SCAMP family Pfam Description: SCAMP family
  misc_feature (1)..(192): Homolog of NCBI NO: 15222550 NR Description: secretory carrier membrane protein, putative; id: At1g32050.1, supported by cDNA: 34837. [Arabidopsis thaliana]
  misc_feature (1)..(192): Homolog of NCBI NO: 38347080 NR Description: OSJNBa0006A01.21 [Oryza sativa (japonica
  misc_feature (1)..(190): Homolog of NCBI NO: 3941289 NR Description: similarity to SCAMP37 [Pisum sativum]
  misc_feature (1)..(191): Homolog of NCBI NO: 15226410 NR Description: putative secretory carrier-associated membrane protein id: At2g20840.1 [Arabidopsis thaliana]
  misc_feature (1)..(191): Homolog of NCBI NO: 7109232 NR Description: secretory carrier membrane protein [Oryza sativa]
  misc_feature (1)..(191): Homolog of NCBI NO: 15219893 NR Description: secretory carrier membrane protein; protein id: supported by cDNA: 27197., supported by cDNA: gi_15027862, by cDNA: gi_19310672, supported by cDNA: gi_7109227 [Arabidopsis
  misc_feature (1)..(182): Homolog of NCBI NO: 38567965 NR Description: OSJNBa0093F12.6 [Oryza sativa (japonica
  misc_feature (1)..(192): Homolog of NCBI NO: 15220305 NR Description: secretory carrier membrane protein, putative;
  misc_feature (1)..(192): Homolog of NCBI NO: 34899754 NR Description: putative secretory carrier membrane protein
  misc_feature (1)..(191): Homolog of NCBI NO: 18379111 NR Description: expressed protein; protein id: At1g03550.1, by cDNA: 30006. [Arabidopsis thaliana] F21B7.17 [Arabidopsis thaliana] >gi|21592580|gb|AAM64529.1|

SEQ ID NO: 73376 - DNA, 1180 bp, Arabidopsis thaliana
  misc_feature (1)..(1180): Ceres Seq. ID no. 4964369
  misc_feature: MA Experiment ID: 108434 Result: Down-regulated in Transcription
  misc_feature: MA Experiment 108434 PARAMETER Experiment Name: At_Root_Tips_cDNA_P Parameter: Tissue Value: Root Tips
  misc_feature: MA Experiment ID: 108595 Result: Down-regulated in Transcription
  misc_feature: MA Experiment 108595 PARAMETER Experiment Name: At_Ler-pi_Ovule_cDNA_P Parameter: Plant Line Value: null
  misc_feature: MA Experiment ID: 20000111 Result: Down-regulated in Transcription
  misc_feature: MA Experiment 20000111 PARAMETER Experiment Name: At_42deg_Heat_cDNA_P Parameter: Temperature (deg C) Value: 42 vs. 22
  misc_feature: MA Experiment 20000111 PARAMETER Experiment Name: At_42deg_Heat_cDNA_P Parameter: Timepoint (hr) Value: 6
  misc_feature: MA Experiment 20000111 PARAMETER Experiment Name: At_42deg_Heat_cDNA_P Parameter: Tissue Value: Aerial
  misc_feature: MA Experiment ID: 20000113 Result: Down-regulated in Transcription
  misc_feature: MA Experiment 20000113 PARAMETER Experiment Name: At_42deg_Heat_cDNA_P Parameter: Temperature (deg C) Value: 42 vs. 22
  misc_feature: MA Experiment 20000113 PARAMETER Experiment Name: At_42deg_Heat_cDNA_P Parameter: Timepoint (hr) Value: 8
  misc_feature: MA Experiment 20000113 PARAMETER Experiment Name: At_42deg_Heat_cDNA_P Parameter: Tissue Value: Aerial
aaaccagaattattaaatttgatttcagtggatataaatttctctcaagaaaacgacattaacgaaggagagccaaagcttcgtcgttgatcattcctccgtagttgcggaattgaacccaacttaggaatcaaatgcccaagatctgctgctctcgttccgctacacaagttgtggtagcacaaaaatcaaactcgggtaaaggaagaaacggtgaaggaggaatcaagtatggatttagtttgataaaagggaaatctaaccattcaatggaggattatcatgttgctaagtttaccaatttcaatggcaatgaattggggctttttgcaatctttgatggtcataaaggtgatcatgttgctgcttatctgcagaaacatctcttctctaatatccttaaagatggagagttcttggttgatcctcgaagagcaattgcgaaagcttatgagaatacagatcaaaagattttagcagataatagaacggatttagagagtggtggttcgactgctgtgactgcgattttgatcaatgggaaagctttgtggatagctaatgttggtgattcacgagctattgtttctagtcgaggtaaagcaaaacagatgagtgttgatcatgatcctgatgatgatactgagaggagtatgattgagagtaaaggtggatttgtgaccaacagaccgtgatgttcctcgagtgaacggtttgttagcggtctctcgtgtctttggagataaaaaccttaaagcatatttgaactcagagcctgagattaaggacgtaaccattgatagtcacacagattttcttattctggctagtgacggtatttcgaaggtgatgtcaaaccaagaagcagttgatgtagctaagaagttgaaagatccaaaggaagcggcgaggcaagtagttgctgaagcattgaaaagaaacagcaaggatgacatatcttgcattgttgtccggtttagatgataaccaagaagactcagcttatattggatttggagcttcctttgcttcaccatgattcttttggggtccggtttagtttgattctgggtcttggttacttgtgcatttttaagaacatgagtttgaataggactattatatattactagtttgacaaaccagatattttatcatataaattacatgaaaagaatag

SEQ ID NO: 73377 - protein, 186 aa, Arabidopsis thaliana; identical to SEQ ID NO: 24675
  peptide (1)..(186): Ceres Seq. ID no. 4964370
  misc_feature (33)..(186): Pfam Name: Protein phosphatase 2C Pfam Description: Protein phosphatase 2C
  misc_feature (1)..(186): Homolog of NCBI NO: 18411863 NR Description: protein phosphatase 2C (PP2C); protein id: supported by cDNA: gi_15081702 [Arabidopsis thaliana]
  misc_feature (1)..(186): Homolog of NCBI NO: 15081703 NR Description: At1g78200/T11I11_14 [Arabidopsis thaliana]
  misc_feature (46)..(186): Homolog of NCBI NO: 25406547 NR Description: hypothetical protein T11I11.14 [imported] - thaliana >gi|12324254|gb|AAG52101.1|AC012680_12 putative protein
  misc_feature (1)..(186): Homolog of NCBI NO: 18395099 NR Description: protein phosphatase 2C (PP2C), putative; protein At1g22280.1, supported by cDNA: 119977., supported by cDNA:
  misc_feature (1)..(186): Homolog of NCBI NO: 21537096 NR Description: protein phosphatase type 2C, putative
  misc_feature (1)..(186): Homolog of NCBI NO: 15218759 NR Description: protein phosphatase 2C (PP2C); protein id: supported by cDNA: gi_13877698 [Arabidopsis thaliana] Strong similarity to gb|AF092432 protein phosphatase type 2C from
  misc_feature (8)..(186): Homolog of NCBI NO: 32488822 NR Description: OSJNBa0085I10.2 [Oryza sativa (japonica
  misc_feature (22)..(186): Homolog of NCBI NO: 18417190 NR Description: protein phosphatase 2C (PP2C); protein id: supported by cDNA: gi_16604584, supported by cDNA: gi_20258990 thaliana] >gi|16604585|gb|AAL24149.1| putative protein putative
  misc_feature (19)..(186): Homolog of NCBI NO: 18399423 NR Description: protein phosphatase 2C (PP2C); protein id: supported by cDNA: 22316., supported by cDNA: gi_15724169, by cDNA: gi_18652944, supported by cDNA: gi_20147398 [Arabidopsis
  misc_feature (46)..(186): Homolog of NCBI NO: 38567903 NR Description: OSJNBa0060N03.23 [Oryza sativa (japonica

SEQ ID NO: 73378 - protein, 141 aa, Arabidopsis thaliana; identical to SEQ ID NO: 24676
  peptide (1)..(141): Ceres Seq. ID no. 4964371
  misc_feature (1)..(141): Pfam Name: Protein phosphatase 2C Pfam Description: Protein phosphatase 2C
  misc_feature (1)..(141): Homolog of NCBI NO: 18411863 NR Description: protein phosphatase 2C (PP2C); protein id: supported by cDNA: gi_15081702 [Arabidopsis thaliana]
  misc_feature (1)..(141): Homolog of NCBI NO: 15081703 NR Description: At1g78200/T11I11_14 [Arabidopsis thaliana]
  misc_feature (1)..(141): Homolog of NCBI NO: 25406547 NR Description: hypothetical protein T11I11.14 [imported] - thaliana >gi|12324254|gb|AAG52101.1|AC012680_12 putative protein
  misc_feature (1)..(141): Homolog of NCBI NO: 18395099 NR Description: protein phosphatase 2C (PP2C), putative; protein At1g22280.1, supported by cDNA: 119977., supported by cDNA:
  misc_feature (1)..(141): Homolog of NCBI NO: 21537096 NR Description: protein phosphatase type 2C, putative
  misc_feature (1)..(141): Homolog of NCBI NO: 15218759 NR Description: protein phosphatase 2C (PP2C); protein id: supported by cDNA: gi_13877698 [Arabidopsis thaliana] Strong similarity to gb|AF092432 protein phosphatase type 2C from
  misc_feature (1)..(141): Homolog of NCBI NO: 32488822 NR Description: OSJNBa0085I10.2 [Oryza sativa (japonica
  misc_feature (1)..(141): Homolog of NCBI NO: 18417190 NR Description: protein phosphatase 2C (PP2C); protein id: supported by cDNA: gi_16604584, supported by cDNA: gi_20258990 thaliana] >gi|16604585|gb|AAL24149.1| putative protein putative
  misc_feature (1)..(141): Homolog of NCBI NO: 18399423 NR Description: protein phosphatase 2C (PP2C); protein id: supported by cDNA: 22316., supported by cDNA: gi_15724169, by cDNA: gi_18652944, supported by cDNA: gi_20147398 [Arabidopsis
  misc_feature (1)..(141): Homolog of NCBI NO: 38567903 NR Description: OSJNBa0060N03.23 [Oryza sativa (japonica

SEQ ID NO: 73379 - DNA, 1928 bp, Arabidopsis thaliana
  misc_feature (1)..(1928): Ceres Seq. ID no. 4964561
  misc_feature: MA Experiment ID: 108569 Result: Up-regulated in Transcription
  misc_feature: MA Experiment 108569 PARAMETER Experiment Name: At_0.001%_MeJA__cDNA_P Parameter: Timepoint (hr) Value: 6
  misc_feature: MA Experiment 108569 PARAMETER Experiment Name: At_0.001%_MeJA__cDNA_P Parameter: Tissue Value: Aerial
  misc_feature: MA Experiment 108569 PARAMETER Experiment Name: At_0.001%_MeJA__cDNA_P Parameter: Treatment Value: 0.001% MeJA vs. No Treatment
  misc_feature: MA Experiment ID: 108573 Result: Up-regulated in Transcription
  misc_feature: MA Experiment 108573 PARAMETER Experiment Name: At_Drought_cDNA_P Parameter: Timepoint (hr) Value: 6
  misc_feature: MA Experiment 108573 PARAMETER Experiment Name: At_Drought_cDNA_P Parameter: Tissue Value: Aerial
  misc_feature: MA Experiment 108573 PARAMETER Experiment Name: At_Drought_cDNA_P Parameter: Treatment Value: Drought vs. No Drought
  misc_feature: MA Experiment ID: 108576 Result: Down-regulated in Transcription
  misc_feature: MA Experiment 108576 PARAMETER Experiment Name: At_42deg_Heat_cDNA_P Parameter: Temperature (deg C) Value: 42 vs. 22
  misc_feature: MA Experiment 108576 PARAMETER Experiment Name: At_42deg_Heat_cDNA_P Parameter: Timepoint (hr) Value: 1
  misc_feature: MA Experiment 108576 PARAMETER Experiment Name: At_42deg_Heat_cDNA_P Parameter: Tissue Value: Aerial
  misc_feature: MA Experiment ID: 108577 Result: Down-regulated in Transcription
  misc_feature: MA Experiment 108577 PARAMETER Experiment Name: At_42deg_Heat_cDNA_P Parameter: Temperature (deg C) Value: 42 vs. 22
  misc_feature: MA Experiment 108577 PARAMETER Experiment Name: At_42deg_Heat_cDNA_P Parameter: Timepoint (hr) Value: 6
  misc_feature: MA Experiment 108577 PARAMETER Experiment Name: At_42deg_Heat_cDNA_P Parameter: Tissue Value: Aerial
  misc_feature: MA Experiment ID: 108585 Result: Up-regulated in Transcription
  misc_feature: MA Experiment 108585 PARAMETER Experiment Name: At_5mM_NaNP_cDNA_P Parameter: Timepoint (hr) Value: 6
  misc_feature: MA Experiment 108585 PARAMETER Experiment Name: At_5mM_NaNP_cDNA_P Parameter: Tissue Value: Aerial
  misc_feature: MA Experiment 108585 PARAMETER Experiment Name: At_5mM_NaNP_cDNA_P Parameter: Treatment Value: null
  misc_feature: MA Experiment ID: 20000113 Result: Down-regulated in Transcription
  misc_feature: MA Experiment 20000113 PARAMETER Experiment Name: At_42deg_Heat_cDNA_P Parameter: Temperature (deg C) Value: 42 vs. 22
  misc_feature: MA Experiment 20000113 PARAMETER Experiment Name: At_42deg_Heat_cDNA_P Parameter: Timepoint (hr) Value: 8
  misc_feature: MA Experiment 20000113 PARAMETER Experiment Name: At_42deg_Heat_cDNA_P Parameter: Tissue Value: Aerial
  misc_feature: MA Experiment ID: 20000171 Result: Down-regulated in Transcription
  misc_feature: MA Experiment 20000171 PARAMETER Experiment Name: At_42deg_Heat_P Parameter: Age (day) Value: 14
  misc_feature: MA Experiment 20000171 PARAMETER Experiment Name: At_42deg_Heat_P Parameter: Organism Value: A. thaliana
  misc_feature: MA Experiment 20000171 PARAMETER Experiment Name: At_42deg_Heat_P Parameter: Plant Line Value: WS
  misc_feature: MA Experiment 20000171 PARAMETER Experiment Name: At_42deg_Heat_P Parameter: Temperature (deg C) Value: 42 vs. 22
  misc_feature: MA Experiment 20000171 PARAMETER Experiment Name: At_42deg_Heat_P Parameter: Timepoint (hr) Value: 1
  misc_feature: MA Experiment 20000171 PARAMETER Experiment Name: At_42deg_Heat_P Parameter: Tissue Value: Aerial
  misc_feature: MA Experiment ID: 20000173 Result: Down-regulated in Transcription
  misc_feature: MA Experiment 20000173 PARAMETER Experiment Name: At_42deg_Heat_P Parameter: Age (day) Value: 14
  misc_feature: MA Experiment 20000173 PARAMETER Experiment Name: At_42deg_Heat_P Parameter: Organism Value: A. thaliana
  misc_feature: MA Experiment 20000173 PARAMETER Experiment Name: At_42deg_Heat_P Parameter: Plant Line Value: WS
  misc_feature: MA Experiment 20000173 PARAMETER Experiment Name: At_42deg_Heat_P Parameter: Temperature (deg C) Value: 42 vs. 22
  misc_feature: MA Experiment 20000173 PARAMETER Experiment Name: At_42deg_Heat_P Parameter: Timepoint (hr) Value: 6
  misc_feature: MA Experiment 20000173 PARAMETER Experiment Name: At_42deg_Heat_P Parameter: Tissue Value: Aerial
  misc_feature: MA Experiment ID: 20000185 Result: Up-regulated in Transcription
  misc_feature: MA Experiment 20000185 PARAMETER Experiment Name: At_Roots__P Parameter: Age (day) Value: 7 vs. 21
  misc_feature: MA Experiment 20000185 PARAMETER Experiment Name: At_Roots__P Parameter: Organism Value: A. thaliana
  misc_feature: MA Experiment 20000185 PARAMETER Experiment Name: At_Roots__P Parameter: Tissue Value: Roots vs. Whole Plant
  misc_feature: MA Experiment ID: 20001451 Result: Up-regulated in Transcription
  misc_feature: MA Experiment 20001451 PARAMETER Experiment Name: At_Far-red-induction_P Parameter: Age (day) Value: 7
  misc_feature: MA Experiment 20001451 PARAMETER Experiment Name: At_Far-red-induction_P Parameter: Light Value: Far-red vs. White
  misc_feature: MA Experiment 20001451 PARAMETER Experiment Name: At_Far-red-induction_P Parameter: Organism Value: A. thaliana
  misc_feature: MA Experiment 20001451 PARAMETER Experiment Name: At_Far-red-induction_P Parameter: Plant Line Value: Columbia
  misc_feature: MA Experiment 20001451 PARAMETER Experiment Name: At_Far-red-induction_P Parameter: Timepoint (hr) Value: 24
  misc_feature: MA Experiment 20001451 PARAMETER Experiment Name: At_Far-red-induction_P Parameter: Tissue Value: Whole Plant
gattgattccaatcttctttcattttcttcttcttcttcttctggggaaggggcaggttaaaattatgccatctattcaaatcgtgcctatcctcagatcttaactcttttctctacgagattcggcatctgggttttattcttcttgagcaaaatgcaatcggataatggaaagcttttcatcggtgggatatcttgggacaccaatgaggaacgtctcaaggagtatttcagcagttttggagaagtgatcgaagctgtcatcttgaaagatcgtaccactggtcgtgctcgtggtttcggttttgttgtttttgctgatcctgctgttgctgagattgttatcaccgaaaaacataatattgatggcagattggttgaagccaagaaagctgttcccagagatgaccaaaacatggtaaatagaagcaacagcagtagcatccaaggttctcccggtggtccaggtcgcacaaggaagatatttgttggaggattaccttcttcggttacagagagtgatttcaagacgtattttgagcagtttggtacaactacggatgtggttgtcatgtatgatcacaacacacaaaggcctagaggtttcgggtttataacctacgattccgaggaggcggttgaaaaggtattgctcaagacattccatgaactaaatggtaaaatggttgaggttaagcgagctgttccaaaggagttatctccaggtccaagtcgcagtcctcttggtgcaggttacagctatggagttaatagggtcaataacctccttaatgggtatgctcaagggtttaatcccgctgcagttggaggctacggacttaggatggatggtcggttcagtccggttggtgctggaagaagcgggtttgcaaattacagttctggatacgggatgaatgtgaactttgatcagggattgcccacagggttcacgggaggtacaaattacaatggaaatgttgactatggccgaggaatgagcccgtactacattggtaacacaaacaggtttggtcctgcggttggctatgaagggggcaacggaggaggaaactcatccttcttcagttcggttacacggaacttatggggaaacaatggtggtcttaactataacaacaataatacaaactcaaactccaatacatatatgggaggatcatcaagtgggaacaacacacttagtggtccatttggaaattcaggagtcaattggggtgctcctggaggaggaaacaatgctgtgagtaacgagaatgtgaagtttggttatggaggaaacggtgaatctggttttgggttgggaacaggtggttatgcagcaagaaacccaggggctaacaaggcagcaccatcctcttcattctcttctgcctcagcaaccaacaacacgggttatgatacagcaggacttgcagagttttacgggaatggtgcagtttatagtgaccctacatggagatcaccaactcctgagacagaagggcctgctccttttagctatgggattggaggaggggttccttcttcagatgtttcagctagaagttcatctccaggttatgttggcagttacagtgtgaacaagagacaaccaaacagaggcgagccatcacggtgaacgatctgtgtcttttggcgaatcttttagattatcttcttttcccttcatacaaagccagtgaggacgaaacttgatcatatcatcacctagagctaaccagagaatcccgcagacttttctgtcatggtttggttttctaaattcattgttcctcctaggcttttttctgctttctttttttttctatttttgttttcttttcttctttcaatgagggacagaagaaactgtatcagtctccggcgaggcggtaatacataaggagagttcaaaacaaaaaccc

SEQ ID NO: 73380 - protein, 495 aa, Arabidopsis thaliana
  peptide (1)..(495): Ceres Seq. ID no. 4964562
  misc_feature (110)..(180): Pfam Name: RNA recognition motif. (a.k.a. RRM, RBD, or RNP domain) Pfam Description: RNA recognition motif. (a.k.a. RRM, RBD, or RNP
  misc_feature (1)..(495): Homolog of NCBI NO: 30680456 NR Description: heterogeneous nuclear ribonucleoprotein (hnRNP),
  misc_feature (1)..(491): Homolog of NCBI NO: 6648193 NR Description: putative RNA-binding protein [Arabidopsis
  misc_feature (1)..(491): Homolog of NCBI NO: 18398061 NR Description: heterogeneous nuclear ribonucleoprotein (hnRNP), protein id: At3g07810.1, supported by cDNA: gi_15292696, by cDNA: gi_16930692 [Arabidopsis thaliana]
  misc_feature (1)..(491): Homolog of NCBI NO: 15292697 NR Description: putative RNA-binding protein [Arabidopsis
  misc_feature (1)..(452): Homolog of NCBI NO: 38175737 NR Description: putative heterogeneous nuclear ribonucleoprotein
  misc_feature (1)..(400): Homolog of NCBI NO: 9758790 NR Description: RNA-binding protein-like [Arabidopsis thaliana]
  misc_feature (1)..(391): Homolog of NCBI NO: 21553963 NR Description: RNA-binding protein-like [Arabidopsis thaliana]
  misc_feature (1)..(391): Homolog of NCBI NO: 18422817 NR Description: heterogeneous nuclear ribonucleoprotein (hnRNP), protein id: At5g47620.1, supported by cDNA: 1876. [Arabidopsis
  misc_feature (1)..(443): Homolog of NCBI NO: 18416794 NR Description: heterogeneous nuclear ribonucleoprotein (hnRNP), protein id: At4g26650.1, supported by cDNA: gi_16930502, by cDNA: gi_20453244 [Arabidopsis thaliana]
  misc_feature (3)..(443): Homolog of NCBI NO: 7487039 NR Description: hypothetical protein T15N24.100 - Arabidopsis
MQSDNGKLFIGGISWDTNEERLKEYFSSFGEVIEAVILKDRTTGRARGFGFVVFADPAVAEIVITEKHNIDGRLVEAKKAVPRDDQNMVNRSNSSSIQGSPGGPGRTRKIFVGGLPSSVTESDFKTYFEQFGTTTDVVVMYDHNTQRPRGFGFITYDSEEAVEKVLLKTFHELNGKMVEVKRAVPKELSPGPSRSPLGAGYSYGVNRVNNLLNGYAQGFNPAAVGGYGLRMDGRFSPVGAGRSGFANYSSGYGMNVNFDQGLPTGFTGGTNYNGNVDYGRGMSPYYIGNTNRFGPAVGYEGGNGGGNSSFFSSVTRNLWGNNGGLNYNNNNTNSNSNTYMGGSSSGNNTLSGPFGNSGVNWGAPGGGNNAVSNENVKFGYGGNGESGFGLGTGGYAARNPGANKAAPSSSFSSASATNNTGYDTAGLAEFYGNGAVYSDPTWRSPTPETEGPAPFSYGIGGGVPSSDVSARSSSPGYVGSYSVNKRQPNRGEPSR

SEQ ID NO: 73381 - protein, 408 aa, Arabidopsis thaliana
  peptide (1)..(408): Ceres Seq. ID no. 4964563
  misc_feature (23)..(93): Pfam Name: RNA recognition motif. (a.k.a. RRM, RBD, or RNP domain) Pfam Description: RNA recognition motif. (a.k.a. RRM, RBD, or RNP
  misc_feature (1)..(408): Homolog of NCBI NO: 30680456 NR Description: heterogeneous nuclear ribonucleoprotein (hnRNP),
  misc_feature (1)..(404): Homolog of NCBI NO: 6648193 NR Description: putative RNA-binding protein [Arabidopsis
  misc_feature (1)..(404): Homolog of NCBI NO: 18398061 NR Description: heterogeneous nuclear ribonucleoprotein (hnRNP), protein id: At3g07810.1, supported by cDNA: gi_15292696, by cDNA: gi_16930692 [Arabidopsis thaliana]
  misc_feature (1)..(404): Homolog of NCBI NO: 15292697 NR Description: putative RNA-binding protein [Arabidopsis
  misc_feature (1)..(365): Homolog of NCBI NO: 38175737 NR Description: putative heterogeneous nuclear ribonucleoprotein
  misc_feature (1)..(313): Homolog of NCBI NO: 9758790 NR Description: RNA-binding protein-like [Arabidopsis thaliana]
  misc_feature (1)..(304): Homolog of NCBI NO: 21553963 NR Description: RNA-binding protein-like [Arabidopsis thaliana]
  misc_feature (1)..(304): Homolog of NCBI NO: 18422817 NR Description: heterogeneous nuclear ribonucleoprotein (hnRNP), protein id: At5g47620.1, supported by cDNA: 1876. [Arabidopsis
  misc_feature (1)..(356): Homolog of NCBI NO: 18416794 NR Description: heterogeneous nuclear ribonucleoprotein (hnRNP), protein id: At4g26650.1, supported by cDNA: gi_16930502, by cDNA: gi_20453244 [Arabidopsis thaliana]
  misc_feature (1)..(356): Homolog of NCBI NO: 7487039 NR Description: hypothetical protein T15N24.100 - Arabidopsis
MVNRSNSSSIQGSPGGPGRTRKIFVGGLPSSVTESDFKTYFEQFGTTTDVVVMYDHNTQRPRGFGFITYDSEEAVEKVLLKTFHELNGKMVEVKRAVPKELSPGPSRSPLGAGYSYGVNRVNNLLNGYAQGFNPAAVGGYGLRMDGRFSPVGAGRSGFANYSSGYGMNVNFDQGLPTGFTGGTNYNGNVDYGRGMSPYYIGNTNRFGPAVGYEGGNGGGNSSFFSSVTRNLWGNNGGLNYNNNNTNSNSNTYMGGSSSGNNTLSGPFGNSGVNWGAPGGGNNAVSNENVKFGYGGNGESGFGLGTGGYAARNPGANKAAPSSSFSSASATNNTGYDTAGLAEFYGNGAVYSDPTWRSPTPETEGPAPFSYGIGGGVPSSDVSARSSSPGYVGSYSVNKRQPNRGEPSR

SEQ ID NO: 73382 - protein, 356 aa, Arabidopsis thaliana
  peptide (1)..(356): Ceres Seq. ID no. 4964564
  misc_feature (1)..(356): Homolog of NCBI NO: 30680456 NR Description: heterogeneous nuclear ribonucleoprotein (hnRNP),
  misc_feature (1)..(352): Homolog of NCBI NO: 6648193 NR Description: putative RNA-binding protein [Arabidopsis
  misc_feature (1)..(352): Homolog of NCBI NO: 18398061 NR Description: heterogeneous nuclear ribonucleoprotein (hnRNP), protein id: At3g07810.1, supported by cDNA: gi_15292696, by cDNA: gi_16930692 [Arabidopsis thaliana]
  misc_feature (1)..(352): Homolog of NCBI NO: 15292697 NR Description: putative RNA-binding protein [Arabidopsis
  misc_feature (1)..(313): Homolog of NCBI NO: 38175737 NR Description: putative heterogeneous nuclear ribonucleoprotein
  misc_feature (1)..(261): Homolog of NCBI NO: 9758790 NR Description: RNA-binding protein-like [Arabidopsis thaliana]
  misc_feature (1)..(252): Homolog of NCBI NO: 21553963 NR Description: RNA-binding protein-like [Arabidopsis thaliana]
  misc_feature (1)..(252): Homolog of NCBI NO: 18422817 NR Description: heterogeneous nuclear ribonucleoprotein (hnRNP), protein id: At5g47620.1, supported by cDNA: 1876. [Arabidopsis
  misc_feature (1)..(304): Homolog of NCBI NO: 18416794 NR Description: heterogeneous nuclear ribonucleoprotein (hnRNP), protein id: At4g26650.1, supported by cDNA: gi_16930502, by cDNA: gi_20453244 [Arabidopsis thaliana]
  misc_feature (1)..(304): Homolog of NCBI NO: 7487039 NR Description: hypothetical protein T15N24.100 - Arabidopsis
MYDHNTQRPRGFGFITYDSEEAVEKVLLKTFHELNGKMVEVKRAVPKELSPGPSRSPLGAGYSYGVNRVNNLLNGYAQGFNPAAVGGYGLRMDGRFSPVGAGRSGFANYSSGYGMNVNFDQGLPTGFTGGTNYNGNVDYGRGMSPYYIGNTNRFGPAVGYEGGNGGGNSSFFSSVTRNLWGNNGGLNYNNNNTNSNSNTYMGGSSSGNNTLSGPFGNSGVNWGAPGGGNNAVSNENVKFGYGGNGESGFGLGTGGYAARNPGANKAAPSSSFSSASATNNTGYDTAGLAEFYGNGAVYSDPTWRSPTPETEGPAPFSYGIGGGVPSSDVSARSSSPGYVGSYSVNKRQPNRGEPSR

SEQ ID NO: 73383 - DNA, 1498 bp, Arabidopsis thaliana
  misc_feature (1)..(1498): Ceres Seq. ID no. 4964597
  misc_feature: MA Experiment ID: 108462 Result: Down-regulated in Transcription
  misc_feature: MA Experiment 108462 PARAMETER Experiment Name: At_Germinating_Seeds_cDNA_P Parameter: Age (day) Value: 2 vs. 0
  misc_feature: MA Experiment 108462 PARAMETER Experiment Name: At_Germinating_Seeds_cDNA_P Parameter: Tissue Value: Germinating Seeds
  misc_feature: MA Experiment ID: 108463 Result: Down-regulated in Transcription
  misc_feature: MA Experiment 108463 PARAMETER Experiment Name: At_Germinating_Seeds_cDNA_P Parameter: Age (day) Value: 3 vs. 0
  misc_feature: MA Experiment 108463 PARAMETER Experiment Name: At_Germinating_Seeds_cDNA_P Parameter: Tissue Value: Germinating Seeds
  misc_feature: MA Experiment ID: 108464 Result: Down-regulated in Transcription
  misc_feature: MA Experiment 108464 PARAMETER Experiment Name: At_Germinating_Seeds_cDNA_P Parameter: Age (day) Value: 4 vs. 0
  misc_feature: MA Experiment 108464 PARAMETER Experiment Name: At_Germinating_Seeds_cDNA_P Parameter: Tissue Value: Germinating Seeds
  misc_feature: MA Experiment ID: 108573 Result: Up-regulated in Transcription
  misc_feature: MA Experiment 108573 PARAMETER Experiment Name: At_Drought_cDNA_P Parameter: Timepoint (hr) Value: 6
  misc_feature: MA Experiment 108573 PARAMETER Experiment Name: At_Drought_cDNA_P Parameter: Tissue Value: Aerial
  misc_feature: MA Experiment 108573 PARAMETER Experiment Name: At_Drought_cDNA_P Parameter: Treatment Value: Drought vs. No Drought
  misc_feature: MA Experiment ID: 20000224 Result: Up-regulated in Transcription
  misc_feature: Pfam Name: DUF1692 Pfam Description: Protein of unknown function (DUF1692)
gattgtctctctcccggagatctctctttctcttcttctccatccttcttctctcggcgcgcgcttcatccccaccaccttcgaattcgtgccctttgagggaagctgctaggatgggtgtgaagcaggctctaaggagcattgatgcgtttccaagagcagaggatcatttgcttcagaagacacaatctggcgctgttgtatctattgttggacttcttataatggctactttgttcttacacgagctgagttattatcttaacacacttacagtgcaccaggatgtcagtggacttaaagcgtggagaaactcttccaattcatgtaaatatgacgtttccatctttaccttgtgatgtactgagcgtagatgctatcgacatgtcagggaagcatgaagtggatcttgatacaaacatttggaagctccgtctcaacagtcatggtcatatcataggcacagaatatatatctgatcttgttgaaaaggggcatgagcatggccactcacctcacaagcatgatggcaaagaagaacacaagaatgagactgaaaccgaagcattgaatattcttggctttgaccaagctgctgagactatgattaaaaaagtgaagcaagcattggcagatggagaaggatgtcgggtttatggtgtcctagatgtacaacgggttgccggaaacttccatatttcagttcatgggctgaacatctatgttgctcagatgatatttggcgggtccaaaaacgtaaacgtgagccatatgattcacgatctatcatttgggccgaaataccccggaattcacaacccacttgatgacaccaaccgaatactccatgacaccagtggaacattcaaatactatattaagattgttcccacagaatatagatatctttcaaaagacgtactgtcaacaaatcagtactctgtaactgaatatttcacgccaatgactgaattcgaccgtacatggccagctgtttacttcttatatgatctttcacctatcactgtgaccatcaaggaagaacgccgtagttttctccacttaatcactcgtctttgcgctgtattaggcggtacatttgctttgacaggaatgttagatcgttggatgttccgctttattgaatctttcaacaagaagccgagtactagagcgtaaactagctgaaacagagacaaaacaatgagaaacaaaaaaaaccaaaggaaggaagaagaatctctcaaatcccaaaacttgtatctgccttcttcagacaacaacacccaccagagattccaggattgatgattacattactcagaaactctagaatccatggatatagtttttttttgagtctctcttatgtattactctgattatctctggttaaactagtagagttaatttgtaatttttattcaccttgcttcctgggattttaacatttttgcatcttttcacttgtctcagtaaaaaaacaaaattatactgt

SEQ ID NO: 73384 - protein, 297 aa, Arabidopsis thaliana
  peptide (1)..(297): Ceres Seq. ID no. 4964598
  misc_feature: Pfam Name: DUF1692 Pfam Description: Protein of unknown function (DUF1692)
  misc_feature (1)..(297): Homolog of NCBI NO: 30686584 NR Description: expressed protein [Arabidopsis thaliana]
  misc_feature (1)..(276): Homolog of NCBI NO: 11036454 NR Description: gb|AAF34232.1~gene_id:MCB17.1~similar to unknown
  misc_feature (1)..(297): Homolog of NCBI NO: 34897128 NR Description: unknown protein [Oryza sativa]
  misc_feature (101)..(292): Homolog of NCBI NO: 38347102 NR Description: OSJNBa0006M15.17 [Oryza sativa (japonica
  misc_feature (1)..(90): Homolog of NCBI NO: 38347102 NR Description: OSJNBa0006M15.17 [Oryza sativa (japonica
  misc_feature (101)..(270): Homolog of NCBI NO: 6598578 NR Description: F5J5.4 [Arabidopsis thaliana]
  misc_feature (16)..(90): Homolog of NCBI NO: 6598578 NR Description: F5J5.4 [Arabidopsis thaliana]
  misc_feature (101)..(292): Homolog of NCBI NO: 18395087 NR Description: expressed protein; protein id: At1g22200.1, by cDNA: 16380., supported by cDNA: gi_13878150, supported by gi_21281041 [Arabidopsis thaliana] >gi|25350066|pir||F86354
  misc_feature (1)..(90): Homolog of NCBI NO: 18395087 NR Description: expressed protein; protein id: At1g22200.1, by cDNA: 16380., supported by cDNA: gi_13878150, supported by gi_21281041 [Arabidopsis thaliana] >gi|25350066|pir||F86354
  misc_feature (101)..(292): Homolog of NCBI NO: 30693281 NR Description: expressed protein [Arabidopsis thaliana]
MSVDLKRGETLPIHVNMTFPSLPCDVLSVDAIDMSGKHEVDLDTNIWKLRLNSHGHIIGTEYISDLVEKGHEHGHSPHKHDGKEEHKNETETEALNILGFDQAAETMIKKVKQALADGEGCRVYGVLDVQRVAGNFHISVHGLNIYVAQMIFGGSKNVNVSHMIHDLSFGPKYPGIHNPLDDTNRILHDTSGTFKYYIKIVPTEYRYLSKDVLSTNQYSVTEYFTPMTEFDRTWPAVYFLYDLSPITVTIKEERRSFLHLITRLCAVLGGTFALTGMLDRWMFRFIESFNKKPSTRA

SEQ ID NO: 73385 - protein, 281 aa, Arabidopsis thaliana
  peptide (1)..(281): Ceres Seq. ID no. 4964599
  misc_feature: Pfam Name: DUF1692 Pfam Description: Protein of unknown function (DUF1692)
  misc_feature (1)..(281): Homolog of NCBI NO: 30686584 NR Description: expressed protein [Arabidopsis thaliana]
  misc_feature (1)..(260): Homolog of NCBI NO: 11036454 NR Description: gb|AAF34232.1~gene_id:MCB17.1~similar to unknown
  misc_feature (1)..(281): Homolog of NCBI NO: 34897128 NR Description: unknown protein [Oryza sativa]
  misc_feature (85)..(276): Homolog of NCBI NO: 38347102 NR Description: OSJNBa0006M15.17 [Oryza sativa (japonica
  misc_feature (1)..(74): Homolog of NCBI NO: 38347102 NR Description: OSJNBa0006M15.17 [Oryza sativa (japonica
  misc_feature (85)..(254): Homolog of NCBI NO: 6598578 NR Description: F5J5.4 [Arabidopsis thaliana]
  misc_feature (1)..(74): Homolog of NCBI NO: 6598578 NR Description: F5J5.4 [Arabidopsis thaliana]
  misc_feature (85)..(276): Homolog of NCBI NO: 18395087 NR Description: expressed protein; protein id: At1g22200.1, by cDNA: 16380., supported by cDNA: gi_13878150, supported by gi_21281041 [Arabidopsis thaliana] >gi|25350066|pir||F86354
  misc_feature (1)..(74): Homolog of NCBI NO: 18395087 NR Description: expressed protein; protein id: At1g22200.1, by cDNA: 16380., supported by cDNA: gi_13878150, supported by gi_21281041 [Arabidopsis thaliana] >gi|25350066|pir||F86354
  misc_feature (85)..(276): Homolog of NCBI NO: 30693281 NR Description: expressed protein [Arabidopsis thaliana]
MTFPSLPCDVLSVDAIDMSGKHEVDLDTNIWKLRLNSHGHIIGTEYISDLVEKGHEHGHSPHKHDGKEEHKNETETEALNILGFDQAAETMIKKVKQALADGEGCRVYGVLDVQRVAGNFHISVHGLNIYVAQMIFGGSKNVNVSHMIHDLSFGPKYPGIHNPLDDTNRILHDTSGTFKYYIKIVPTEYRYLSKDVLSTNQYSVTEYFTPMTEFDRTWPAVYFLYDLSPITVTIKEERRSFLHLITRLCAVLGGTFALTGMLDRWMFRFIESFNKKPSTRA

SEQ ID NO: 73386 - protein, 264 aa, Arabidopsis thaliana
  peptide (1)..(264): Ceres Seq. ID no. 4964600
  misc_feature: Pfam Name: DUF1692 Pfam Description: Protein of unknown function (DUF1692)
  misc_feature (1)..(264): Homolog of NCBI NO: 30686584 NR Description: expressed protein [Arabidopsis thaliana]
  misc_feature (1)..(243): Homolog of NCBI NO: 11036454 NR Description: gb|AAF34232.1~gene_id:MCB17.1~similar to unknown
  misc_feature (1)..(264): Homolog of NCBI NO: 34897128 NR Description: unknown protein [Oryza sativa]
  misc_feature (68)..(259): Homolog of NCBI NO: 38347102 NR Description: OSJNBa0006M15.17 [Oryza sativa (japonica
  misc_feature (1)..(57): Homolog of NCBI NO: 38347102 NR Description: OSJNBa0006M15.17 [Oryza sativa (japonica
  misc_feature (68)..(237): Homolog of NCBI NO: 6598578 NR Description: F5J5.4 [Arabidopsis thaliana]
  misc_feature (1)..(57): Homolog of NCBI NO: 6598578 NR Description: F5J5.4 [Arabidopsis thaliana]
  misc_feature (68)..(259): Homolog of NCBI NO: 18395087 NR Description: expressed protein; protein id: At1g22200.1, by cDNA: 16380., supported by cDNA: gi_13878150, supported by gi_21281041 [Arabidopsis thaliana] >gi|25350066|pir||F86354
  misc_feature (1)..(57): Homolog of NCBI NO: 18395087 NR Description: expressed protein; protein id: At1g22200.1, by cDNA: 16380., supported by cDNA: gi_13878150, supported by gi_21281041 [Arabidopsis thaliana] >gi|25350066|pir||F86354
  misc_feature (68)..(259): Homolog of NCBI NO: 30693281 NR Description: expressed protein [Arabidopsis thaliana]
MSGKHEVDLDTNIWKLRLNSHGHIIGTEYISDLVEKGHEHGHSPHKHDGKEEHKNETETEALNILGFDQAAETMIKKVKQALADGEGCRVYGVLDVQRVAGNFHISVHGLNIYVAQMIFGGSKNVNVSHMIHDLSFGPKYPGIHNPLDDTNRILHDTSGTFKYYIKIVPTEYRYLSKDVLSTNQYSVTEYFTPMTEFDRTWPAVYFLYDLSPITVTIKEERRSFLHLITRLCAVLGGTFALTGMLDRWMFRFIESFNKKPSTRA

SEQ ID NO: 73387 - DNA, 1167 bp, Arabidopsis thaliana
  misc_feature (1)..(1167): Ceres Seq. ID no. 4965295
  misc_feature: Pfam Name: Pkinase Pfam Description: Protein kinase domain
atgaattgtctgttcttgttcatgtccaagaaaccaaaatccagaggaaatatggagaaagagaaaaaaaacataagaggaagagagttcttgcaaaagtcagctccagaattaacgacgagaaagacaactttgtcgttcaatctcccaacaccaagatctctgccatctccaacgagtatcaaagacttgtacacagacagagaacaaaatcaaaatcaaaacctgagggttttttctttcaaggaactgagtgacgccacttgtgagtttagcaggaagctaaagatcggagaaggtggctttggtagtgtctataaagccaccattaacaatcccaccgtaggagattctcattcttctccacttaccgtagccgttaagaaactcaatagacaaagtctacagggtcacaagcaatggctagcagaggttcactttttgggagtggtgaatcaccctaacgttgtgaggctcttagggtattgctcagaggacagagagagacttttggtttacgagttgatgtctaatcgcagcttggaggatcatctcttcactctaagaaccttaacgttgtcgtggaaacaaaggctcgagatcatgcttggtgcagctcaaggattggcttatttgcacgaaatccaggtaatatacagagacttcaaatcatcaaatgtgctattaaatgaagaattccatccgaaattatccgattttggtctcgctagagaaggtcccgaaggagacaatactcacgttacaaccgcaagagttggaacagacggctatgccgctcccgagtatgtaataaccggtcacctcaagacacattgcgatgtatatagctttggagttgttttgtacgaaattatcactggtcgtcgcacattggaacgaatgaaacctttagctgaacaaaagcttctagaatgggtcaaaaaatatcctattaatagcaaaagattcaaaatgatcgttgactccaagctatgcaataagtatccaattgctatggtcaggagagtggctaaattggctgatcattgtgtgaacaagatcgataaagaaagacctaccatggcctttgtcgtcgaaagtcttacgaatatcattgaggaatcaaattctgaagatatgggaagttctgttggcattagaggctag

SEQ ID NO: 73388 - protein, 388 aa, Arabidopsis thaliana
  peptide (1)..(388): Ceres Seq. ID no. 4965296
  misc_feature: Pfam Name: Pkinase Pfam Description: Protein kinase domain
  misc_feature (1)..(388): Homolog of NCBI NO: 30684132 NR Description: protein kinase, putative [Arabidopsis thaliana]
  misc_feature (18)..(388): Homolog of NCBI NO: 7434305 NR Description: probable protein kinase - Arabidopsis thaliana NAK like protein kinase [Arabidopsis thaliana]
  misc_feature (1)..(379): Homolog of NCBI NO: 15238002 NR Description: protein serine threonine kinase-like; protein id:
  misc_feature (51)..(374): Homolog of NCBI NO: 7488278 NR Description: probable protein kinase [imported] - Arabidopsis >gi|3461836|gb|AAC33222.1| putative protein kinase [Arabidopsis >gi|20197438|gb|AAM15076.1| putative protein kinase [Arabidopsis
  misc_feature (34)..(368): Homolog of NCBI NO: 38345946 NR Description: OSJNBb0103I08.17 [Oryza sativa (japonica
  misc_feature (1)..(368): Homolog of NCBI NO: 34901778 NR Description: protein serine/threonine kinase-like [Oryza
  misc_feature (1)..(376): Homolog of NCBI NO: 15232764 NR Description: putative protein kinase; protein id: At3g09830.1, by cDNA: gi_20268726 [Arabidopsis thaliana] putative protein kinase [Arabidopsis thaliana]
  misc_feature (59)..(376): Homolog of NCBI NO: 28416693 NR Description: At2g39110 [Arabidopsis thaliana]
  misc_feature (59)..(376): Homolog of NCBI NO: 30687780 NR Description: protein kinase, putative [Arabidopsis thaliana]
  misc_feature (73)..(382): Homolog of NCBI NO: 7248457 NR Description: protein serine/threonine kinase [Lophopyrum >gi|13022177|gb|AAK11674.1|AF339747_1 protein kinase [Lophopyrum
MNCLFLFMSKKPKSRGNMEKEKKNIRGREFLQKSAPELTTRKTTLSFNLPTPRSLPSPTSIKDLYTDREQNQNQNLRVFSFKELSDATCEFSRKLKIGEGGFGSVYKATINNPTVGDSHSSPLTVAVKKLNRQSLQGHKQWLAEVHFLGVVNHPNVVRLLGYCSEDRERLLVYELMSNRSLEDHLFTLRTLTLSWKQRLEIMLGAAQGLAYLHEIQVIYRDFKSSNVLLNEEFHPKLSDFGLAREGPEGDNTHVTTARVGTDGYAAPEYVITGHLKTHCDVYSFGVVLYEIITGRRTLERMKPLAEQKLLEWVKKYPINSKRFKMIVDSKLCNKYPIAMVRRVAKLADHCVNKIDKERPTMAFVVESLTNIIEESNSEDMGSSVGIRG

SEQ ID NO: 73389 - protein, 381 aa, Arabidopsis thaliana
  peptide (1)..(381): Ceres Seq. ID no. 4965297
  misc_feature: Pfam Name: Pkinase Pfam Description: Protein kinase domain
  misc_feature (1)..(381): Homolog of NCBI NO: 30684132 NR Description: protein kinase, putative [Arabidopsis thaliana]
  misc_feature (11)..(381): Homolog of NCBI NO: 7434305 NR Description: probable protein kinase - Arabidopsis thaliana NAK like protein kinase [Arabidopsis thaliana]
  misc_feature (1)..(372): Homolog of NCBI NO: 15238002 NR Description: protein serine threonine kinase-like; protein id:
  misc_feature (44)..(367): Homolog of NCBI NO: 7488278 NR Description: probable protein kinase [imported] - Arabidopsis >gi|3461836|gb|AAC33222.1| putative protein kinase [Arabidopsis >gi|20197438|gb|AAM15076.1| putative protein kinase [Arabidopsis
  misc_feature (27)..(361): Homolog of NCBI NO: 38345946 NR Description: OSJNBb0103I08.17 [Oryza sativa (japonica
  misc_feature (1)..(361): Homolog of NCBI NO: 34901778 NR Description: protein serine/threonine kinase-like [Oryza
  misc_feature (1)..(369): Homolog of NCBI NO: 15232764 NR Description: putative protein kinase; protein id: At3g09830.1, by cDNA: gi_20268726 [Arabidopsis thaliana] putative protein kinase [Arabidopsis thaliana]
  misc_feature (52)..(369): Homolog of NCBI NO: 28416693 NR Description: At2g39110 [Arabidopsis thaliana]
  misc_feature (52)..(369): Homolog of NCBI NO: 30687780 NR Description: protein kinase, putative [Arabidopsis thaliana]
  misc_feature (66)..(375): Homolog of NCBI NO: 7248457 NR Description: protein serine/threonine kinase [Lophopyrum >gi|13022177|gb|AAK11674.1|AF339747_1 protein kinase [Lophopyrum
MSKKPKSRGNMEKEKKNIRGREFLQKSAPELTTRKTTLSFNLPTPRSLPSPTSIKDLYTDREQNQNQNLRVFSFKELSDATCEFSRKLKIGEGGFGSVYKATINNPTVGDSHSSPLTVAVKKLNRQSLQGHKQWLAEVHFLGVVNHPNVVRLLGYCSEDRERLLVYELMSNRSLEDHLFTLRTLTLSWKQRLEIMLGAAQGLAYLHEIQVIYRDFKSSNVLLNEEFHPKLSDFGLAREGPEGDNTHVTTARVGTDGYAAPEYVITGHLKTHCDVYSFGVVLYEIITGRRTLERMKPLAEQKLLEWVKKYPINSKRFKMIVDSKLCNKYPIAMVRRVAKLADHCVNKIDKERPTMAFVVESLTNIIEESNSEDMGSSVGIRG

SEQ ID NO: 73390 - protein, 371 aa, Arabidopsis thaliana; identical to SEQ ID NO: 69452
  peptide (1)..(371): Ceres Seq. ID no. 4965298
  misc_feature: Pfam Name: Pkinase Pfam Description: Protein kinase domain
  misc_feature (1)..(371): Homolog of NCBI NO: 30684132 NR Description: protein kinase, putative [Arabidopsis thaliana]
  misc_feature (1)..(371): Homolog of NCBI NO: 7434305 NR Description: probable protein kinase - Arabidopsis thaliana NAK like protein kinase [Arabidopsis thaliana]
  misc_feature (1)..(362): Homolog of NCBI NO: 15238002 NR Description: protein serine threonine kinase-like; protein id:
  misc_feature (34)..(357): Homolog of NCBI NO: 7488278 NR Description: probable protein kinase [imported] - Arabidopsis >gi|3461836|gb|AAC33222.1| putative protein kinase [Arabidopsis >gi|20197438|gb|AAM15076.1| putative protein kinase [Arabidopsis
  misc_feature (17)..(351): Homolog of NCBI NO: 38345946 NR Description: OSJNBb0103I08.17 [Oryza sativa (japonica
  misc_feature (1)..(351): Homolog of NCBI NO: 34901778 NR Description: protein serine/threonine kinase-like [Oryza
  misc_feature (1)..(359): Homolog of NCBI NO: 15232764 NR Description: putative protein kinase; protein id: At3g09830.1, by cDNA: gi_20268726 [Arabidopsis thaliana] putative protein kinase [Arabidopsis thaliana]
  misc_feature (42)..(359): Homolog of NCBI NO: 28416693 NR Description: At2g39110 [Arabidopsis thaliana]
  misc_feature (42)..(359): Homolog of NCBI NO: 30687780 NR Description: protein kinase, putative [Arabidopsis thaliana]
  misc_feature (56)..(365): Homolog of NCBI NO: 7248457 NR Description: protein serine/threonine kinase [Lophopyrum >gi|13022177|gb|AAK11674.1|AF339747_1 protein kinase [Lophopyrum

SEQ ID NO: 73391 - DNA, 1053 bp, Arabidopsis thaliana
  misc_feature (1)..(1053): Ceres Seq. ID no. 4965813
  misc_feature: MA Experiment ID: 20000185 Result: Up-regulated in Transcription
  misc_feature: MA Experiment 20000185 PARAMETER Experiment Name: At_Roots__P Parameter: Age (day) Value: 7 vs. 21
  misc_feature: MA Experiment 20000185 PARAMETER Experiment Name: At_Roots__P Parameter: Organism Value: A. thaliana
  misc_feature: MA Experiment 20000185 PARAMETER Experiment Name: At_Roots__P Parameter: Tissue Value: Roots vs. Whole Plant
  misc_feature: MA Experiment ID: 20000439 Result: Up-regulated in Transcription
  misc_feature: MA Experiment 20000439 PARAMETER Experiment Name: At_Roots__P Parameter: Age (day) Value: 14 vs. 21
  misc_feature: MA Experiment 20000439 PARAMETER Experiment Name: At_Roots__P Parameter: Organism Value: A. thaliana
  misc_feature: MA Experiment 20000439 PARAMETER Experiment Name: At_Roots__P Parameter: Tissue Value: Roots vs. Whole Plant
  misc_feature: MA Experiment ID: 20001756 Result: Up-regulated in Transcription
  misc_feature: MA Experiment 20001756 PARAMETER Experiment Name: At_50mM_NH4NO3_L-to-H_P Parameter: Timepoint (hr) Value: 4
  misc_feature: MA Experiment 20001756 PARAMETER Experiment Name: At_50mM_NH4NO3_L-to-H_P Parameter: Tissue Value: Leaf
  misc_feature: MA Experiment 20001756 PARAMETER Experiment Name: At_50mM_NH4NO3_L-to-H_P Parameter: Treatment Value: 50mM NH4NO3 vs 100mM Mannitol
  misc_feature: MA Experiment ID: 20001757 Result: Up-regulated in Transcription
  misc_feature: MA Experiment 20001757 PARAMETER Experiment Name: At_50mM_NH4NO3_L-to-H_P Parameter: Timepoint (hr) Value: 6
  misc_feature: MA Experiment 20001757 PARAMETER Experiment Name: At_50mM_NH4NO3_L-to-H_P Parameter: Tissue Value: Leaf
  misc_feature: MA Experiment 20001757 PARAMETER Experiment Name: At_50mM_NH4NO3_L-to-H_P Parameter: Treatment Value: 50mM NH4NO3 vs 100mM Mannitol
atggtaatggaaacagagtcaaagttccatgttttagctgttgatgatagtctttttgatcggaaaatgattgagagattgcttcaaaagtcttcatgtcaagtaactacagttgattcaggctctaaagctctggaatttctgggtttaagagtagatgacaacgacccaaatgcactctctacatcgccacaaattcatcaggaagttgaaataaatctaataattacagattactgtatgcctggcatgactggttatgatttgctcaagaaagttaaggaatcagcggcgtttagaagtatacctgtagttataatgtcatctgagaacgttcctgcaagaatctccagatgtttggaagaaggagctgaagagtttttcttgaaaccagtgaagttagctgatcttaccaagttgaaacctcatatgatgaaaacgaagttgaagaaagaaagtgagaaaccagttgccatagaagagattgtggtgtctaaaccggagatagaagaagaagaagaagagtcatcagtgattgaaatcttgcctctccaccaagaaattgaatccgaacaacttgaaccaatgttgagtagtaataagagaaaagcaatggaagaagtggtttctactgatcgatcacgtcctaaatacaatgatatcacaacctcgaatctctcagtagaagatctgctaactcttgcatctgaagcaaacaacaacggactgcaaggaggactaacgcaacccgagaagccactacaagacctatatggagaatgccaacagaatctctcagtagaagatctgctaactcttgaatatgaagcaaacaacaacggactgctaggagtaataccgcagcaacatcgttatcatcaggaaaaagagacaatgcagacacaaggagatccactaaatcgaatacctattcaatcagaagcttcaaaccattcagatagtggtgatagcacactaacaatggctcaaaaccaggatggtctcggacacagtagttgttttattctctgtcaatttacttctctcccctag

SEQ ID NO: 73392 - protein, 350 aa, Arabidopsis thaliana
  peptide (1)..(350): Ceres Seq. ID no. 4965814
  misc_feature (9)..(139): Pfam Name: Response regulator receiver domain Pfam Description: Response regulator receiver domain
  misc_feature (1)..(224): Homolog of NCBI NO: 15227325 NR Description: putative two-component response regulator 3 protein id: At2g41310.1, supported by cDNA: gi_18491268
  misc_feature (1)..(224): Homolog of NCBI NO: 15230202 NR Description: responce reactor 4; protein id: At3g57040.1, by cDNA: gi_19699060, supported by cDNA: gi_3273201 [Arabidopsis
  misc_feature (2)..(229): Homolog of NCBI NO: 34906626 NR Description: putative response regulator [Oryza sativa
  misc_feature (89)..(224): Homolog of NCBI NO: 15225720 NR Description: putative two-component response regulator protein id: At2g07440.1 [Arabidopsis thaliana]
  misc_feature (2)..(229): Homolog of NCBI NO: 12060384 NR Description: response regulator 4 [Zea mays]
  misc_feature (2)..(229): Homolog of NCBI NO: 12060386 NR Description: response regulator 5 [Zea mays]
  misc_feature (5)..(155): Homolog of NCBI NO: 12060388 NR Description: response regulator 6 [Zea mays]
  misc_feature (9)..(142): Homolog of NCBI NO: 33330868 NR Description: type-A response regulator [Catharanthus roseus]
  misc_feature (4)..(158): Homolog of NCBI NO: 13173408 NR Description: response regulator protein [Dianthus caryophyllus]
  misc_feature (10)..(148): Homolog of NCBI NO: 11358763 NR Description: response regulator 5 [imported] - Arabidopsis >gi|3953599|dbj|BAA34727.1| response regulator 5 [Arabidopsis
MVMETESKFHVLAVDDSLFDRKMIERLLQKSSCQVTTVDSGSKALEFLGLRVDDNDPNALSTSPQIHQEVEINLIITDYCMPGMTGYDLLKKVKESAAFRSIPVVIMSSENVPARISRCLEEGAEEFFLKPVKLADLTKLKPHMMKTKLKKESEKPVAIEEIVVSKPEIEEEEEESSVIEILPLHQEIESEQLEPMLSSNKRKAMEEVVSTDRSRPKYNDITTSNLSVEDLLTLASEANNNGLQGGLTQPEKPLQDLYGECQQNLSVEDLLTLEYEANNNGLLGVIPQQHRYHQEKETMQTQGDPLNRIPIQSEASNHSDSGDSTLTMAQNQDGLGHSSCFILCQFTSLP

SEQ ID NO: 73393 - protein, 348 aa, Arabidopsis thaliana
  peptide (1)..(348): Ceres Seq. ID no. 4965815
  misc_feature (7)..(137): Pfam Name: Response regulator receiver domain Pfam Description: Response regulator receiver domain
  misc_feature (1)..(222): Homolog of NCBI NO: 15227325 NR Description: putative two-component response regulator 3 protein id: At2g41310.1, supported by cDNA: gi_18491268
  misc_feature (1)..(222): Homolog of NCBI NO: 15230202 NR Description: responce reactor 4; protein id: At3g57040.1, by cDNA: gi_19699060, supported by cDNA: gi_3273201 [Arabidopsis
  misc_feature (1)..(227): Homolog of NCBI NO: 34906626 NR Description: putative response regulator [Oryza sativa
  misc_feature (87)..(222): Homolog of NCBI NO: 15225720 NR Description: putative two-component response regulator protein id: At2g07440.1 [Arabidopsis thaliana]
  misc_feature (1)..(227): Homolog of NCBI NO: 12060384 NR Description: response regulator 4 [Zea mays]
  misc_feature (1)..(227): Homolog of NCBI NO: 12060386 NR Description: response regulator 5 [Zea mays]
  misc_feature (3)..(153): Homolog of NCBI NO: 12060388 NR Description: response regulator 6 [Zea mays]
  misc_feature (7)..(140): Homolog of NCBI NO: 33330868 NR Description: type-A response regulator [Catharanthus roseus]
  misc_feature (2)..(156): Homolog of NCBI NO: 13173408 NR Description: response regulator protein [Dianthus caryophyllus]
  misc_feature (8)..(146): Homolog of NCBI NO: 11358763 NR Description: response regulator 5 [imported] - Arabidopsis >gi|3953599|dbj|BAA34727.1| response regulator 5 [Arabidopsis
METESKFHVLAVDDSLFDRKMIERLLQKSSCQVTTVDSGSKALEFLGLRVDDNDPNALSTSPQIHQEVEINLIITDYCMPGMTGYDLLKKVKESAAFRSIPVVIMSSENVPARISRCLEEGAEEFFLKPVKLADLTKLKPHMMKTKLKKESEKPVAIEEIVVSKPEIEEEEEESSVIEILPLHQEIESEQLEPMLSSNKRKAMEEVVSTDRSRPKYNDITTSNLSVEDLLTLASEANNNGLQGGLTQPEKPLQDLYGECQQNLSVEDLLTLEYEANNNGLLGVIPQQHRYHQEKETMQTQGDPLNRIPIQSEASNHSDSGDSTLTMAQNQDGLGHSSCFILCQFTSLP

SEQ ID NO: 73394 - protein, 328 aa, Arabidopsis thaliana
  peptide (1)..(328): Ceres Seq. ID no. 4965816
  misc_feature (1)..(117): Pfam Name: Response regulator receiver domain Pfam Description: Response regulator receiver domain
  misc_feature (1)..(202): Homolog of NCBI NO: 15227325 NR Description: putative two-component response regulator 3 protein id: At2g41310.1, supported by cDNA: gi_18491268
  misc_feature (1)..(202): Homolog of NCBI NO: 15230202 NR Description: responce reactor 4; protein id: At3g57040.1, by cDNA: gi_19699060, supported by cDNA: gi_3273201 [Arabidopsis
  misc_feature (1)..(207): Homolog of NCBI NO: 34906626 NR Description: putative response regulator [Oryza sativa
  misc_feature (67)..(202): Homolog of NCBI NO: 15225720 NR Description: putative two-component response regulator protein id: At2g07440.1 [Arabidopsis thaliana]
  misc_feature (1)..(207): Homolog of NCBI NO: 12060384 NR Description: response regulator 4 [Zea mays]
  misc_feature (1)..(207): Homolog of NCBI NO: 12060386 NR Description: response regulator 5 [Zea mays]
  misc_feature (1)..(133): Homolog of NCBI NO: 12060388 NR Description: response regulator 6 [Zea mays]
  misc_feature (1)..(120): Homolog of NCBI NO: 33330868 NR Description: type-A response regulator [Catharanthus roseus]
  misc_feature (1)..(136): Homolog of NCBI NO: 13173408 NR Description: response regulator protein [Dianthus caryophyllus]
  misc_feature (1)..(126): Homolog of NCBI NO: 11358763 NR Description: response regulator 5 [imported] - Arabidopsis >gi|3953599|dbj|BAA34727.1| response regulator 5 [Arabidopsis
MIERLLQKSSCQVTTVDSGSKALEFLGLRVDDNDPNALSTSPQIHQEVEINLIITDYCMPGMTGYDLLKKVKESAAFRSIPVVIMSSENVPARISRCLEEGAEEFFLKPVKLADLTKLKPHMMKTKLKKESEKPVAIEEIVVSKPEIEEEEEESSVIEILPLHQEIESEQLEPMLSSNKRKAMEEVVSTDRSRPKYNDITTSNLSVEDLLTLASEANNNGLQGGLTQPEKPLQDLYGECQQNLSVEDLLTLEYEANNNGLLGVIPQQHRYHQEKETMQTQGDPLNRIPIQSEASNHSDSGDSTLTMAQNQDGLGHSSCFILCQFTSLP

SEQ ID NO: 73395 - DNA, 858 bp, Arabidopsis thaliana
  misc_feature (1)..(858): Ceres Seq. ID no. 4965975
  misc_feature: MA Experiment ID: 20000227 Result: Down-regulated in Transcription
  misc_feature: MA Experiment 20000227 PARAMETER Experiment Name: At_Root-Tips-vs-Tops_P Parameter: Tissue Value: Root Tips vs. Root Tops
atgtcagaccaagaggctcctctgcgtaatggagtagaacacaagattttcgaagtacttccgtttgtggatgatgattacggtggagtcatcgtggagatgaaaactcctatggatactaagaatttcgttgcagcgcttagagattcattcgagcagtggcgcttacagggtaaaaagggagtctggttgaacttgcctctctcacacgtaaacctcgtggaacccgcggttaaggaaggtttccggtatcaccatgctgagccaacttacctgatgctagtttattggattccggaagccgagagtactattcctttgaatgcttcccatcgtgttcgtgtaggtgctgttgtcttgaaccataacaaagaggaaaaatacggttcattatgcggatcaggtatctggaagatcccaacaggagttgttgacgagggtgaggagattttcgccgcagccattagagaagtaaaagaagaaacaggcgtaagaagatccatatatcttaatatcgacactgagtttttggagattctagctttctgccaaacccacgagtcattttttgcaaagtcagatttattcttcgtttgtctcttgagacctacctccttcgatattcaaaaacaggacttagagatcgaagcagctcaatggatgcggttcgaggactctgcctctcaacctatcacacacaagaacgatctcttcaaagatattcaccacatttgctcaatgaaaatggagaagagctatagtggtttttcaaaaaaacctattacaactttctttgacgacaagttaggttatctctacttgaataaacaagaagatatggaacaacctatttcttaa

SEQ ID NO: 73396 - protein, 285 aa, Arabidopsis thaliana
  peptide (1)..(285): Ceres Seq. ID no. 4965976
  misc_feature (111)..(247): Pfam Name: NUDIX domain Pfam Description: NUDIX domain
  misc_feature (1)..(285): Homolog of NCBI NO: 7486814 NR Description: hypothetical protein M7J2.190 - Arabidopsis >gi|2980806|emb|CAA18182.1| putative protein [Arabidopsis
  misc_feature (1)..(285): Homolog of NCBI NO: 38564312 NR Description: At4g25434 [Arabidopsis thaliana]
  misc_feature (1)..(201): Homolog of NCBI NO: 30686884 NR Description: MutT/nudix family protein [Arabidopsis thaliana]
  misc_feature (19)..(278): Homolog of NCBI NO: 18422823 NR Description: MutT domain protein-like; protein id: supported by cDNA: gi_14596036, supported by cDNA: gi_17978726
  misc_feature (19)..(278): Homolog of NCBI NO: 9758793 NR Description: MutT domain protein-like [Arabidopsis thaliana]
  misc_feature (19)..(283): Homolog of NCBI NO: 21928133 NR Description: AT5g47240/MQL5_10 [Arabidopsis thaliana]
  misc_feature (168)..(285): Homolog of NCBI NO: 30686884 NR Description: MutT/nudix family protein [Arabidopsis thaliana]
  misc_feature (19)..(283): Homolog of NCBI NO: 8809607 NR Description: mutT domain protein-like [Arabidopsis thaliana]
  misc_feature (19)..(283): Homolog of NCBI NO: 18422772 NR Description: mutT domain protein-like; protein id:
  misc_feature (19)..(283): Homolog of NCBI NO: 21593371 NR Description: mutT domain protein-like [Arabidopsis thaliana]
MSDQEAPLRNGVEHKIFEVLPFVDDDYGGVIVEMKTPMDTKNFVAALRDSFEQWRLQGKKGVWLNLPLSHVNLVEPAVKEGFRYHHAEPTYLMLVYWIPEAESTIPLNASHRVRVGAVVLNHNKEEKYGSLCGSGIWKIPTGVVDEGEEIFAAAIREVKEETGVRRSIYLNIDTEFLEILAFCQTHESFFAKSDLFFVCLLRPTSFDIQKQDLEIEAAQWMRFEDSASQPITHKNDLFKDIHHICSMKMEKSYSGFSKKPITTFFDDKLGYLYLNKQEDMEQPIS

SEQ ID NO: 73397 - protein, 252 aa, Arabidopsis thaliana
  peptide (1)..(252): Ceres Seq. ID no. 4965977
  misc_feature (78)..(214): Pfam Name: NUDIX domain Pfam Description: NUDIX domain
  misc_feature (1)..(252): Homolog of NCBI NO: 7486814 NR Description: hypothetical protein M7J2.190 - Arabidopsis >gi|2980806|emb|CAA18182.1| putative protein [Arabidopsis
  misc_feature (1)..(252): Homolog of NCBI NO: 38564312 NR Description: At4g25434 [Arabidopsis thaliana]
  misc_feature (1)..(168): Homolog of NCBI NO: 30686884 NR Description: MutT/nudix family protein [Arabidopsis thaliana]
  misc_feature (1)..(245): Homolog of NCBI NO: 18422823 NR Description: MutT domain protein-like; protein id: supported by cDNA: gi_14596036, supported by cDNA: gi_17978726
  misc_feature (1)..(245): Homolog of NCBI NO: 9758793 NR Description: MutT domain protein-like [Arabidopsis thaliana]
  misc_feature (1)..(250): Homolog of NCBI NO: 21928133 NR Description: AT5g47240/MQL5_10 [Arabidopsis thaliana]
  misc_feature (135)..(252): Homolog of NCBI NO: 30686884 NR Description: MutT/nudix family protein [Arabidopsis thaliana]
  misc_feature (1)..(250): Homolog of NCBI NO: 8809607 NR Description: mutT domain protein-like [Arabidopsis thaliana]
  misc_feature (1)..(250): Homolog of NCBI NO: 18422772 NR Description: mutT domain protein-like; protein id:
  misc_feature (1)..(250): Homolog of NCBI NO: 21593371 NR Description: mutT domain protein-like [Arabidopsis thaliana]
MKTPMDTKNFVAALRDSFEQWRLQGKKGVWLNLPLSHVNLVEPAVKEGFRYHHAEPTYLMLVYWIPEAESTIPLNASHRVRVGAVVLNHNKEEKYGSLCGSGIWKIPTGVVDEGEEIFAAAIREVKEETGVRRSIYLNIDTEFLEILAFCQTHESFFAKSDLFFVCLLRPTSFDIQKQDLEIEAAQWMRFEDSASQPITHKNDLFKDIHHICSMKMEKSYSGFSKKPITTFFDDKLGYLYLNKQEDMEQPIS

SEQ ID NO: 73398 - protein, 248 aa, Arabidopsis thaliana
  peptide (1)..(248): Ceres Seq. ID no. 4965978
  misc_feature (74)..(210): Pfam Name: NUDIX domain Pfam Description: NUDIX domain
  misc_feature (1)..(248): Homolog of NCBI NO: 7486814 NR Description: hypothetical protein M7J2.190 - Arabidopsis >gi|2980806|emb|CAA18182.1| putative protein [Arabidopsis
  misc_feature (1)..(248): Homolog of NCBI NO: 38564312 NR Description: At4g25434 [Arabidopsis thaliana]
  misc_feature (1)..(164): Homolog of NCBI NO: 30686884 NR Description: MutT/nudix family protein [Arabidopsis thaliana]
  misc_feature (1)..(241): Homolog of NCBI NO: 18422823 NR Description: MutT domain protein-like; protein id: supported by cDNA: gi_14596036, supported by cDNA: gi_17978726
  misc_feature (1)..(241): Homolog of NCBI NO: 9758793 NR Description: MutT domain protein-like [Arabidopsis thaliana]
  misc_feature (1)..(246): Homolog of NCBI NO: 21928133 NR Description: AT5g47240/MQL5_10 [Arabidopsis thaliana]
  misc_feature (131)..(248): Homolog of NCBI NO: 30686884 NR Description: MutT/nudix family protein [Arabidopsis thaliana]
  misc_feature (1)..(246): Homolog of NCBI NO: 8809607 NR Description: mutT domain protein-like [Arabidopsis thaliana]
  misc_feature (1)..(246): Homolog of NCBI NO: 18422772 NR Description: mutT domain protein-like; protein id:
  misc_feature (1)..(246): Homolog of NCBI NO: 21593371 NR Description: mutT domain protein-like [Arabidopsis thaliana]
MDTKNFVAALRDSFEQWRLQGKKGVWLNLPLSHVNLVEPAVKEGFRYHHAEPTYLMLVYWIPEAESTIPLNASHRVRVGAVVLNHNKEEKYGSLCGSGIWKIPTGVVDEGEEIFAAAIREVKEETGVRRSIYLNIDTEFLEILAFCQTHESFFAKSDLFFVCLLRPTSFDIQKQDLEIEAAQWMRFEDSASQPITHKNDLFKDIHHICSMKMEKSYSGFSKKPITTFFDDKLGYLYLNKQEDMEQPIS

SEQ ID NO: 73399 - DNA, 1389 bp, Arabidopsis thaliana
  misc_feature (1)..(1389): Ceres Seq. ID no. 4966077
  misc_feature: MA Experiment ID: 20000440 Result: Up-regulated in Transcription
  misc_feature: MA Experiment 20000440 PARAMETER Experiment Name: At_Closed-Flower__Sub_P Parameter: Tissue Value: Closed Flower vs. Whole Plant
atggcagatttcaaaattcttttgcttatactcatccttatatctctctttgaacttgatctacttcattttcaccatgacttcttctctccttttccggtcaagatcggtttactcctgatatccatcttcttctatgcctactcaaccacccggtctaaaccggtttacctagtggatttctcatgtcaccaacccacggattcttgcaaaatctcatccgaaacgttcttcaacatggccaaaggcgctcaactctacaccgatgaaacaatccaattcatgacgaggatattaaaccggtccggtttaggagacgatacgtactccccacgttgcatgttaacctctccaccaactccatcaatgtacgaggcgagacatgaatccgaattagttatcttcggagctcttaactcactattcaagaaaaccggaatcgaaccgagagaagtcggaatcttcattgtaaactgcagcttgtttaaccctaacccatctctctcgtccatgatcgtaaaccggtacaagcttaaaaccgacgtcaaaacttacaatctctccggtatgggatgcagcgccggcgcaatctccgtcgacctcgccacaaatctactaaaggcaaaccctaatacctacgcagttattgttagtacggagaacatgaccctaagcatgtatcgaggcaacgaccggtcaatgttagtccctaactgtctattccgagtaggtggcgctgcggttatgctctcaaaccggagtcaagaccgagtccggtctaagtacgaattgactcatattgtaaggactcacaaaggctctagcgataaacactacacttgtgctgaacaaaaagaagatagtaaaggtatcgttggagtcgcactctctaaagaactaacggttgttgctggtgactcgttaaagacgaatctaacagcacttggtccgcttgtgttgcctttatctgaaaaactccggtttatcctctttttggtaaagagtaagcttttccggttaaaggttagtccatatgttccggattttaaactatgtttcaagcatttctgtattcacgctggtggtagagcgttacttgacgcggttgaaaaaggtcttggacttagtgagtttgatcttgagccgtctcggatgactttgcaccgctttggaaacacttcaagctcgtcgctgtggtacgagctggcttacgtggaggctaaatgtcgggtcaaacgaggagatagggtttggcagttggcgtttgggtcgggttttaaatgtaatagtattgtgtggagagcgttgagaacgattccggctaacgagtcattggtgggtaacccgtggggtgactcggttcataagtatccagttcacgtgacctaa

SEQ ID NO: 73400 - protein, 462 aa, Arabidopsis thaliana; identical to SEQ ID NO: 44576
  peptide (1)..(462): Ceres Seq. ID no. 4966078
  misc_feature (292)..(437): Pfam Name: Chalcone and stilbene synthases, C-terminal domain Pfam Description: Chalcone and stilbene synthases, C-terminal
  misc_feature (1)..(462): Homolog of NCBI NO: 15226428 NR Description: putative beta-ketoacyl-CoA synthase; protein id:
  misc_feature (1)..(462): Homolog of NCBI NO: 15228247 NR Description: putative fatty acid elongase 3-ketoacyl-CoA
  misc_feature (38)..(461): Homolog of NCBI NO: 4091810 NR Description: fatty acid elongase 3-ketoacyl-CoA synthase 1
  misc_feature (38)..(461): Homolog of NCBI NO: 22329274 NR Description: fatty acid elongase 3-ketoacyl-CoA synthase 1; id: At1g01120.1, supported by cDNA: gi_18377663, supported by
  misc_feature (6)..(461): Homolog of NCBI NO: 15225767 NR Description: putative beta-ketoacyl-CoA synthase; protein id:
  misc_feature (15)..(461): Homolog of NCBI NO: 15219676 NR Description: putative beta-ketoacyl-CoA synthase; protein id:
  misc_feature (4)..(459): Homolog of NCBI NO: 3551960 NR Description: senescence-associated protein 15 [Hemerocallis
  misc_feature (15)..(461): Homolog of NCBI NO: 18377979 NR Description: putative beta-ketoacyl-CoA synthase [Arabidopsis
  misc_feature (39)..(461): Homolog of NCBI NO: 14334714 NR Description: putative beta-ketoacyl-CoA synthase [Arabidopsis
  misc_feature (39)..(461): Homolog of NCBI NO: 15239981 NR Description: beta-ketoacyl-CoA synthase; protein id: supported by cDNA: gi_14334713, supported by cDNA: gi_15983490

SEQ ID NO: 73401 - protein, 383 aa, Arabidopsis thaliana; identical to SEQ ID NO: 44577
  peptide (1)..(383): Ceres Seq. ID no. 4966079
  misc_feature (213)..(358): Pfam Name: Chalcone and stilbene synthases, C-terminal domain Pfam Description: Chalcone and stilbene synthases, C-terminal
  misc_feature (1)..(383): Homolog of NCBI NO: 15226428 NR Description: putative beta-ketoacyl-CoA synthase; protein id:
  misc_feature (1)..(383): Homolog of NCBI NO: 15228247 NR Description: putative fatty acid elongase 3-ketoacyl-CoA
  misc_feature (1)..(382): Homolog of NCBI NO: 4091810 NR Description: fatty acid elongase 3-ketoacyl-CoA synthase 1
  misc_feature (1)..(382): Homolog of NCBI NO: 22329274 NR Description: fatty acid elongase 3-ketoacyl-CoA synthase 1; id: At1g01120.1, supported by cDNA: gi_18377663, supported by
  misc_feature (1)..(382): Homolog of NCBI NO: 15225767 NR Description: putative beta-ketoacyl-CoA synthase; protein id:
  misc_feature (1)..(382): Homolog of NCBI NO: 15219676 NR Description: putative beta-ketoacyl-CoA synthase; protein id:
  misc_feature (1)..(380): Homolog of NCBI NO: 3551960 NR Description: senescence-associated protein 15 [Hemerocallis
  misc_feature (1)..(382): Homolog of NCBI NO: 18377979 NR Description: putative beta-ketoacyl-CoA synthase [Arabidopsis
  misc_feature (1)..(382): Homolog of NCBI NO: 14334714 NR Description: putative beta-ketoacyl-CoA synthase [Arabidopsis
  misc_feature (1)..(382): Homolog of NCBI NO: 15239981 NR Description: beta-ketoacyl-CoA synthase; protein id: supported by cDNA: gi_14334713, supported by cDNA: gi_15983490

SEQ ID NO: 73402 - protein, 368 aa, Arabidopsis thaliana
  peptide (1)..(368): Ceres Seq. ID no. 4966080
  misc_feature (198)..(343): Pfam Name: Chalcone and stilbene synthases, C-terminal domain Pfam Description: Chalcone and stilbene synthases, C-terminal
  misc_feature (1)..(368): Homolog of NCBI NO: 15226428 NR Description: putative beta-ketoacyl-CoA synthase; protein id:
  misc_feature (1)..(368): Homolog of NCBI NO: 15228247 NR Description: putative fatty acid elongase 3-ketoacyl-CoA
  misc_feature (1)..(367): Homolog of NCBI NO: 4091810 NR Description: fatty acid elongase 3-ketoacyl-CoA synthase 1
  misc_feature (1)..(367): Homolog of NCBI NO: 22329274 NR Description: fatty acid elongase 3-ketoacyl-CoA synthase 1; id: At1g01120.1, supported by cDNA: gi_18377663, supported by
  misc_feature (1)..(367): Homolog of NCBI NO: 15225767 NR Description: putative beta-ketoacyl-CoA synthase; protein id:
  misc_feature (1)..(367): Homolog of NCBI NO: 15219676 NR Description: putative beta-ketoacyl-CoA synthase; protein id:
  misc_feature (1)..(365): Homolog of NCBI NO: 3551960 NR Description: senescence-associated protein 15 [Hemerocallis
  misc_feature (1)..(367): Homolog of NCBI NO: 18377979 NR Description: putative beta-ketoacyl-CoA synthase [Arabidopsis
  misc_feature (1)..(367): Homolog of NCBI NO: 14334714 NR Description: putative beta-ketoacyl-CoA synthase [Arabidopsis
  misc_feature (1)..(367): Homolog of NCBI NO: 15239981 NR Description: beta-ketoacyl-CoA synthase; protein id: supported by cDNA: gi_14334713, supported by cDNA: gi_15983490
MTRILNRSGLGDDTYSPRCMLTSPPTPSMYEARHESELVIFGALNSLFKKTGIEPREVGIFIVNCSLFNPNPSLSSMIVNRYKLKTDVKTYNLSGMGCSAGAISVDLATNLLKANPNTYAVIVSTENMTLSMYRGNDRSMLVPNCLFRVGGAAVMLSNRSQDRVRSKYELTHIVRTHKGSSDKHYTCAEQKEDSKGIVGVALSKELTVVAGDSLKTNLTALGPLVLPLSEKLRFILFLVKSKLFRLKVSPYVPDFKLCFKHFCIHAGGRALLDAVEKGLGLSEFDLEPSRMTLHRFGNTSSSSLWYELAYVEAKCRVKRGDRVWQLAFGSGFKCNSIVWRALRTIPANESLVGNPWGDSVHKYPVHVT

SEQ ID NO: 73403 - DNA, 405 bp, Arabidopsis thaliana
  misc_feature (1)..(405): Ceres Seq. ID no. 4966214
  misc_feature: MA Experiment ID: 20000315 Result: Down-regulated in Transcription
  misc_feature: MA Experiment 20000315 PARAMETER Experiment Name: At_14day_Shoots-Roots_Sub_P Parameter: Age (day) Value: 14
  misc_feature: MA Experiment 20000315 PARAMETER Experiment Name: At_14day_Shoots-Roots_Sub_P Parameter: Organism Value: A. thaliana
  misc_feature: MA Experiment 20000315 PARAMETER Experiment Name: At_14day_Shoots-Roots_Sub_P Parameter: Plant Line Value: WS
  misc_feature: MA Experiment 20000315 PARAMETER Experiment Name: At_14day_Shoots-Roots_Sub_P Parameter: Tissue Value: Shoots vs. Whole Plant
atggcggattcaggaaaggagatcggatccagatgtcatcactgcgcaggccctcttacgaaaaatctggaaaccaacgaatggactgtggctccgtttatcagggatagcttctctatgattggatcagctgttggtggtactgcaagtgctttcattgggtttcaccatgtaatgccgattgtacgcaagtggatcaaaggacccatgtggttgcattttcttgttggtgctccacctgtgatagttgtttcatcagcctgtgctggacttgcaggtggcgctgtaccggctttagcacagcttgcatcgtcgtcttatcatgcggctgttcattcatctcagccaccacaagggcaagataagaaccaattgcacaattcctctaccatttctcctttgtag

SEQ ID NO: 73404 - protein, 134 aa, Arabidopsis thaliana
  peptide (1)..(134): Ceres Seq. ID no. 4966215
  misc_feature (1)..(134): Homolog of NCBI NO: 38566566 NR Description: At3g04040 [Arabidopsis thaliana]
  misc_feature (1)..(134): Homolog of NCBI NO: 15238771 NR Description: putative protein; protein id: At5g18250.1, by cDNA: 1816. [Arabidopsis thaliana] >gi|9758907|dbj|BAB09483.1|
  misc_feature (1)..(134): Homolog of NCBI NO: 21553919 NR Description: unknown [Arabidopsis thaliana]
  misc_feature (1)..(134): Homolog of NCBI NO: 15229213 NR Description: hypothetical protein; protein id: At3g04040.1 thaliana] >gi|6223648|gb|AAF05862.1|AC011698_13 hypothetical
  misc_feature (7)..(134): Homolog of NCBI NO: 34903072 NR Description: unnamed protein product [Oryza sativa (japonica group)] >gi|6815055|dbj|BAA90342.1| unnamed protein product
  misc_feature (8)..(128): Homolog of NCBI NO: 18390108 NR Description: gb protein [Sorghum bicolor]
MADSGKEIGSRCHHCAGPLTKNLETNEWTVAPFIRDSFSMIGSAVGGTASAFIGFHHVMPIVRKWIKGPMWLHFLVGAPPVIVVSSACAGLAGGAVPALAQLASSSYHAAVHSSQPPQGQDKNQLHNSSTISPL

SEQ ID NO: 73405 - protein, 95 aa, Arabidopsis thaliana
  peptide (1)..(95): Ceres Seq. ID no. 4966216
  misc_feature (1)..(95): Homolog of NCBI NO: 38566566 NR Description: At3g04040 [Arabidopsis thaliana]
  misc_feature (1)..(95): Homolog of NCBI NO: 15238771 NR Description: putative protein; protein id: At5g18250.1, by cDNA: 1816. [Arabidopsis thaliana] >gi|9758907|dbj|BAB09483.1|
  misc_feature (1)..(95): Homolog of NCBI NO: 21553919 NR Description: unknown [Arabidopsis thaliana]
  misc_feature (1)..(95): Homolog of NCBI NO: 15229213 NR Description: hypothetical protein; protein id: At3g04040.1 thaliana] >gi|6223648|gb|AAF05862.1|AC011698_13 hypothetical
  misc_feature (1)..(95): Homolog of NCBI NO: 34903072 NR Description: unnamed protein product [Oryza sativa (japonica group)] >gi|6815055|dbj|BAA90342.1| unnamed protein product
  misc_feature (1)..(89): Homolog of NCBI NO: 18390108 NR Description: gb protein [Sorghum bicolor]
MIGSAVGGTASAFIGFHHVMPIVRKWIKGPMWLHFLVGAPPVIVVSSACAGLAGGAVPALAQLASSSYHAAVHSSQPPQGQDKNQLHNSSTISPL

SEQ ID NO: 73406 - protein, 76 aa, Arabidopsis thaliana
  peptide (1)..(76): Ceres Seq. ID no. 4966217
  misc_feature (1)..(76): Homolog of NCBI NO: 38566566 NR Description: At3g04040 [Arabidopsis thaliana]
  misc_feature (1)..(76): Homolog of NCBI NO: 15238771 NR Description: putative protein; protein id: At5g18250.1, by cDNA: 1816. [Arabidopsis thaliana] >gi|9758907|dbj|BAB09483.1|
  misc_feature (1)..(76): Homolog of NCBI NO: 21553919 NR Description: unknown [Arabidopsis thaliana]
  misc_feature (1)..(76): Homolog of NCBI NO: 15229213 NR Description: hypothetical protein; protein id: At3g04040.1 thaliana] >gi|6223648|gb|AAF05862.1|AC011698_13 hypothetical
  misc_feature (1)..(76): Homolog of NCBI NO: 34903072 NR Description: unnamed protein product [Oryza sativa (japonica group)] >gi|6815055|dbj|BAA90342.1| unnamed protein product
  misc_feature (1)..(70): Homolog of NCBI NO: 18390108 NR Description: gb protein [Sorghum bicolor]
MPIVRKWIKGPMWLHFLVGAPPVIVVSSACAGLAGGAVPALAQLASSSYHAAVHSSQPPQGQDKNQLHNSSTISPL

SEQ ID NO: 73407 - DNA, 2463 bp, Arabidopsis thaliana
  misc_feature (1)..(2463): Ceres Seq. ID no. 4966387
  misc_feature: MA Experiment ID: 20000173 Result: Down-regulated in Transcription
  misc_feature: MA Experiment 20000173 PARAMETER Experiment Name: At_42deg_Heat_P Parameter: Age (day) Value: 14
  misc_feature: MA Experiment 20000173 PARAMETER Experiment Name: At_42deg_Heat_P Parameter: Organism Value: A. thaliana
  misc_feature: MA Experiment 20000173 PARAMETER Experiment Name: At_42deg_Heat_P Parameter: Plant Line Value: WS
  misc_feature: MA Experiment 20000173 PARAMETER Experiment Name: At_42deg_Heat_P Parameter: Temperature (deg C) Value: 42 vs. 22
  misc_feature: MA Experiment 20000173 PARAMETER Experiment Name: At_42deg_Heat_P Parameter: Timepoint (hr) Value: 6
  misc_feature: MA Experiment 20000173 PARAMETER Experiment Name: At_42deg_Heat_P Parameter: Tissue Value: Aerial
  misc_feature: MA Experiment ID: 20000184 Result: Down-regulated in Transcription
  misc_feature: MA Experiment 20000184 PARAMETER Experiment Name: At_Shoots__P Parameter: Age (day) Value: 7
  misc_feature: MA Experiment 20000184 PARAMETER Experiment Name: At_Shoots__P Parameter: Tissue Value: Shoots vs. Whole Plant
  misc_feature: MA Experiment ID: 20000227 Result: Down-regulated in Transcription
  misc_feature: MA Experiment 20000227 PARAMETER Experiment Name: At_Root-Tips-vs-Tops_P Parameter: Tissue Value: Root Tips vs. Root Tops
  misc_feature: MA Experiment ID: 20000437 Result: Up-regulated in Transcription
  misc_feature: MA Experiment 20000437 PARAMETER Experiment Name: At_Drought_P Parameter: Age (day) Value: 8
  misc_feature: MA Experiment 20000437 PARAMETER Experiment Name: At_Drought_P Parameter: Organism Value: A. thaliana
  misc_feature: MA Experiment 20000437 PARAMETER Experiment Name: At_Drought_P Parameter: Plant Line Value: WS
  misc_feature: MA Experiment 20000437 PARAMETER Experiment Name: At_Drought_P Parameter: Timepoint (hr) Value: 24
  misc_feature: MA Experiment 20000437 PARAMETER Experiment Name: At_Drought_P Parameter: Tissue Value: Whole Plant
  misc_feature: MA Experiment 20000437 PARAMETER Experiment Name: At_Drought_P Parameter: Treatment Value: Drought vs. No Drought
  misc_feature: MA Experiment ID: 20000794 Result: Up-regulated in Transcription
  misc_feature: MA Experiment 20000794 PARAMETER Experiment Name: At_Petals_P Parameter: Age (day) Value: 23-25 days
  misc_feature: MA Experiment 20000794 PARAMETER Experiment Name: At_Petals_P Parameter: Plant Line Value: WS
  misc_feature: MA Experiment 20000794 PARAMETER Experiment Name: At_Petals_P Parameter: Tissue Value: Petals vs. Whole plant
  misc_feature: MA Experiment ID: 20001559 Result: Up-regulated in Transcription
  misc_feature: MA Experiment 20001559 PARAMETER Experiment Name: At_Drought_Soil_Dry_P Parameter: Age (day) Value: 28
  misc_feature: MA Experiment 20001559 PARAMETER Experiment Name: At_Drought_Soil_Dry_P Parameter: Organism Value: A. thaliana
  misc_feature: MA Experiment 20001559 PARAMETER Experiment Name: At_Drought_Soil_Dry_P Parameter: Plant Line Value: WS
  misc_feature: MA Experiment 20001559 PARAMETER Experiment Name: At_Drought_Soil_Dry_P Parameter: Post Timepoint (hr) Value: 29
  misc_feature: MA Experiment 20001559 PARAMETER Experiment Name: At_Drought_Soil_Dry_P Parameter: Post-Treatment Value: Re-Water vs. No Drought
  misc_feature: MA Experiment 20001559 PARAMETER Experiment Name: At_Drought_Soil_Dry_P Parameter: Timepoint (day) Value: 14
  misc_feature: MA Experiment 20001559 PARAMETER Experiment Name: At_Drought_Soil_Dry_P Parameter: Treatment Value: Drought vs. No Drought
  misc_feature: MA Experiment ID: 20001904 Result: Up-regulated in Transcription
  misc_feature: MA Experiment 20001904 PARAMETER Experiment Name: At_Drought_Reproduction_P Parameter: Age (day) Value: 37
  misc_feature: MA Experiment 20001904 PARAMETER Experiment Name: At_Drought_Reproduction_P Parameter: Organism Value: A. thaliana
  misc_feature: MA Experiment 20001904 PARAMETER Experiment Name: At_Drought_Reproduction_P Parameter: Plant Line Value: WS
  misc_feature: MA Experiment 20001904 PARAMETER Experiment Name: At_Drought_Reproduction_P Parameter: Timepoint (day) Value: 7
  misc_feature: MA Experiment 20001904 PARAMETER Experiment Name: At_Drought_Reproduction_P Parameter: Tissue Value: Rosettes
  misc_feature: MA Experiment 20001904 PARAMETER Experiment Name: At_Drought_Reproduction_P Parameter: Treatment Value: Drought vs. No Drought
  misc_feature: MA Experiment ID: 20001905 Result: Up-regulated in Transcription
  misc_feature: MA Experiment 20001905 PARAMETER Experiment Name: At_Drought_Reproduction_P Parameter: Age (day) Value: 40
  misc_feature: MA Experiment 20001905 PARAMETER Experiment Name: At_Drought_Reproduction_P Parameter: Organism Value: A. thaliana
  misc_feature: MA Experiment 20001905 PARAMETER Experiment Name: At_Drought_Reproduction_P Parameter: Plant Line Value: WS
  misc_feature: MA Experiment 20001905 PARAMETER Experiment Name: At_Drought_Reproduction_P Parameter: Timepoint (day) Value: 10
  misc_feature: MA Experiment 20001905 PARAMETER Experiment Name: At_Drought_Reproduction_P Parameter: Tissue Value: Rosettes
  misc_feature: MA Experiment 20001905 PARAMETER Experiment Name: At_Drought_Reproduction_P Parameter: Treatment Value: Drought vs. No Drought
  misc_feature: MA Experiment ID: 20001906 Result: Up-regulated in Transcription
  misc_feature: MA Experiment 20001906 PARAMETER Experiment Name: At_Drought_Reproduction_P Parameter: Age (day) Value: 35
  misc_feature: MA Experiment 20001906 PARAMETER Experiment Name: At_Drought_Reproduction_P Parameter: Organism Value: A. thaliana
  misc_feature: MA Experiment 20001906 PARAMETER Experiment Name: At_Drought_Reproduction_P Parameter: Plant Line Value: WS
  misc_feature: MA Experiment 20001906 PARAMETER Experiment Name: At_Drought_Reproduction_P Parameter: Timepoint (day) Value: 5
  misc_feature: MA Experiment 20001906 PARAMETER Experiment Name: At_Drought_Reproduction_P Parameter: Tissue Value: Siliques
  misc_feature: MA Experiment 20001906 PARAMETER Experiment Name: At_Drought_Reproduction_P Parameter: Treatment Value: Drought vs. No Drought
  misc_feature: MA Experiment ID: 20001908 Result: Up-regulated in Transcription
  misc_feature: MA Experiment 20001908 PARAMETER Experiment Name: At_Drought_Reproduction_P Parameter: Age (day) Value: 40
  misc_feature: MA Experiment 20001908 PARAMETER Experiment Name: At_Drought_Reproduction_P Parameter: Organism Value: A. thaliana
  misc_feature: MA Experiment 20001908 PARAMETER Experiment Name: At_Drought_Reproduction_P Parameter: Plant Line Value: WS
  misc_feature: MA Experiment 20001908 PARAMETER Experiment Name: At_Drought_Reproduction_P Parameter: Timepoint (day) Value: 10
  misc_feature: MA Experiment 20001908 PARAMETER Experiment Name: At_Drought_Reproduction_P Parameter: Tissue Value: Siliques
  misc_feature: MA Experiment 20001908 PARAMETER Experiment Name: At_Drought_Reproduction_P Parameter: Treatment Value: Drought vs. No Drought
  misc_feature: MA Experiment ID: 20001911 Result: Up-regulated in Transcription
  misc_feature: MA Experiment 20001911 PARAMETER Experiment Name: At_Drought_Reproduction_P Parameter: Age (day) Value: 40
  misc_feature: MA Experiment 20001911 PARAMETER Experiment Name: At_Drought_Reproduction_P Parameter: Organism Value: A. thaliana
  misc_feature: MA Experiment 20001911 PARAMETER Experiment Name: At_Drought_Reproduction_P Parameter: Plant Line Value: WS
  misc_feature: MA Experiment 20001911 PARAMETER Experiment Name: At_Drought_Reproduction_P Parameter: Timepoint (day) Value: 10
  misc_feature: MA Experiment 20001911 PARAMETER Experiment Name: At_Drought_Reproduction_P Parameter: Tissue Value: Flowers
  misc_feature: MA Experiment 20001911 PARAMETER Experiment Name: At_Drought_Reproduction_P Parameter: Treatment Value: Drought vs. No Drought
atgggaagcagcacgggcgatcttgtgacacgtatccaatcagctcaccgtttcgatcacgatgccttgtttcgttttgccgccgacaacgtctctggctttccgaccaacccttcccaattcaaagtctcacagttcggacatgggcagtcgaatccaacgtttctgatagaggttggctcagggagttccttgaaacgatacgttttgaggaagaagcctcctggcaagcttcttcaatctgctcatgctgttgatcgagagtttcaggtgcttcgggctttaggtgaacatacacaggttcctgttcctaaagtcttctgcttatgcactgaccctgctgtcattgggactgctttttacattatggagtttatggaaggacgtattttcattgatccaaagttgccgaatgtagcacctgaaaggagaaatgcgatctatcgtgcaaccgccaaagccttggcatctcttcactctgctgatgtggatgccattggtcttgagaaatatggtcggcgaggcaattactgcaaaagacagatagataggtggttcaaacaatatttggcttcaacaagtgaaggtaaacctgaaaggaatccaaagatgtttgagcttgttgattggttacgcaaaaacatccccgcggaagattcaactggagcaacatcaggccttgtccatggagactttcgcattgacaatctcgtttttcatccttctgaggatcgagttattggaataattgactgggaattgtccacgcttgggaaccaaatgtgtgatgttgcatacagctgcatgcattacattctcgataaggagcatgttagtgaaggttttgaaactactgggcttccagaaggaatgctttcgatgccagaatttctcttagaatactgttctgcatcgggaaaaccatggcctgctgcaaactggaagttctacgtagcgttctccttatttcgggctgcttcaatctacacaggggtgtacagtagatggttaatggggaatgcttctgccggtgaaagagcgcgaaatacaggggttcaagctaatgagcttgtagagtctgccttgggttatattgcacgtgaaaatgttcttccagaacaccctccatctgttcaaagagacgtgtctccgtcgtatgaaagccttgtggatggaagcgggagattcatccccaacagaaaagtattggagttaaggcagaagttgatcaagtttatggaaactcatatctacccaatggaaaacgagttctccaaacttgctcaatcagatatgcgatggaccgttcaccctcaggaggaaaagttaaaggaaatggcaaagagagaaggcctatggaacttatttgttcctgtagatagtgctgctagagctagaagagaactggcggctaccgagaataaacataacctctcgggcaagtcttttgatcaattgtttggtgagggcctcacgaacctggagtatggttacctttgtgagatcatgggtcgttctgtttgggctccacaggtgtttaactgtggtgcaccagatactggaaacatggaggtgatactgcggtatggtaacaaagaacaaatttctgaatggcttattccgttgctcgagggaagaattcgttctggatttgctatgactgagccacaagttgcatcgtctgatgcaaccaatattgaatgctctatccgaagacaaggtgattcatacgtcattaatggcacaaaatggtggacaagtggagctatggatcccaggtgcagagtccttattctcatgggaaaaactgatttcaacgccccaaaacataagcagcagtctatgatattagtggacatgcggactccaggtataagtgtgaagaggcctctcacagtgtttggttttgatgacgcacctcatggacatgctgaaatttcttttgaaaatgtggttgtcccggcgaagaacattctccttggagaaggccgaggattcgagattgctcagggtaggttaggccctggaagactgcaccattgcatgagactaataggtgcagcagagcgtggaatggagctaatggctcaaagagctctgagtagaaaaacttttgggaagttcattgcgcagcacggttctttcgtctctgatcttgcaaagttacgggtagagctagaaggaacccgattgttggttctagaagctgctgatcatcttgataaatttggaaacaaaaaagctcgaggaattctcgcaatggccaaggttgcagctccaaacatggcattgaaggtactagacacggcaatacaagttcatggagcagccggtgtatcctcggacacagttttagcgcatttgtgggctacagctagaacactgaggattgctgatggacctgatgaggttcatcttgggaccattggcaagttagaactgcaaagagcttcaaagctttaa

SEQ ID NO: 73408 - protein, 820 aa, Arabidopsis thaliana
  peptide (1)..(820): Ceres Seq. ID no. 4966388
  misc_feature (663)..(814): Pfam Name: Acyl-CoA dehydrogenase, C-terminal domain Pfam Description: Acyl-CoA dehydrogenase, C-terminal domain
  misc_feature (5)..(817): Homolog of NCBI NO: 34393862 NR Description: putative acyl-CoA dehydrogenase [Oryza sativa
  misc_feature (432)..(820): Homolog of NCBI NO: 7549632 NR Description: acetyl-coA dehydrogenase, putative [Arabidopsis
  misc_feature (10)..(820): Homolog of NCBI NO: 30794396 NR Description: RIKEN cDNA 2410021P16 [Mus musculus]
  misc_feature (10)..(820): Homolog of NCBI NO: 20379980 NR Description: 2410021P16Rik protein [Mus musculus]
  misc_feature (10)..(820): Homolog of NCBI NO: 22137453 NR Description: Unknown (protein for IMAGE:4950406) [Mus musculus]
  misc_feature (5)..(473): Homolog of NCBI NO: 28280023 NR Description: similar to expressed sequence AI987948 [Mus
  misc_feature (432)..(820): Homolog of NCBI NO: 28280023 NR Description: similar to expressed sequence AI987948 [Mus
  misc_feature (10)..(416): Homolog of NCBI NO: 28277729 NR Description: Similar to RIKEN cDNA 2410021P16 gene [Danio
  misc_feature (491)..(819): Homolog of NCBI NO: 28277729 NR Description: Similar to RIKEN cDNA 2410021P16 gene [Danio
  misc_feature (4)..(373): Homolog of NCBI NO: 38490142 NR Description: putative acyl-CoA dehydrogenase [Homo sapiens]
MGSSTGDLVTRIQSAHRFDHDALFRFAADNVSGFPTNPSQFKVSQFGHGQSNPTFLIEVGSGSSLKRYVLRKKPPGKLLQSAHAVDREFQVLRALGEHTQVPVPKVFCLCTDPAVIGTAFYIMEFMEGRIFIDPKLPNVAPERRNAIYRATAKALASLHSADVDAIGLEKYGRRGNYCKRQIDRWFKQYLASTSEGKPERNPKMFELVDWLRKNIPAEDSTGATSGLVHGDFRIDNLVFHPSEDRVIGIIDWELSTLGNQMCDVAYSCMHYILDKEHVSEGFETTGLPEGMLSMPEFLLEYCSASGKPWPAANWKFYVAFSLFRAASIYTGVYSRWLMGNASAGERARNTGVQANELVESALGYIARENVLPEHPPSVQRDVSPSYESLVDGSGRFIPNRKVLELRQKLIKFMETHIYPMENEFSKLAQSDMRWTVHPQEEKLKEMAKREGLWNLFVPVDSAARARRELAATENKHNLSGKSFDQLFGEGLTNLEYGYLCEIMGRSVWAPQVFNCGAPDTGNMEVILRYGNKEQISEWLIPLLEGRIRSGFAMTEPQVASSDATNIECSIRRQGDSYVINGTKWWTSGAMDPRCRVLILMGKTDFNAPKHKQQSMILVDMRTPGISVKRPLTVFGFDDAPHGHAEISFENVVVPAKNILLGEGRGFEIAQGRLGPGRLHHCMRLIGAAERGMELMAQRALSRKTFGKFIAQHGSFVSDLAKLRVELEGTRLLVLEAADHLDKFGNKKARGILAMAKVAAPNMALKVLDTAIQVHGAAGVSSDTVLAHLWATARTLRIADGPDEVHLGTIGKLELQRASKL

SEQ ID NO: 73409 - protein, 698 aa, Arabidopsis thaliana
  peptide (1)..(698): Ceres Seq. ID no. 4966389
  misc_feature (541)..(692): Pfam Name: Acyl-CoA dehydrogenase, C-terminal domain Pfam Description: Acyl-CoA dehydrogenase, C-terminal domain
  misc_feature (1)..(695): Homolog of NCBI NO: 34393862 NR Description: putative acyl-CoA dehydrogenase [Oryza sativa
  misc_feature (310)..(698): Homolog of NCBI NO: 7549632 NR Description: acetyl-coA dehydrogenase, putative [Arabidopsis
  misc_feature (1)..(698): Homolog of NCBI NO: 30794396 NR Description: RIKEN cDNA 2410021P16 [Mus musculus]
  misc_feature (1)..(698): Homolog of NCBI NO: 20379980 NR Description: 2410021P16Rik protein [Mus musculus]
  misc_feature (1)..(698): Homolog of NCBI NO: 22137453 NR Description: Unknown (protein for IMAGE:4950406) [Mus musculus]
  misc_feature (1)..(351): Homolog of NCBI NO: 28280023 NR Description: similar to expressed sequence AI987948 [Mus
  misc_feature (310)..(698): Homolog of NCBI NO: 28280023 NR Description: similar to expressed sequence AI987948 [Mus
  misc_feature (1)..(294): Homolog of NCBI NO: 28277729 NR Description: Similar to RIKEN cDNA 2410021P16 gene [Danio
  misc_feature (369)..(697): Homolog of NCBI NO: 28277729 NR Description: Similar to RIKEN cDNA 2410021P16 gene [Danio
  misc_feature (1)..(251): Homolog of NCBI NO: 38490142 NR Description: putative acyl-CoA dehydrogenase [Homo sapiens]
MEFMEGRIFIDPKLPNVAPERRNAIYRATAKALASLHSADVDAIGLEKYGRRGNYCKRQIDRWFKQYLASTSEGKPERNPKMFELVDWLRKNIPAEDSTGATSGLVHGDFRIDNLVFHPSEDRVIGIIDWELSTLGNQMCDVAYSCMHYILDKEHVSEGFETTGLPEGMLSMPEFLLEYCSASGKPWPAANWKFYVAFSLFRAASIYTGVYSRWLMGNASAGERARNTGVQANELVESALGYIARENVLPEHPPSVQRDVSPSYESLVDGSGRFIPNRKVLELRQKLIKFMETHIYPMENEFSKLAQSDMRWTVHPQEEKLKEMAKREGLWNLFVPVDSAARARRELAATENKHNLSGKSFDQLFGEGLTNLEYGYLCEIMGRSVWAPQVFNCGAPDTGNMEVILRYGNKEQISEWLIPLLEGRIRSGFAMTEPQVASSDATNIECSIRRQGDSYVINGTKWWTSGAMDPRCRVLILMGKTDFNAPKHKQQSMILVDMRTPGISVKRPLTVFGFDDAPHGHAEISFENVVVPAKNILLGEGRGFEIAQGRLGPGRLHHCMRLIGAAERGMELMAQRALSRKTFGKFIAQHGSFVSDLAKLRVELEGTRLLVLEAADHLDKFGNKKARGILAMAKVAAPNMALKVLDTAIQVHGAAGVSSDTVLAHLWATARTLRIADGPDEVHLGTIGKLELQRASKL

SEQ ID NO: 73410 - protein, 695 aa, Arabidopsis thaliana
  peptide (1)..(695): Ceres Seq. ID no. 4966390
  misc_feature (538)..(689): Pfam Name: Acyl-CoA dehydrogenase, C-terminal domain Pfam Description: Acyl-CoA dehydrogenase, C-terminal domain
  misc_feature (1)..(692): Homolog of NCBI NO: 34393862 NR Description: putative acyl-CoA dehydrogenase [Oryza sativa
  misc_feature (307)..(695): Homolog of NCBI NO: 7549632 NR Description: acetyl-coA dehydrogenase, putative [Arabidopsis
  misc_feature (1)..(695): Homolog of NCBI NO: 30794396 NR Description: RIKEN cDNA 2410021P16 [Mus musculus]
  misc_feature (1)..(695): Homolog of NCBI NO: 20379980 NR Description: 2410021P16Rik protein [Mus musculus]
  misc_feature (1)..(695): Homolog of NCBI NO: 22137453 NR Description: Unknown (protein for IMAGE:4950406) [Mus musculus]
  misc_feature (1)..(348): Homolog of NCBI NO: 28280023 NR Description: similar to expressed sequence AI987948 [Mus
  misc_feature (307)..(695): Homolog of NCBI NO: 28280023 NR Description: similar to expressed sequence AI987948 [Mus
  misc_feature (1)..(291): Homolog of NCBI NO: 28277729 NR Description: Similar to RIKEN cDNA 2410021P16 gene [Danio
  misc_feature (366)..(694): Homolog of NCBI NO: 28277729 NR Description: Similar to RIKEN cDNA 2410021P16 gene [Danio
  misc_feature (1)..(248): Homolog of NCBI NO: 38490142 NR Description: putative acyl-CoA dehydrogenase [Homo sapiens]
MEGRIFIDPKLPNVAPERRNAIYRATAKALASLHSADVDAIGLEKYGRRGNYCKRQIDRWFKQYLASTSEGKPERNPKMFELVDWLRKNIPAEDSTGATSGLVHGDFRIDNLVFHPSEDRVIGIIDWELSTLGNQMCDVAYSCMHYILDKEHVSEGFETTGLPEGMLSMPEFLLEYCSASGKPWPAANWKFYVAFSLFRAASIYTGVYSRWLMGNASAGERARNTGVQANELVESALGYIARENVLPEHPPSVQRDVSPSYESLVDGSGRFIPNRKVLELRQKLIKFMETHIYPMENEFSKLAQSDMRWTVHPQEEKLKEMAKREGLWNLFVPVDSAARARRELAATENKHNLSGKSFDQLFGEGLTNLEYGYLCEIMGRSVWAPQVFNCGAPDTGNMEVILRYGNKEQISEWLIPLLEGRIRSGFAMTEPQVASSDATNIECSIRRQGDSYVINGTKWWTSGAMDPRCRVLILMGKTDFNAPKHKQQSMILVDMRTPGISVKRPLTVFGFDDAPHGHAEISFENVVVPAKNILLGEGRGFEIAQGRLGPGRLHHCMRLIGAAERGMELMAQRALSRKTFGKFIAQHGSFVSDLAKLRVELEGTRLLVLEAADHLDKFGNKKARGILAMAKVAAPNMALKVLDTAIQVHGAAGVSSDTVLAHLWATARTLRIADGPDEVHLGTIGKLELQRASKL

SEQ ID NO: 73411 - DNA, 1710 bp, Arabidopsis thaliana
  misc_feature (1)..(1710): Ceres Seq. ID no. 4966813
  misc_feature: MA Experiment ID: 20000179 Result: Down-regulated in Transcription
  misc_feature: MA Experiment 20000179 PARAMETER Experiment Name: At_Germinating_Seeds_P Parameter: Age (hr) Value: 6 vs. 0
  misc_feature: MA Experiment 20000179 PARAMETER Experiment Name: At_Germinating_Seeds_P Parameter: Tissue Value: Germinating Seeds
  misc_feature: MA Experiment ID: 20000180 Result: Down-regulated in Transcription
  misc_feature: MA Experiment 20000180 PARAMETER Experiment Name: At_Germinating_Seeds_P Parameter: Age (hr) Value: 24 vs. 0
  misc_feature: MA Experiment 20000180 PARAMETER Experiment Name: At_Germinating_Seeds_P Parameter: Tissue Value: Germinating Seeds
  misc_feature: MA Experiment ID: 20000185 Result: Up-regulated in Transcription
  misc_feature: MA Experiment 20000185 PARAMETER Experiment Name: At_Roots__P Parameter: Age (day) Value: 7 vs. 21
  misc_feature: MA Experiment 20000185 PARAMETER Experiment Name: At_Roots__P Parameter: Organism Value: A. thaliana
  misc_feature: MA Experiment 20000185 PARAMETER Experiment Name: At_Roots__P Parameter: Tissue Value: Roots vs. Whole Plant
  misc_feature: MA Experiment ID: 20000439 Result: Up-regulated in Transcription
  misc_feature: MA Experiment 20000439 PARAMETER Experiment Name: At_Roots__P Parameter: Age (day) Value: 14 vs. 21
  misc_feature: MA Experiment 20000439 PARAMETER Experiment Name: At_Roots__P Parameter: Organism Value: A. thaliana
  misc_feature: MA Experiment 20000439 PARAMETER Experiment Name: At_Roots__P Parameter: Tissue Value: Roots vs. Whole Plant
  misc_feature: MA Experiment ID: 20000456 Result: Up-regulated in Transcription
  misc_feature: MA Experiment 20000456 PARAMETER Experiment Name: At_100uM_BA_P Parameter: Age (day) Value: 14
  misc_feature: MA Experiment 20000456 PARAMETER Experiment Name: At_100uM_BA_P Parameter: Organism Value: A. thaliana
  misc_feature: MA Experiment 20000456 PARAMETER Experiment Name: At_100uM_BA_P Parameter: Plant Line Value: WS
  misc_feature: MA Experiment 20000456 PARAMETER Experiment Name: At_100uM_BA_P Parameter: Timepoint (hr) Value: 6
  misc_feature: MA Experiment 20000456 PARAMETER Experiment Name: At_100uM_BA_P Parameter: Tissue Value: Aerial
  misc_feature: MA Experiment 20000456 PARAMETER Experiment Name: At_100uM_BA_P Parameter: Treatment Value: 100uM BA vs. No Treatment
  misc_feature: MA Experiment ID: 20000709 Result: Up-regulated in Transcription
  misc_feature: MA Experiment 20000709 PARAMETER Experiment Name: At_15mM_NH4NO3_L-to-H_P Parameter: Age (hr) Value: 14
  misc_feature: MA Experiment 20000709 PARAMETER Experiment Name: At_15mM_NH4NO3_L-to-H_P Parameter: Organism Value: A. thaliana
  misc_feature: MA Experiment 20000709 PARAMETER Experiment Name: At_15mM_NH4NO3_L-to-H_P Parameter: Plant Line Value: WS
  misc_feature: MA Experiment 20000709 PARAMETER Experiment Name: At_15mM_NH4NO3_L-to-H_P Parameter: Timepoint (hr) Value: 4
  misc_feature: MA Experiment 20000709 PARAMETER Experiment Name: At_15mM_NH4NO3_L-to-H_P Parameter: Tissue Value: Aerial
  misc_feature: MA Experiment 20000709 PARAMETER Experiment Name: At_15mM_NH4NO3_L-to-H_P Parameter: Treatment Value: 15mM NH4NO3 vs. 30mM Mannitol
  misc_feature: MA Experiment ID: 20000794 Result: Up-regulated in Transcription
  misc_feature: MA Experiment 20000794 PARAMETER Experiment Name: At_Petals_P Parameter: Age (day) Value: 23-25 days
  misc_feature: MA Experiment 20000794 PARAMETER Experiment Name: At_Petals_P Parameter: Plant Line Value: WS
  misc_feature: MA Experiment 20000794 PARAMETER Experiment Name: At_Petals_P Parameter: Tissue Value: Petals vs. Whole plant
  misc_feature: MA Experiment ID: 20001757 Result: Down-regulated in Transcription
  misc_feature: MA Experiment 20001757 PARAMETER Experiment Name: At_50mM_NH4NO3_L-to-H_P Parameter: Timepoint (hr) Value: 6
  misc_feature: MA Experiment 20001757 PARAMETER Experiment Name: At_50mM_NH4NO3_L-to-H_P Parameter: Tissue Value: Leaf
  misc_feature: MA Experiment 20001757 PARAMETER Experiment Name: At_50mM_NH4NO3_L-to-H_P Parameter: Treatment Value: 50mM NH4NO3 vs 100mM Mannitol
atggctgtcgtcgtcactaacctaggaagctgtctgaagatttcttatgtcatctttgccttttgttctgctttctttctcggtgctatcaaaggtttgatcgtaggtccaattgctggattaacattaatagttgggaatgttggagtgattctttgtttgttccctgcacatgttacttggactatttacgctgttgcaaagacaaatagatttgacattcctctgaaggtagcaatcttagtggcacttcctgcattgtttgggatatggttaggtctaagtctagcaattagtgttcttgttggtgttggctatggattcttcactccttggatctctgcttttgaagcctttagacaagacactgaatccaacaagttcttccactgtcttgtggatggaacttggggaaccatcaaagggagttgcattgtggttactgattttgcagatttttgttaccattcttatccactttacttaaaggagttacgcgaatccccggtttcagatgagcttcaaactcttaggttgattcatgttccaggatgcatcattgttgggattctaggattagtcattgatatccctcttttcactgcaatcgcggttattaaaagcccttaccttcttctcaaaggctggtaccgactagctcaagacgcgattaatcgagaaggaccatttcttgaaatagcttgtataccagttgctggtttgacagtactgttatggcctatagttgtcattggttttattttggtgaccatcttctccagcatctttgtaggactatatggagcagttgttgtatttcaggaaaggtcattcagaagaggagtctcttatgtgattgcagtagttggagaatttgatgagtacacaaatgattggctttaccttagagaaggaaccatcttcccaaagccaagatatcggatgggaagaggatcgttttcaagtgaagtatctgtgatcgttcacccttcagatgtaacaagagtcaatagttctggttctgtcgatgctccagcgatgctagtaccgagcctagttcactctgtatctgttagagaagcaatacaagaagtgagaatggttcagatttgggagcatatgatggggtggtttgagatgcaaggcaaagagctactagatgcagaagtgttaacaccaactgatctctatgagtctttaaagggcagacacggaaacgaatcatcgattatcaatgtcgggcttccttcttacgctttgttgcatacattgcttagctctataaaagctggtgttcatggtgtgcttttgcttgatggctcggaagtgacacatttgaatagaccacaagacaagttcttggactgggtctttaatccaataatggtattgaaagatcagattcgagctcttaaacttggagaaagtgaagttaaatacttagagaaagttgttctctttggaaaccatgaacaaaggatggaagcttgggataatcacagtaacccgcctcaagaaaaccttcgaactgctcaaatccaaggaatcagcagaaggatgatgggaatggtacggagcgtatcgaagcttccgacttatagaagaaggttcagacaagtggttaaggctctaattacttattattcagagaaacaaggcttaaatcgaaccggttccatgagctctggagatttcattgaagagggttaa

SEQ ID NO: 73412 - protein, 569 aa, Arabidopsis thaliana
  peptide (1)..(569): Ceres Seq. ID no. 4966814
  misc_feature (1)..(519): Homolog of NCBI NO: 15234594 NR Description: hypothetical protein; protein id: At4g37030.1
  misc_feature (12)..(559): Homolog of NCBI NO: 38344840 NR Description: OSJNBa0064H22.21 [Oryza sativa (japonica
  misc_feature (16)..(561): Homolog of NCBI NO: 9758091 NR Description: dbj|BAA95714.1~gene_id:MNF13.19~strong similarity
  misc_feature (7)..(569): Homolog of NCBI NO: 38345330 NR Description: OSJNBa0081L15.3 [Oryza sativa (japonica
  misc_feature (14)..(563): Homolog of NCBI NO: 15235450 NR Description: putative protein; protein id: At4g12680.1
  misc_feature (16)..(561): Homolog of NCBI NO: 30693640 NR Description: expressed protein [Arabidopsis thaliana] unknown protein [Arabidopsis thaliana]
  misc_feature (21)..(544): Homolog of NCBI NO: 27311557 NR Description: Unknown protein [Arabidopsis thaliana]
  misc_feature (21)..(544): Homolog of NCBI NO: 30688768 NR Description: expressed protein [Arabidopsis thaliana]
  misc_feature (99)..(544): Homolog of NCBI NO: 7939511 NR Description: emb|CAB40985.1~gene_id:K1G2.10~similar to unknown
MAVVVTNLGSCLKISYVIFAFCSAFFLGAIKGLIVGPIAGLTLIVGNVGVILCLFPAHVTWTIYAVAKTNRFDIPLKVAILVALPALFGIWLGLSLAISVLVGVGYGFFTPWISAFEAFRQDTESNKFFHCLVDGTWGTIKGSCIVVTDFADFCYHSYPLYLKELRESPVSDELQTLRLIHVPGCIIVGILGLVIDIPLFTAIAVIKSPYLLLKGWYRLAQDAINREGPFLEIACIPVAGLTVLLWPIVVIGFILVTIFSSIFVGLYGAVVVFQERSFRRGVSYVIAVVGEFDEYTNDWLYLREGTIFPKPRYRMGRGSFSSEVSVIVHPSDVTRVNSSGSVDAPAMLVPSLVHSVSVREAIQEVRMVQIWEHMMGWFEMQGKELLDAEVLTPTDLYESLKGRHGNESSIINVGLPSYALLHTLLSSIKAGVHGVLLLDGSEVTHLNRPQDKFLDWVFNPIMVLKDQIRALKLGESEVKYLEKVVLFGNHEQRMEAWDNHSNPPQENLRTAQIQGISRRMMGMVRSVSKLPTYRRRFRQVVKALITYYSEKQGLNRTGSMSSGDFIEEG

SEQ ID NO: 73413 - DNA, 2652 bp, Arabidopsis thaliana
  misc_feature (1)..(2652): Ceres Seq. ID no. 4967008
  misc_feature: MA Experiment ID: 20000307 Result: Up-regulated in Transcription
  misc_feature: MA Experiment 20000307 PARAMETER Experiment Name: At_Germinating_Seeds_Sub_P Parameter: Age (hr) Value: 24 vs. 0
  misc_feature: MA Experiment 20000307 PARAMETER Experiment Name: At_Germinating_Seeds_Sub_P Parameter: Organism Value: A. thaliana
  misc_feature: MA Experiment 20000307 PARAMETER Experiment Name: At_Germinating_Seeds_Sub_P Parameter: Plant Line Value: WS
  misc_feature: MA Experiment 20000307 PARAMETER Experiment Name: At_Germinating_Seeds_Sub_P Parameter: Tissue Value: Germinating Seeds
atgtttcatcgttcgctcacgaagcaaggacttgataatgatgtctccactataactaagcttgtagcacggagttgtgaattgggtactcgtgaaagtttgagctttgctaaagaagtgtttgagaacagtgaatcgtatggaacttgtttcatgtacaattctttgattcgaggatatgcatcttctgggttatgcaacgaagctatattgttatttcttcgaatgatgaattctgggatttctccagataagtacacgtttccttttggattgagtgcgtgtgcgaaaagcagagcgaaaggtaatgggattcagattcatgggttgattgtgaagatgggttatgcgaaagatttgtttgtgcagaactcgctggttcatttttacgccgagtgtggagagcttgatagtgcacgtaaggtgtttgatgaaatgtctgagagaaatgttgtttcttggacgagtatgatttgtggttacgcgaggcgggattttgctaaagacgctgttgatttgttttttcggatggtgagagatgaagaggtgactcctaattcggttacaatggtgtgtgtgatatcggcttgtgctaagctagaggatcttgagacgggcgagaaggtttatgcttttatccgtaattctggtattgaagttaatgatcttatggttagtgcactggttgatatgtacatgaaatgcaatgccattgatgtagcaaaacggctttttgatgaatatggtgctagtaatttggatttgtgcaatgcaatggcatcaaattatgtacggcaagggttaacgagggaggctttaggtgtttttaatctgatgatggactctggtgttagacctgataggatttcgatgttgagtgcgatttcatcttgttcacaattgagaaatatcttgtggggaaagagctgtcatgggtatgtattgaggaatgggtttgagagttgggataatatatgcaatgcgttgattgatatgtacatgaaatgtcataggcaagatactgcgtttaggatctttgatcggatgtcgaacaagacagtggtgacgtggaactcgattgttgctggctatgtagagaatggtgaggtggatgcagcctgggaaacatttgaaaccatgcctgagaaaaacattgtttcttggaatacgattatcagcggtctggtgcaaggaagtttgtttgaggaagcgattgaagttttctgttctatgcaaagccaagagggtgtcaatgcggatggtgtgacaatgatgagtattgcatctgcttgtgggcacttgggagctcttgatctagctaaatggatatattactacattgagaagaacggaattcagcttgatgtcagacttggtacaaccttagtagatatgttttctaggtgtggggatcctgaaagtgctatgtcaatttttaatagtttgacaaacagagatgtctcagcttggacagcggctataggagcaatggctatggcaggaaacgctgagcgagcaattgagcttttcgatgatatgattgaacaagggttgaaaccagatggggttgcgtttgttggagcactgacagcttgcagccatggtggattggtccaacagggtaaggaaattttctattcgatgttgaaacttcatggagtttctccagaagatgtgcactatggatgtatggttgatctgcttggtcgagcaggattgttagaggaagctgtgcaactcattgaggacatgcctatggagccaaacgatgtgatttggaactctcttttagctgcttgtcgtgttcagggaaatgtggagatggcagcttatgcagccgagaagatacaagtcttggctccagagagaactgggagttatgttcttctgtcaaatgtttatgcatcagctggaagatggaacgacatggcgaaagtgagactgagtatgaaggagaaagggttacgtaaaccgccagggactagttcaatacagattcgaggtaaaacccatgagttcacatcaggggacgagtcacaccctgaaatgccaaacatagaagcaatgctagatgaagttagtcaaagagcgagtcacttaggccatgtacctgatcttagtaatgttcttatggatgttgatgagaaagagaagatctttatgcttagcagacacagcgagaaacttgcaatggcctatggactcattagctcaaacaaaggcacaacaatccgaatagtcaagaacctaagagtatgctctgattgtcattcatttgcaaaatttgcatccaaagtatacaacagagaaatcattctaagagacaataaccggtttcattacatccgtcaagggaagtgttcttgcggtgacttctgtttgacggatgacgatctcgaagttctcaaaggttgtttagatctaggctttggtttcaactacgacgagatccctgcgctctgcaagactttacctgctttagagctttgctattcaatgagccaaaaaaatttagacgataagcatacaccatcactccaattgccaattggaagatctctagtcccgtcgtgtgataatccggatgatgtgaaagctagactcaaatgctgggcacaagccgttgcctgtactgtccaattgtgcagctga

SEQ ID NO: 73414 - protein, 883 aa, Arabidopsis thaliana
  peptide (1)..(883): Ceres Seq. ID no. 4967009
  misc_feature (324)..(358): Pfam Name: PPR repeat Pfam Description: PPR repeat
  misc_feature (106)..(792): Homolog of NCBI NO: 15227619 NR Description: hypothetical protein; protein id: At2g29760.1
  misc_feature (221)..(792): Homolog of NCBI NO: 34393605 NR Description: pentatricopeptide (PPR) repeat-containing
  misc_feature (19)..(203): Homolog of NCBI NO: 34393605 NR Description: pentatricopeptide (PPR) repeat-containing
  misc_feature (1)..(789): Homolog of NCBI NO: 15237421 NR Description: putative protein; protein id: At5g16860.1
  misc_feature (136)..(792): Homolog of NCBI NO: 34910298 NR Description: P0013F10.8 [Oryza sativa (japonica
  misc_feature (327)..(792): Homolog of NCBI NO: 15221306 NR Description: hypothetical protein; protein id: At1g74630.1
  misc_feature (3)..(211): Homolog of NCBI NO: 15221306 NR Description: hypothetical protein; protein id: At1g74630.1
  misc_feature (170)..(792): Homolog of NCBI NO: 15233584 NR Description: hypothetical protein; protein id: At4g14820.1
  misc_feature (189)..(792): Homolog of NCBI NO: 15239979 NR Description: selenium-binding protein-like; protein id:
  misc_feature (124)..(792): Homolog of NCBI NO: 15235498 NR Description: hypothetical protein; protein id: At4g02750.1
MFHRSLTKQGLDNDVSTITKLVARSCELGTRESLSFAKEVFENSESYGTCFMYNSLIRGYASSGLCNEAILLFLRMMNSGISPDKYTFPFGLSACAKSRAKGNGIQIHGLIVKMGYAKDLFVQNSLVHFYAECGELDSARKVFDEMSERNVVSWTSMICGYARRDFAKDAVDLFFRMVRDEEVTPNSVTMVCVISACAKLEDLETGEKVYAFIRNSGIEVNDLMVSALVDMYMKCNAIDVAKRLFDEYGASNLDLCNAMASNYVRQGLTREALGVFNLMMDSGVRPDRISMLSAISSCSQLRNILWGKSCHGYVLRNGFESWDNICNALIDMYMKCHRQDTAFRIFDRMSNKTVVTWNSIVAGYVENGEVDAAWETFETMPEKNIVSWNTIISGLVQGSLFEEAIEVFCSMQSQEGVNADGVTMMSIASACGHLGALDLAKWIYYYIEKNGIQLDVRLGTTLVDMFSRCGDPESAMSIFNSLTNRDVSAWTAAIGAMAMAGNAERAIELFDDMIEQGLKPDGVAFVGALTACSHGGLVQQGKEIFYSMLKLHGVSPEDVHYGCMVDLLGRAGLLEEAVQLIEDMPMEPNDVIWNSLLAACRVQGNVEMAAYAAEKIQVLAPERTGSYVLLSNVYASAGRWNDMAKVRLSMKEKGLRKPPGTSSIQIRGKTHEFTSGDESHPEMPNIEAMLDEVSQRASHLGHVPDLSNVLMDVDEKEKIFMLSRHSEKLAMAYGLISSNKGTTIRIVKNLRVCSDCHSFAKFASKVYNREIILRDNNRFHYIRQGKCSCGDFCLTDDDLEVLKGCLDLGFGFNYDEIPALCKTLPALELCYSMSQKNLDDKHTPSLQLPIGRSLVPSCDNPDDVKARLKCWAQAVACTVQLCS

SEQ ID NO: 73415 - protein, 832 aa, Arabidopsis thaliana
  peptide (1)..(832): Ceres Seq. ID no. 4967010
  misc_feature (273)..(307): Pfam Name: PPR repeat Pfam Description: PPR repeat
  misc_feature (55)..(741): Homolog of NCBI NO: 15227619 NR Description: hypothetical protein; protein id: At2g29760.1
  misc_feature (170)..(741): Homolog of NCBI NO: 34393605 NR Description: pentatricopeptide (PPR) repeat-containing
  misc_feature (1)..(152): Homolog of NCBI NO: 34393605 NR Description: pentatricopeptide (PPR) repeat-containing
  misc_feature (1)..(738): Homolog of NCBI NO: 15237421 NR Description: putative protein; protein id: At5g16860.1
  misc_feature (85)..(741): Homolog of NCBI NO: 34910298 NR Description: P0013F10.8 [Oryza sativa (japonica
  misc_feature (276)..(741): Homolog of NCBI NO: 15221306 NR Description: hypothetical protein; protein id: At1g74630.1
  misc_feature (1)..(160): Homolog of NCBI NO: 15221306 NR Description: hypothetical protein; protein id: At1g74630.1
  misc_feature (119)..(741): Homolog of NCBI NO: 15233584 NR Description: hypothetical protein; protein id: At4g14820.1
  misc_feature (138)..(741): Homolog of NCBI NO: 15239979 NR Description: selenium-binding protein-like; protein id:
  misc_feature (73)..(741): Homolog of NCBI NO: 15235498 NR Description: hypothetical protein; protein id: At4g02750.1
MYNSLIRGYASSGLCNEAILLFLRMMNSGISPDKYTFPFGLSACAKSRAKGNGIQIHGLIVKMGYAKDLFVQNSLVHFYAECGELDSARKVFDEMSERNVVSWTSMICGYARRDFAKDAVDLFFRMVRDEEVTPNSVTMVCVISACAKLEDLETGEKVYAFIRNSGIEVNDLMVSALVDMYMKCNAIDVAKRLFDEYGASNLDLCNAMASNYVRQGLTREALGVFNLMMDSGVRPDRISMLSAISSCSQLRNILWGKSCHGYVLRNGFESWDNICNALIDMYMKCHRQDTAFRIFDRMSNKTVVTWNSIVAGYVENGEVDAAWETFETMPEKNIVSWNTIISGLVQGSLFEEAIEVFCSMQSQEGVNADGVTMMSIASACGHLGALDLAKWIYYYIEKNGIQLDVRLGTTLVDMFSRCGDPESAMSIFNSLTNRDVSAWTAAIGAMAMAGNAERAIELFDDMIEQGLKPDGVAFVGALTACSHGGLVQQGKEIFYSMLKLHGVSPEDVHYGCMVDLLGRAGLLEEAVQLIEDMPMEPNDVIWNSLLAACRVQGNVEMAAYAAEKIQVLAPERTGSYVLLSNVYASAGRWNDMAKVRLSMKEKGLRKPPGTSSIQIRGKTHEFTSGDESHPEMPNIEAMLDEVSQRASHLGHVPDLSNVLMDVDEKEKIFMLSRHSEKLAMAYGLISSNKGTTIRIVKNLRVCSDCHSFAKFASKVYNREIILRDNNRFHYIRQGKCSCGDFCLTDDDLEVLKGCLDLGFGFNYDEIPALCKTLPALELCYSMSQKNLDDKHTPSLQLPIGRSLVPSCDNPDDVKARLKCWAQAVACTVQLCS

SEQ ID NO: 73416 - protein, 808 aa, Arabidopsis thaliana
  peptide (1)..(808): Ceres Seq. ID no. 4967011
  misc_feature (249)..(283): Pfam Name: PPR repeat Pfam Description: PPR repeat
  misc_feature (31)..(717): Homolog of NCBI NO: 15227619 NR Description: hypothetical protein; protein id: At2g29760.1
  misc_feature (146)..(717): Homolog of NCBI NO: 34393605 NR Description: pentatricopeptide (PPR) repeat-containing
  misc_feature (1)..(128): Homolog of NCBI NO: 34393605 NR Description: pentatricopeptide (PPR) repeat-containing
  misc_feature (1)..(714): Homolog of NCBI NO: 15237421 NR Description: putative protein; protein id: At5g16860.1
  misc_feature (61)..(717): Homolog of NCBI NO: 34910298 NR Description: P0013F10.8 [Oryza sativa (japonica
  misc_feature (252)..(717): Homolog of NCBI NO: 15221306 NR Description: hypothetical protein; protein id: At1g74630.1
  misc_feature (1)..(136): Homolog of NCBI NO: 15221306 NR Description: hypothetical protein; protein id: At1g74630.1
  misc_feature (95)..(717): Homolog of NCBI NO: 15233584 NR Description: hypothetical protein; protein id: At4g14820.1
  misc_feature (114)..(717): Homolog of NCBI NO: 15239979 NR Description: selenium-binding protein-like; protein id:
  misc_feature (49)..(717): Homolog of NCBI NO: 15235498 NR Description: hypothetical protein; protein id: At4g02750.1
MMNSGISPDKYTFPFGLSACAKSRAKGNGIQIHGLIVKMGYAKDLFVQNSLVHFYAECGELDSARKVFDEMSERNVVSWTSMICGYARRDFAKDAVDLFFRMVRDEEVTPNSVTMVCVISACAKLEDLETGEKVYAFIRNSGIEVNDLMVSALVDMYMKCNAIDVAKRLFDEYGASNLDLCNAMASNYVRQGLTREALGVFNLMMDSGVRPDRISMLSAISSCSQLRNILWGKSCHGYVLRNGFESWDNICNALIDMYMKCHRQDTAFRIFDRMSNKTVVTWNSIVAGYVENGEVDAAWETFETMPEKNIVSWNTIISGLVQGSLFEEAIEVFCSMQSQEGVNADGVTMMSIASACGHLGALDLAKWIYYYIEKNGIQLDVRLGTTLVDMFSRCGDPESAMSIFNSLTNRDVSAWTAAIGAMAMAGNAERAIELFDDMIEQGLKPDGVAFVGALTACSHGGLVQQGKEIFYSMLKLHGVSPEDVHYGCMVDLLGRAGLLEEAVQLIEDMPMEPNDVIWNSLLAACRVQGNVEMAAYAAEKIQVLAPERTGSYVLLSNVYASAGRWNDMAKVRLSMKEKGLRKPPGTSSIQIRGKTHEFTSGDESHPEMPNIEAMLDEVSQRASHLGHVPDLSNVLMDVDEKEKIFMLSRHSEKLAMAYGLISSNKGTTIRIVKNLRVCSDCHSFAKFASKVYNREIILRDNNRFHYIRQGKCSCGDFCLTDDDLEVLKGCLDLGFGFNYDEIPALCKTLPALELCYSMSQKNLDDKHTPSLQLPIGRSLVPSCDNPDDVKARLKCWAQAVACTVQLCS

SEQ ID NO: 73417 - DNA, 3603 bp, Arabidopsis thaliana
  misc_feature (1)..(3603): Ceres Seq. ID no. 4968107
  misc_feature: MA Experiment ID: 20001905 Result: Down-regulated in Transcription
  misc_feature: MA Experiment 20001905 PARAMETER Experiment Name: At_Drought_Reproduction_P Parameter: Age (day) Value: 40
  misc_feature: MA Experiment 20001905 PARAMETER Experiment Name: At_Drought_Reproduction_P Parameter: Organism Value: A. thaliana
  misc_feature: MA Experiment 20001905 PARAMETER Experiment Name: At_Drought_Reproduction_P Parameter: Plant Line Value: WS
  misc_feature: MA Experiment 20001905 PARAMETER Experiment Name: At_Drought_Reproduction_P Parameter: Timepoint (day) Value: 10
  misc_feature: MA Experiment 20001905 PARAMETER Experiment Name: At_Drought_Reproduction_P Parameter: Tissue Value: Rosettes
  misc_feature: MA Experiment 20001905 PARAMETER Experiment Name: At_Drought_Reproduction_P Parameter: Treatment Value: Drought vs. No Drought
atgaaacgcatcaatgtcgatctccatcttctccattttccgaaattcagaaaatttcaatcacgaaaagtatcttcgtccctacccaaattggaactcgatcagaaatcaccacaggagacagttttcttacttggtcaggtacttgacacttacccagatatcagaacacttagaacagtccactcaagaatcattttggaagatctacgttgtaattcttctttgggtgttaaacttatgagagcttatgcttctctaaaagatgtagcgtcagcacgcaaggtgttcgacgaaattcctgagagaaacgtaattatcattaatgttatgattagaagctatgtgaataatgggttttacggtgaaggtgttaaagtgtttgggacgatgtgtggttgtaatgttagacctgatcattatactttcccgtgtgttctaaaggcgtgttcttgctctgggactattgtcattgggaggaaaattcatgggtctgctacaaaagttgggctctcttcgactttgtttgttgggaatggtttagtttctatgtatggaaagtgtggatttttatctgaagcaaggcttgtacttgacgagatgtctaggagagatgtggtgtcttggaactcgttggttgttgggtatgcgcaaaatcagagatttgatgatgctttggaggtttgtagggaaatggagtctgtgaagataagccatgatgctggtacgatggctagtctgttaccagcagtgagtaacactacaactgaaaacgttatgtatgttaaagatatgttttttaaaatggggaaaaagagtttggtttcatggaatgtgatgatcggtgtgtatatgaaaaatgcgatgcctgttgaagctgtggaattgtattcccgaatggaggctgatgggtttgaacctgatgcagtctcaatcacaagtgtattacctgcttgtggagatacctctgctctgtctcttggtaagaaaatccatggatacattgagaggaagaagctgataccaaatctgttgttagagaatgcactgatcgacatgtatgcaaaatgcggatgtttagagaaagctagagatgtgtttgagaacatgaagtcacgtgatgttgtgtcttggacagctatgatttcagcttatggattcagcggacgaggctgtgacgcagtggcattgttttcgaaattgcaagattcgggtctcgtccctgattcaattgcgtttgtcacaacgcttgctgcttgtagccatgcggggttactagaagaaggtaggagttgtttcaaactcatgacagatcattacaagatcactcctaggttagagcatttggcttgtatggtggatcttcttggccgagccgggaaagtgaaagaagcttacagatttatacaagatatgtcaatggaaccaaacgagagagtttggggagcattattaggagcttgcagggtgcattctgatacagacatcggtctactagcagctgataaacttttccagttagcacccgagcaatcgggttactacgtattgctttctaacatatacgcaaaggctggaagatgggaagaagtgactaacatcagaaacataatgaagagcaaagggttaaagaagaatcccggagcaagcaatgttgaggtcaacagaataattcatacattcttagtaggcgacaggtcacacccgcaatccgatgagatatacagagagctggatgttctagtaaagaaaatgaaagagttaggttatgttcctgattcagagtcagcgcttcacgatgtggaagaggaagataaagagacgcatttagctgttcacagtgagaaattagccattgtgtttgctctgatgaacactaaggaggaagaagaagacagtaataataccataagaataacgaagaatcttaggatatgtggagactgtcatgttgcagctaagcttatctcacagataacttctcgagagataatcatcagagacactaatagatttcatgtgttccggttcggtgtttgctcttgtgcttctgagctcagagatagagagagcgagaggttagagataacagtagttttaccgatgattgagtcggttatggccgttcgtctctccaccggattttgctcgtcgacggcgttactccagtatcgtacagcaccgagctcggaggagggaggaaactgcttccattatgcgtcccgccgcgtttttcagcctcaacgtatccaccatattgatgggagtgggtttctgaagtacaacagtgactatataacaagaaaacacctacggaagaatcgaactcaagccacagctgagtatgtagattcagcttcagatccagaaaagcaaactggcaagtcaaggtatcatccttcagaagaaatcagagcctctttgccacagaatgatggagattccaggctttcacctgcagaaactactagaaccatcattgaggtgaacaataaaggaaccctgatgcttacaggttctattggtgatggagttcatgagaatattctctggccagatataccttatataacagatcaaaatggaaatttatactttcaagtaaaggaggatgaggacgtcatgcagtccgttacttctgaaaataattatgtgcaagttatagttggttttgatacgatggagatgatcaaggaaatggagctgatgggactttctgatagtgactttgaaactgaagatgatgaaagtggagatgatgacagtgaggatacaggagaagacgaagatgaggaggaatgggttgctattttagaggatgaagatgaagacgatgatgatgatgatgatgatgatgaggatgatgatgattctgattctgatgaatcgctgggagactgggcaaatttggaaacaatgaggagttgtcatcccatgttttttgcaaagagaatgactgaggttgcttcaaatgatcctgttgattggatggatcagccgtctgctggccttgctatccagggacttttgagtcatatcttagtggaagattattcagatatccaaaagaaacttgctgatagcaattctacaactaacggaaacaaggatgcagaaaacttagtggacaagcttgaagacaatagtaaggcaggtggtgacgaatctgagatagattcatcacaggatgaaaaagcaagaaatgtggtggcgttttacaagctggagatgataagaattcagcttatcacagcacaaggggatcagactgaagttgaggtggaagatgtcagaaaagcacaacctgatgctattgctcatgcatcagctgaaatcataagccgtttagaagaatctggtgataaaataactgaagcactcaaatctctgtgttggagacataacagtattcaagcagaggaagtgaagctgattgggatagattccctaggttttgacctcaggctttgcgcaggagcaaagattgagtcattgcgatttgcattctcgacaagggcaacatcagaagaaaacgcagagggacaaataagaaaactattattcccgaaaacgaaccagtcgacacaaccaaaaccaaaatga

SEQ ID NO: 73418 - protein, 1200 aa, Arabidopsis thaliana
  peptide (1)..(1200): Ceres Seq. ID no. 4968108
  misc_feature (106)..(140): Pfam Name: PPR repeat Pfam Description: PPR repeat
  misc_feature (717)..(1200): Homolog of NCBI NO: 15229097 NR Description: putative protein; protein id: At3g49140.1
  misc_feature (752)..(1200): Homolog of NCBI NO: 15237882 NR Description: putative protein; protein id: At5g24060.1 thaliana] >gi|9758230|dbj|BAB08729.1|
  misc_feature (265)..(682): Homolog of NCBI NO: 15220337 NR Description: hypothetical protein; protein id: At1g11290.1
  misc_feature (3)..(302): Homolog of NCBI NO: 15220337 NR Description: hypothetical protein; protein id: At1g11290.1
  misc_feature (271)..(682): Homolog of NCBI NO: 15237421 NR Description: putative protein; protein id: At5g16860.1
  misc_feature (55)..(248): Homolog of NCBI NO: 15237421 NR Description: putative protein; protein id: At5g16860.1
  misc_feature (265)..(682): Homolog of NCBI NO: 11281371 NR Description: hypothetical protein T8H10.30 - Arabidopsis >gi|6706414|emb|CAB66100.1| putative protein [Arabidopsis
  misc_feature (265)..(682): Homolog of NCBI NO: 30794008 NR Description: unknown protein [Arabidopsis thaliana]
  misc_feature (265)..(682): Homolog of NCBI NO: 30694644 NR Description: pentatricopeptide (PPR) repeat-containing protein
  misc_feature (28)..(249): Homolog of NCBI NO: 11281371 NR Description: hypothetical protein T8H10.30 - Arabidopsis >gi|6706414|emb|CAB66100.1| putative protein [Arabidopsis
MKRINVDLHLLHFPKFRKFQSRKVSSSLPKLELDQKSPQETVFLLGQVLDTYPDIRTLRTVHSRIILEDLRCNSSLGVKLMRAYASLKDVASARKVFDEIPERNVIIINVMIRSYVNNGFYGEGVKVFGTMCGCNVRPDHYTFPCVLKACSCSGTIVIGRKIHGSATKVGLSSTLFVGNGLVSMYGKCGFLSEARLVLDEMSRRDVVSWNSLVVGYAQNQRFDDALEVCREMESVKISHDAGTMASLLPAVSNTTTENVMYVKDMFFKMGKKSLVSWNVMIGVYMKNAMPVEAVELYSRMEADGFEPDAVSITSVLPACGDTSALSLGKKIHGYIERKKLIPNLLLENALIDMYAKCGCLEKARDVFENMKSRDVVSWTAMISAYGFSGRGCDAVALFSKLQDSGLVPDSIAFVTTLAACSHAGLLEEGRSCFKLMTDHYKITPRLEHLACMVDLLGRAGKVKEAYRFIQDMSMEPNERVWGALLGACRVHSDTDIGLLAADKLFQLAPEQSGYYVLLSNIYAKAGRWEEVTNIRNIMKSKGLKKNPGASNVEVNRIIHTFLVGDRSHPQSDEIYRELDVLVKKMKELGYVPDSESALHDVEEEDKETHLAVHSEKLAIVFALMNTKEEEEDSNNTIRITKNLRICGDCHVAAKLISQITSREIIIRDTNRFHVFRFGVCSCASELRDRESERLEITVVLPMIESVMAVRLSTGFCSSTALLQYRTAPSSEEGGNCFHYASRRVFQPQRIHHIDGSGFLKYNSDYITRKHLRKNRTQATAEYVDSASDPEKQTGKSRYHPSEEIRASLPQNDGDSRLSPAETTRTIIEVNNKGTLMLTGSIGDGVHENILWPDIPYITDQNGNLYFQVKEDEDVMQSVTSENNYVQVIVGFDTMEMIKEMELMGLSDSDFETEDDESGDDDSEDTGEDEDEEEWVAILEDEDEDDDDDDDDDEDDDDSDSDESLGDWANLETMRSCHPMFFAKRMTEVASNDPVDWMDQPSAGLAIQGLLSHILVEDYSDIQKKLADSNSTTNGNKDAENLVDKLEDNSKAGGDESEIDSSQDEKARNVVAFYKLEMIRIQLITAQGDQTEVEVEDVRKAQPDAIAHASAEIISRLEESGDKITEALKSLCWRHNSIQAEEVKLIGIDSLGFDLRLCAGAKIESLRFAFSTRATSEENAEGQIRKLLFPKTNQSTQPKPK

SEQ ID NO: 73419 - protein, 1120 aa, Arabidopsis thaliana
  peptide (1)..(1120): Ceres Seq. ID no. 4968109
  misc_feature (26)..(60): Pfam Name: PPR repeat Pfam Description: PPR repeat
  misc_feature (637)..(1120): Homolog of NCBI NO: 15229097 NR Description: putative protein; protein id: At3g49140.1
  misc_feature (672)..(1120): Homolog of NCBI NO: 15237882 NR Description: putative protein; protein id: At5g24060.1 thaliana] >gi|9758230|dbj|BAB08729.1|
  misc_feature (185)..(602): Homolog of NCBI NO: 15220337 NR Description: hypothetical protein; protein id: At1g11290.1
  misc_feature (1)..(222): Homolog of NCBI NO: 15220337 NR Description: hypothetical protein; protein id: At1g11290.1
  misc_feature (191)..(602): Homolog of NCBI NO: 15237421 NR Description: putative protein; protein id: At5g16860.1
  misc_feature (1)..(168): Homolog of NCBI NO: 15237421 NR Description: putative protein; protein id: At5g16860.1
  misc_feature (185)..(602): Homolog of NCBI NO: 11281371 NR Description: hypothetical protein T8H10.30 - Arabidopsis >gi|6706414|emb|CAB66100.1| putative protein [Arabidopsis
  misc_feature (185)..(602): Homolog of NCBI NO: 30694644 NR Description: pentatricopeptide (PPR) repeat-containing protein
  misc_feature (185)..(602): Homolog of NCBI NO: 30794008 NR Description: unknown protein [Arabidopsis thaliana]
  misc_feature (1)..(169): Homolog of NCBI NO: 11281371 NR Description: hypothetical protein T8H10.30 - Arabidopsis >gi|6706414|emb|CAB66100.1| putative protein [Arabidopsis
MRAYASLKDVASARKVFDEIPERNVIIINVMIRSYVNNGFYGEGVKVFGTMCGCNVRPDHYTFPCVLKACSCSGTIVIGRKIHGSATKVGLSSTLFVGNGLVSMYGKCGFLSEARLVLDEMSRRDVVSWNSLVVGYAQNQRFDDALEVCREMESVKISHDAGTMASLLPAVSNTTTENVMYVKDMFFKMGKKSLVSWNVMIGVYMKNAMPVEAVELYSRMEADGFEPDAVSITSVLPACGDTSALSLGKKIHGYIERKKLIPNLLLENALIDMYAKCGCLEKARDVFENMKSRDVVSWTAMISAYGFSGRGCDAVALFSKLQDSGLVPDSIAFVTTLAACSHAGLLEEGRSCFKLMTDHYKITPRLEHLACMVDLLGRAGKVKEAYRFIQDMSMEPNERVWGALLGACRVHSDTDIGLLAADKLFQLAPEQSGYYVLLSNIYAKAGRWEEVTNIRNIMKSKGLKKNPGASNVEVNRIIHTFLVGDRSHPQSDEIYRELDVLVKKMKELGYVPDSESALHDVEEEDKETHLAVHSEKLAIVFALMNTKEEEEDSNNTIRITKNLRICGDCHVAAKLISQITSREIIIRDTNRFHVFRFGVCSCASELRDRESERLEITVVLPMIESVMAVRLSTGFCSSTALLQYRTAPSSEEGGNCFHYASRRVFQPQRIHHIDGSGFLKYNSDYITRKHLRKNRTQATAEYVDSASDPEKQTGKSRYHPSEEIRASLPQNDGDSRLSPAETTRTIIEVNNKGTLMLTGSIGDGVHENILWPDIPYITDQNGNLYFQVKEDEDVMQSVTSENNYVQVIVGFDTMEMIKEMELMGLSDSDFETEDDESGDDDSEDTGEDEDEEEWVAILEDEDEDDDDDDDDDEDDDDSDSDESLGDWANLETMRSCHPMFFAKRMTEVASNDPVDWMDQPSAGLAIQGLLSHILVEDYSDIQKKLADSNSTTNGNKDAENLVDKLEDNSKAGGDESEIDSSQDEKARNVVAFYKLEMIRIQLITAQGDQTEVEVEDVRKAQPDAIAHASAEIISRLEESGDKITEALKSLCWRHNSIQAEEVKLIGIDSLGFDLRLCAGAKIESLRFAFSTRATSEENAEGQIRKLLFPKTNQSTQPKPK

SEQ ID NO: 73420 - protein, 1090 aa, Arabidopsis thaliana
  peptide (1)..(1090): Ceres Seq. ID no. 4968110
  misc_feature (1)..(30): Pfam Name: PPR repeat Pfam Description: PPR repeat
  misc_feature (607)..(1090): Homolog of NCBI NO: 15229097 NR Description: putative protein; protein id: At3g49140.1
  misc_feature (642)..(1090): Homolog of NCBI NO: 15237882 NR Description: putative protein; protein id: At5g24060.1 thaliana] >gi|9758230|dbj|BAB08729.1|
  misc_feature (155)..(572): Homolog of NCBI NO: 15220337 NR Description: hypothetical protein; protein id: At1g11290.1
  misc_feature (1)..(192): Homolog of NCBI NO: 15220337 NR Description: hypothetical protein; protein id: At1g11290.1
  misc_feature (161)..(572): Homolog of NCBI NO: 15237421 NR Description: putative protein; protein id: At5g16860.1
  misc_feature (1)..(138): Homolog of NCBI NO: 15237421 NR Description: putative protein; protein id: At5g16860.1
  misc_feature (155)..(572): Homolog of NCBI NO: 11281371 NR Description: hypothetical protein T8H10.30 - Arabidopsis >gi|6706414|emb|CAB66100.1| putative protein [Arabidopsis
  misc_feature (155)..(572): Homolog of NCBI NO: 30694644 NR Description: pentatricopeptide (PPR) repeat-containing protein
  misc_feature (155)..(572): Homolog of NCBI NO: 30794008 NR Description: unknown protein [Arabidopsis thaliana]
  misc_feature (1)..(139): Homolog of NCBI NO: 11281371 NR Description: hypothetical protein T8H10.30 - Arabidopsis >gi|6706414|emb|CAB66100.1| putative protein [Arabidopsis
MIRSYVNNGFYGEGVKVFGTMCGCNVRPDHYTFPCVLKACSCSGTIVIGRKIHGSATKVGLSSTLFVGNGLVSMYGKCGFLSEARLVLDEMSRRDVVSWNSLVVGYAQNQRFDDALEVCREMESVKISHDAGTMASLLPAVSNTTTENVMYVKDMFFKMGKKSLVSWNVMIGVYMKNAMPVEAVELYSRMEADGFEPDAVSITSVLPACGDTSALSLGKKIHGYIERKKLIPNLLLENALIDMYAKCGCLEKARDVFENMKSRDVVSWTAMISAYGFSGRGCDAVALFSKLQDSGLVPDSIAFVTTLAACSHAGLLEEGRSCFKLMTDHYKITPRLEHLACMVDLLGRAGKVKEAYRFIQDMSMEPNERVWGALLGACRVHSDTDIGLLAADKLFQLAPEQSGYYVLLSNIYAKAGRWEEVTNIRNIMKSKGLKKNPGASNVEVNRIIHTFLVGDRSHPQSDEIYRELDVLVKKMKELGYVPDSESALHDVEEEDKETHLAVHSEKLAIVFALMNTKEEEEDSNNTIRITKNLRICGDCHVAAKLISQITSREIIIRDTNRFHVFRFGVCSCASELRDRESERLEITVVLPMIESVMAVRLSTGFCSSTALLQYRTAPSSEEGGNCFHYASRRVFQPQRIHHIDGSGFLKYNSDYITRKHLRKNRTQATAEYVDSASDPEKQTGKSRYHPSEEIRASLPQNDGDSRLSPAETTRTIIEVNNKGTLMLTGSIGDGVHENILWPDIPYITDQNGNLYFQVKEDEDVMQSVTSENNYVQVIVGFDTMEMIKEMELMGLSDSDFETEDDESGDDDSEDTGEDEDEEEWVAILEDEDEDDDDDDDDDEDDDDSDSDESLGDWANLETMRSCHPMFFAKRMTEVASNDPVDWMDQPSAGLAIQGLLSHILVEDYSDIQKKLADSNSTTNGNKDAENLVDKLEDNSKAGGDESEIDSSQDEKARNVVAFYKLEMIRIQLITAQGDQTEVEVEDVRKAQPDAIAHASAEIISRLEESGDKITEALKSLCWRHNSIQAEEVKLIGIDSLGFDLRLCAGAKIESLRFAFSTRATSEENAEGQIRKLLFPKTNQSTQPKPK

SEQ ID NO: 73421 - DNA, 930 bp, Arabidopsis thaliana
  misc_feature (1)..(930): Ceres Seq. ID no. 4968183
  misc_feature: MA Experiment ID: 20000306 Result: Up-regulated in Transcription
  misc_feature: MA Experiment 20000306 PARAMETER Experiment Name: At_Germinating_Seeds_Sub_P Parameter: Age (hr) Value: 6 vs. 0
  misc_feature: MA Experiment 20000306 PARAMETER Experiment Name: At_Germinating_Seeds_Sub_P Parameter: Organism Value: A. thaliana
  misc_feature: MA Experiment 20000306 PARAMETER Experiment Name: At_Germinating_Seeds_Sub_P Parameter: Plant Line Value: WS
  misc_feature: MA Experiment 20000306 PARAMETER Experiment Name: At_Germinating_Seeds_Sub_P Parameter: Tissue Value: Germinating Seeds
  misc_feature: MA Experiment ID: 20000307 Result: Up-regulated in Transcription
  misc_feature: MA Experiment 20000307 PARAMETER Experiment Name: At_Germinating_Seeds_Sub_P Parameter: Age (hr) Value: 24 vs. 0
  misc_feature: MA Experiment 20000307 PARAMETER Experiment Name: At_Germinating_Seeds_Sub_P Parameter: Organism Value: A. thaliana
  misc_feature: MA Experiment 20000307 PARAMETER Experiment Name: At_Germinating_Seeds_Sub_P Parameter: Plant Line Value: WS
  misc_feature: MA Experiment 20000307 PARAMETER Experiment Name: At_Germinating_Seeds_Sub_P Parameter: Tissue Value: Germinating Seeds
  misc_feature: MA Experiment ID: 20000315 Result: Down-regulated in Transcription
  misc_feature: MA Experiment 20000315 PARAMETER Experiment Name: At_14day_Shoots-Roots_Sub_P Parameter: Age (day) Value: 14
  misc_feature: MA Experiment 20000315 PARAMETER Experiment Name: At_14day_Shoots-Roots_Sub_P Parameter: Organism Value: A. thaliana
  misc_feature: MA Experiment 20000315 PARAMETER Experiment Name: At_14day_Shoots-Roots_Sub_P Parameter: Plant Line Value: WS
  misc_feature: MA Experiment 20000315 PARAMETER Experiment Name: At_14day_Shoots-Roots_Sub_P Parameter: Tissue Value: Shoots vs. Whole Plant
atggaagatctatggaagagagcgaaatcgtttgcagaagaagcagcgaagaaatcacaaaccataacactacaatcatcttcaacaacattcgtcaatctcgtcaccgaaaccgctaaaaaatccaaagagttcgctctcgaagcttctaagaaagctgattcgatcaatgtctccgagttcgtcgccgagacggcgaagaagtcaaaggaattcgctgctgaggtttcaacgaaagcggatcagctcaaagtcgtagcattgaaacaagctgatcagatccagaatataaaatcgattgccgacattatacctggaggattaggaggatcaggatctggtggtggtggttctgagatttctgaatctgagcttgttagttttggtattactgatgatttgagagagtttgttaaaggtttgacatctgctacgttccaggcttttcctgaacaagatgaatcgtcggaagtttctgatttggaaacaagtgcgtcgaatgttcggaaggatctttctgagtggcaggagagacatgccactcttgttcttggttctgtcaagcaaatttcgaagttgagatatgaactatgcccacgagttatgaaagaaaggaggttctggaggatatactttaccttagtgagcactcatgttgcaccatatgaaaggaagtacatggaggaacttaggaacaaagcagagagtaaagatgaagaagctaagaagagtccagggcttggaaggacagaatcagctgaaaagaacagaatatctactgcatcgtctgagcaagatctcgatacattcctgctgggagatctagaagacagtgacgaagctcctgatgatggtgatggtgatgatggaggaagcctgggtgatgatgactttgacaagattggcaactctgtaagtgaaaacgtttga

SEQ ID NO: 73422 - protein, 309 aa, Arabidopsis thaliana
  peptide (1)..(309): Ceres Seq. ID no. 4968184
  misc_feature (169)..(215): Pfam Name: BSD domain Pfam Description: BSD domain
  misc_feature (1)..(309): Homolog of NCBI NO: 25404796 NR Description: hypothetical protein T6L1.21 [imported] - thaliana >gi|12323210|gb|AAG51582.1|AC011665_3 hypothetical
  misc_feature (1)..(304): Homolog of NCBI NO: 30697787 NR Description: expressed protein [Arabidopsis thaliana]
  misc_feature (1)..(308): Homolog of NCBI NO: 15450417 NR Description: At1g26300/F28B23_4 [Arabidopsis thaliana]
  misc_feature (1)..(152): Homolog of NCBI NO: 6730653 NR Description: F4N2.1 [Arabidopsis thaliana]
  misc_feature (1)..(152): Homolog of NCBI NO: 15222683 NR Description: hypothetical protein; protein id: At1g26300.1
  misc_feature (110)..(260): Homolog of NCBI NO: 18404344 NR Description: expressed protein; protein id: At3g24820.1, by cDNA: 33269. [Arabidopsis thaliana] gb|AAF07359.1~gene_id:K7P8.11~similar to unknown protein
  misc_feature (227)..(308): Homolog of NCBI NO: 15222681 NR Description: hypothetical protein; protein id: At1g26280.1
MEDLWKRAKSFAEEAAKKSQTITLQSSSTTFVNLVTETAKKSKEFALEASKKADSINVSEFVAETAKKSKEFAAEVSTKADQLKVVALKQADQIQNIKSIADIIPGGLGGSGSGGGGSEISESELVSFGITDDLREFVKGLTSATFQAFPEQDESSEVSDLETSASNVRKDLSEWQERHATLVLGSVKQISKLRYELCPRVMKERRFWRIYFTLVSTHVAPYERKYMEELRNKAESKDEEAKKSPGLGRTESAEKNRISTASSEQDLDTFLLGDLEDSDEAPDDGDGDDGGSLGDDDFDKIGNSVSENV

SEQ ID NO: 73423 - DNA, 603 bp, Arabidopsis thaliana
  misc_feature (1)..(603): Ceres Seq. ID no. 4968265
  misc_feature: MA Experiment ID: 20000173 Result: Up-regulated in Transcription
  misc_feature: MA Experiment 20000173 PARAMETER Experiment Name: At_42deg_Heat_P Parameter: Age (day) Value: 14
  misc_feature: MA Experiment 20000173 PARAMETER Experiment Name: At_42deg_Heat_P Parameter: Organism Value: A. thaliana
  misc_feature: MA Experiment 20000173 PARAMETER Experiment Name: At_42deg_Heat_P Parameter: Plant Line Value: WS
  misc_feature: MA Experiment 20000173 PARAMETER Experiment Name: At_42deg_Heat_P Parameter: Temperature (deg C) Value: 42 vs. 22
  misc_feature: MA Experiment 20000173 PARAMETER Experiment Name: At_42deg_Heat_P Parameter: Timepoint (hr) Value: 6
  misc_feature: MA Experiment 20000173 PARAMETER Experiment Name: At_42deg_Heat_P Parameter: Tissue Value: Aerial
  misc_feature: MA Experiment ID: 20000264 Result: Down-regulated in Transcription
  misc_feature: MA Experiment 20000264 PARAMETER Experiment Name: At_Open_Flower_P Parameter: Age (day) Value: 21
  misc_feature: MA Experiment 20000264 PARAMETER Experiment Name: At_Open_Flower_P Parameter: Plant Line Value: WS
  misc_feature: MA Experiment 20000264 PARAMETER Experiment Name: At_Open_Flower_P Parameter: Tissue Value: Open Flower vs. Whole Plant
  misc_feature: MA Experiment ID: 20000495 Result: Down-regulated in Transcription
  misc_feature: MA Experiment 20000495 PARAMETER Experiment Name: At_Guard_Cells_P Parameter: Harvest Date Value: 8/2/2002
  misc_feature: MA Experiment 20000495 PARAMETER Experiment Name: At_Guard_Cells_P Parameter: Organism Value: A. thaliana
  misc_feature: MA Experiment 20000495 PARAMETER Experiment Name: At_Guard_Cells_P Parameter: Tissue Value: Guard Cells vs. Leaves
  misc_feature: MA Experiment ID: 20000794 Result: Down-regulated in Transcription
  misc_feature: MA Experiment 20000794 PARAMETER Experiment Name: At_Petals_P Parameter: Age (day) Value: 23-25 days
  misc_feature: MA Experiment 20000794 PARAMETER Experiment Name: At_Petals_P Parameter: Plant Line Value: WS
  misc_feature: MA Experiment 20000794 PARAMETER Experiment Name: At_Petals_P Parameter: Tissue Value: Petals vs. Whole plant
  misc_feature: MA Experiment ID: 20001558 Result: Up-regulated in Transcription
  misc_feature: MA Experiment 20001558 PARAMETER Experiment Name: At_Drought_Soil_Dry_P Parameter: Age (day) Value: 27
  misc_feature: MA Experiment 20001558 PARAMETER Experiment Name: At_Drought_Soil_Dry_P Parameter: Organism Value: A. thaliana
  misc_feature: MA Experiment 20001558 PARAMETER Experiment Name: At_Drought_Soil_Dry_P Parameter: Plant Line Value: WS
  misc_feature: MA Experiment 20001558 PARAMETER Experiment Name: At_Drought_Soil_Dry_P Parameter: Post Timepoint (hr) Value: 6
  misc_feature: MA Experiment 20001558 PARAMETER Experiment Name: At_Drought_Soil_Dry_P Parameter: Post-Treatment Value: Re-Water vs. No Drought
  misc_feature: MA Experiment 20001558 PARAMETER Experiment Name: At_Drought_Soil_Dry_P Parameter: Timepoint (day) Value: 13
  misc_feature: MA Experiment 20001558 PARAMETER Experiment Name: At_Drought_Soil_Dry_P Parameter: Treatment Value: Drought vs. No Drought
  misc_feature: MA Experiment ID: 20001757 Result: Up-regulated in Transcription
  misc_feature: MA Experiment 20001757 PARAMETER Experiment Name: At_50mM_NH4NO3_L-to-H_P Parameter: Timepoint (hr) Value: 6
  misc_feature: MA Experiment 20001757 PARAMETER Experiment Name: At_50mM_NH4NO3_L-to-H_P Parameter: Tissue Value: Leaf
  misc_feature: MA Experiment 20001757 PARAMETER Experiment Name: At_50mM_NH4NO3_L-to-H_P Parameter: Treatment Value: 50mM NH4NO3 vs 100mM Mannitol
atgagctccttcaatggaaacagcaacatcgacaacctcctaatccaaaccctacttggacgtctccaaattcgtccccctaactctcatttcctctctcaatccctagacgacctcctcttcaaatccgacgacagcgacggcgatgatgacggagaaggtcagaccagtctcgacagagaagaagctaggcttgagaaagagctaatccgagtcatcgtctctggtcgaagcgattctctcaagccgaattcaggtcaagccgtgacagtcaacgaacaccacatctgcgttgggtttcatgaggatgaggaatcggattatcgtgtttgggagtggcatggtcatatcatgttgtttgatgaagagaatgggtacacgcctgagtatatctacgggaattacttcgagaggttgcctgtgaagcttcctaataaccgccgtgtggagaaggagaagaagaaggagatgaaagaagaggaggtggagaatttggggcttagagagttgatcgatggtggtgacgctgctcctggtaggattcttcataggaacaacatcaacatcggttcctcaagtttctttttcgttgcaagacaataa

SEQ ID NO: 73424 - protein, 200 aa, Arabidopsis thaliana
  peptide (1)..(200): Ceres Seq. ID no. 4968266
  misc_feature (1)..(192): Homolog of NCBI NO: 11357797 NR Description: hypothetical protein F4P12.330 - Arabidopsis >gi|6729514|emb|CAB67670.1| putative protein [Arabidopsis
  misc_feature (1)..(192): Homolog of NCBI NO: 22331772 NR Description: putative protein; protein id: At3g53630.1, by cDNA: gi_18377876 [Arabidopsis thaliana] AT3g53630/F4P12_330 [Arabidopsis thaliana]
  misc_feature (132)..(194): Homolog of NCBI NO: 15233979 NR Description: putative protein; protein id: At4g18690.1
  misc_feature (132)..(194): Homolog of NCBI NO: 15222761 NR Description: hypothetical protein; protein id: At1g55710.1
MSSFNGNSNIDNLLIQTLLGRLQIRPPNSHFLSQSLDDLLFKSDDSDGDDDGEGQTSLDREEARLEKELIRVIVSGRSDSLKPNSGQAVTVNEHHICVGFHEDEESDYRVWEWHGHIMLFDEENGYTPEYIYGNYFERLPVKLPNNRRVEKEKKKEMKEEEVENLGLRELIDGGDAAPGRILHRNNINIGSSSFFFVARQ

SEQ ID NO: 73425 - DNA, 1809 bp, Arabidopsis thaliana
  misc_feature (1)..(1809): Ceres Seq. ID no. 4968288
  misc_feature: MA Experiment ID: 20000185 Result: Down-regulated in Transcription
  misc_feature: MA Experiment 20000185 PARAMETER Experiment Name: At_Roots__P Parameter: Age (day) Value: 7 vs. 21
  misc_feature: MA Experiment 20000185 PARAMETER Experiment Name: At_Roots__P Parameter: Organism Value: A. thaliana
  misc_feature: MA Experiment 20000185 PARAMETER Experiment Name: At_Roots__P Parameter: Tissue Value: Roots vs. Whole Plant
  misc_feature: MA Experiment ID: 20000234 Result: Down-regulated in Transcription
  misc_feature: MA Experiment 20000234 PARAMETER Experiment Name: At_Siliques_P Parameter: Age (day) Value: 21
  misc_feature: MA Experiment 20000234 PARAMETER Experiment Name: At_Siliques_P Parameter: Organism Value: A. thaliana
  misc_feature: MA Experiment 20000234 PARAMETER Experiment Name: At_Siliques_P Parameter: Plant Line Value: WS
  misc_feature: MA Experiment 20000234 PARAMETER Experiment Name: At_Siliques_P Parameter: Tissue Value: Less Than 5mm Siliques vs. Whole Plant
  misc_feature: MA Experiment ID: 20000235 Result: Down-regulated in Transcription
  misc_feature: MA Experiment 20000235 PARAMETER Experiment Name: At_Siliques_P Parameter: Age (day) Value: 21
  misc_feature: MA Experiment 20000235 PARAMETER Experiment Name: At_Siliques_P Parameter: Organism Value: A. thaliana
  misc_feature: MA Experiment 20000235 PARAMETER Experiment Name: At_Siliques_P Parameter: Plant Line Value: WS
  misc_feature: MA Experiment 20000235 PARAMETER Experiment Name: At_Siliques_P Parameter: Tissue Value: 5-10mm Siliques vs. Whole Plant
  misc_feature: MA Experiment ID: 20000264 Result: Down-regulated in Transcription
  misc_feature: MA Experiment 20000264 PARAMETER Experiment Name: At_Open_Flower_P Parameter: Age (day) Value: 21
  misc_feature: MA Experiment 20000264 PARAMETER Experiment Name: At_Open_Flower_P Parameter: Plant Line Value: WS
  misc_feature: MA Experiment 20000264 PARAMETER Experiment Name: At_Open_Flower_P Parameter: Tissue Value: Open Flower vs. Whole Plant
  misc_feature: MA Experiment ID: 20000265 Result: Down-regulated in Transcription
  misc_feature: MA Experiment 20000265 PARAMETER Experiment Name: At_Open_Flower_P Parameter: Age (day) Value: 21
  misc_feature: MA Experiment 20000265 PARAMETER Experiment Name: At_Open_Flower_P Parameter: Plant Line Value: WS
  misc_feature: MA Experiment 20000265 PARAMETER Experiment Name: At_Open_Flower_P Parameter: Tissue Value: Closed Flower vs. Whole Plant
  misc_feature: MA Experiment ID: 20000267 Result: Up-regulated in Transcription
  misc_feature: MA Experiment 20000267 PARAMETER Experiment Name: At_Drought_P Parameter: Age (day) Value: 7
  misc_feature: MA Experiment 20000267 PARAMETER Experiment Name: At_Drought_P Parameter: Organism Value: A. thaliana
  misc_feature: MA Experiment 20000267 PARAMETER Experiment Name: At_Drought_P Parameter: Plant Line Value: WS
  misc_feature: MA Experiment 20000267 PARAMETER Experiment Name: At_Drought_P Parameter: Timepoint (hr) Value: 6
  misc_feature: MA Experiment 20000267 PARAMETER Experiment Name: At_Drought_P Parameter: Tissue Value: Whole Plant
  misc_feature: MA Experiment 20000267 PARAMETER Experiment Name: At_Drought_P Parameter: Treatment Value: Drought vs. No Drought
  misc_feature: MA Experiment ID: 20000286 Result: Down-regulated in Transcription
  misc_feature: MA Experiment 20000286 PARAMETER Experiment Name: At_Open_Flower_P Parameter: Age (day) Value: 21
  misc_feature: MA Experiment 20000286 PARAMETER Experiment Name: At_Open_Flower_P Parameter: Plant Line Value: WS
  misc_feature: MA Experiment 20000286 PARAMETER Experiment Name: At_Open_Flower_P Parameter: Tissue Value: Half Open vs. Whole Plant
  misc_feature: MA Experiment ID: 20000436 Result: Up-regulated in Transcription
  misc_feature: MA Experiment 20000436 PARAMETER Experiment Name: At_Drought_P Parameter: Age (day) Value: 7
  misc_feature: MA Experiment 20000436 PARAMETER Experiment Name: At_Drought_P Parameter: Organism Value: A. thaliana
  misc_feature: MA Experiment 20000436 PARAMETER Experiment Name: At_Drought_P Parameter: Plant Line Value: WS
  misc_feature: MA Experiment 20000436 PARAMETER Experiment Name: At_Drought_P Parameter: Timepoint (hr) Value: 12
  misc_feature: MA Experiment 20000436 PARAMETER Experiment Name: At_Drought_P Parameter: Tissue Value: Whole Plant
  misc_feature: MA Experiment 20000436 PARAMETER Experiment Name: At_Drought_P Parameter: Treatment Value: Drought vs. No Drought
  misc_feature: MA Experiment ID: 20000437 Result: Up-regulated in Transcription
  misc_feature: MA Experiment 20000437 PARAMETER Experiment Name: At_Drought_P Parameter: Age (day) Value: 8
  misc_feature: MA Experiment 20000437 PARAMETER Experiment Name: At_Drought_P Parameter: Organism Value: A. thaliana
  misc_feature: MA Experiment 20000437 PARAMETER Experiment Name: At_Drought_P Parameter: Plant Line Value: WS
  misc_feature: MA Experiment 20000437 PARAMETER Experiment Name: At_Drought_P Parameter: Timepoint (hr) Value: 24
  misc_feature: MA Experiment 20000437 PARAMETER Experiment Name: At_Drought_P Parameter: Tissue Value: Whole Plant
  misc_feature: MA Experiment 20000437 PARAMETER Experiment Name: At_Drought_P Parameter: Treatment Value: Drought vs. No Drought
  misc_feature: MA Experiment ID: 20000439 Result: Down-regulated in Transcription
  misc_feature: MA Experiment 20000439 PARAMETER Experiment Name: At_Roots__P Parameter: Age (day) Value: 14 vs. 21
  misc_feature: MA Experiment 20000439 PARAMETER Experiment Name: At_Roots__P Parameter: Organism Value: A. thaliana
  misc_feature: MA Experiment 20000439 PARAMETER Experiment Name: At_Roots__P Parameter: Tissue Value: Roots vs. Whole Plant
  misc_feature: MA Experiment ID: 20000573 Result: Down-regulated in Transcription
  misc_feature: MA Experiment 20000573 PARAMETER Experiment Name: At_100uM_ABA_Mutants__P Parameter: Organism Value: A. thaliana
  misc_feature: MA Experiment 20000573 PARAMETER Experiment Name: At_100uM_ABA_Mutants__P Parameter: Plant Line Value: CS22 vs. Ler wt
  misc_feature: MA Experiment 20000573 PARAMETER Experiment Name: At_100uM_ABA_Mutants__P Parameter: Timepoint (hr) Value: N/A
  misc_feature: MA Experiment 20000573 PARAMETER Experiment Name: At_100uM_ABA_Mutants__P Parameter: Tissue Value: Whole Plant
  misc_feature: MA Experiment 20000573 PARAMETER Experiment Name: At_100uM_ABA_Mutants__P Parameter: Treatment Value: None
  misc_feature: MA Experiment ID: 20000794 Result: Down-regulated in Transcription
  misc_feature: MA Experiment 20000794 PARAMETER Experiment Name: At_Petals_P Parameter: Age (day) Value: 23-25 days
  misc_feature: MA Experiment 20000794 PARAMETER Experiment Name: At_Petals_P Parameter: Plant Line Value: WS
  misc_feature: MA Experiment 20000794 PARAMETER Experiment Name: At_Petals_P Parameter: Tissue Value: Petals vs. Whole plant
  misc_feature: MA Experiment ID: 20001248 Result: Down-regulated in Transcription
  misc_feature: MA Experiment 20001248 PARAMETER Experiment Name: At_Far-red-induction_P Parameter: Age (day) Value: 7
  misc_feature: MA Experiment 20001248 PARAMETER Experiment Name: At_Far-red-induction_P Parameter: Light Value: Far-red vs. White
  misc_feature: MA Experiment 20001248 PARAMETER Experiment Name: At_Far-red-induction_P Parameter: Organism Value: A. thaliana
  misc_feature: MA Experiment 20001248 PARAMETER Experiment Name: At_Far-red-induction_P Parameter: Plant Line Value: Columbia
  misc_feature: MA Experiment 20001248 PARAMETER Experiment Name: At_Far-red-induction_P Parameter: Timepoint (hr) Value: 4
  misc_feature: MA Experiment 20001248 PARAMETER Experiment Name: At_Far-red-induction_P Parameter: Tissue Value: Whole Plant
  misc_feature: MA Experiment ID: 20001450 Result: Down-regulated in Transcription
  misc_feature: MA Experiment 20001450 PARAMETER Experiment Name: At_Far-red-induction_P Parameter: Age (day) Value: 7
  misc_feature: MA Experiment 20001450 PARAMETER Experiment Name: At_Far-red-induction_P Parameter: Light Value: Far-red vs. White
  misc_feature: MA Experiment 20001450 PARAMETER Experiment Name: At_Far-red-induction_P Parameter: Organism Value: A. thaliana
  misc_feature: MA Experiment 20001450 PARAMETER Experiment Name: At_Far-red-induction_P Parameter: Plant Line Value: Columbia
  misc_feature: MA Experiment 20001450 PARAMETER Experiment Name: At_Far-red-induction_P Parameter: Timepoint (hr) Value: 8
  misc_feature: MA Experiment 20001450 PARAMETER Experiment Name: At_Far-red-induction_P Parameter: Tissue Value: Whole Plant
atggagcacaacaaggttgatacagaacctcaagattcatatgatgatcaacaaaaatgggttctcgattcttcgaccgatagtagaggagagattccgcttcgggctcaaaccggagcttggagagctgcactcttcatcattggtatcgaattcagcgagaggctaagttactttgggatctccacgaacttagtggtctacttgactaccattcttcaccaagatctcaagatggctgtaaaaaatacgaactactggtctggtgtcactactttgatgcctcttcttggaggcttcgtcgcagatgcttatctcggccgttatggaactgtcctacttgcaaccaccatttaccttatgggcttgattctgttaacattgtcttggtttataccgggattgaaagcatgtcatgaagacatgtgtgttgagccaaggaaagcccacgagatagccttcttcattgcaatctacttgatctccataggcactggaggtcataagccatcccttgagagctttggagctgaccaattcgaagatggccatccggaagaacgaaaaatgaaaatgtcttactttaactggtggaatgctggtctatgcgctggtattttaaccgcggtgactgtaattgtctatatcgaagaccggattggttggggtgtggctagcatcatactcacaatagttatggctacttcgttttttatcttccgtatcggcaaaccgttttaccgttatagagcaccttctggtagcccattgaccccaatgttgcaagtctttgtcgccgccattgccaaaagaaatcttccttgtcccagtgattcttctcttcttcatgagttaactaatgaagagtatactaaaggccggcttctttccagctcaaagaatcttaaatttctagacaaagcagcagttattgaggaccgaaacgagaacactaaagccgagaagcagagtccatggcgactcgcaacggttacgaaagtggaagaagttaagctactcatcaacatgattccaatctggttctttacattagcctttggagtatgcgccactcaaagctcaacactctttatcaaacaagccataataatggaccgacacatcacagggacaagcttcatagttcctccagcttcattgttctctctcatagctctctccataatcatcaccgtaacaatctacgagaaactcctcgttcctcttttgagacgtgccacaggaaacgaaagaggcattagcattctacaaagaatcggggtcggtatggttttctccttattcgctatgatcattgctgctctgattgagaagaaaagattagattatgctaaggaacaccacatgaataagaccatgaccttgagtgctatatggttagctcctcaattcctagtcttaggagttgcggatgcttttacccttgtcggtcttcaagaatatttctacgaccaagtcccagattctatgagaagcttaggcatagcgttttacctcagcgtgcttggagcggctagctttgtcaacaatcttttgataacggttagtgatcatttagccgaggaaatttccgggaagggctggtttgggaaagaccttaatagcagccgcttggaccgcttttactggatgctagccgccttgaccgctgcaaatatatgctgctttgtgatcgtggccatgagatacacttacaagactgtgcagccgagtctggctgttgttgctgacggcggtgatgacgttgagacagccacggggacgaataacacgtccaagtttacgtaa

SEQ ID NO: 73426 - protein, 602 aa, Arabidopsis thaliana
  peptide (1)..(602): Ceres Seq. ID no. 4968289
  misc_feature (109)..(509): Pfam Name: POT family Pfam Description: POT family
  misc_feature (1)..(578): Homolog of NCBI NO: 15224397 NR Description: putative peptide/amino acid transporter; protein At2g37900.1 [Arabidopsis thaliana] >gi|25408574|pir||E84798
  misc_feature (18)..(592): Homolog of NCBI NO: 34897398 NR Description: putative peptide transport protein [Oryza sativa
  misc_feature (296)..(602): Homolog of NCBI NO: 13605523 NR Description: AT3g53960/F5K20_260 [Arabidopsis thaliana]
  misc_feature (15)..(573): Homolog of NCBI NO: 15232435 NR Description: peptide transport - like protein; protein id: supported by cDNA: 117581., supported by cDNA: gi_13430485,
  misc_feature (15)..(588): Homolog of NCBI NO: 37535270 NR Description: putative peptide transport protein [Oryza sativa
  misc_feature (15)..(573): Homolog of NCBI NO: 15240905 NR Description: oligopeptide transporter - like protein; protein At5g01180.1 [Arabidopsis thaliana] >gi|11358593|pir||T45958
  misc_feature (10)..(573): Homolog of NCBI NO: 15076661 NR Description: peptide transporter [Oryza sativa (japonica >gi|15076663|dbj|BAB62327.1| peptide transporter [Oryza sativa
  misc_feature (23)..(573): Homolog of NCBI NO: 4102839 NR Description: LeOPT1 [Lycopersicon esculentum]
  misc_feature (15)..(586): Homolog of NCBI NO: 37535262 NR Description: putative peptide transport protein [Oryza sativa
  misc_feature (23)..(596): Homolog of NCBI NO: 34895718 NR Description: putative peptide transport protein [Oryza sativa
MEHNKVDTEPQDSYDDQQKWVLDSSTDSRGEIPLRAQTGAWRAALFIIGIEFSERLSYFGISTNLVVYLTTILHQDLKMAVKNTNYWSGVTTLMPLLGGFVADAYLGRYGTVLLATTIYLMGLILLTLSWFIPGLKACHEDMCVEPRKAHEIAFFIAIYLISIGTGGHKPSLESFGADQFEDGHPEERKMKMSYFNWWNAGLCAGILTAVTVIVYIEDRIGWGVASIILTIVMATSFFIFRIGKPFYRYRAPSGSPLTPMLQVFVAAIAKRNLPCPSDSSLLHELTNEEYTKGRLLSSSKNLKFLDKAAVIEDRNENTKAEKQSPWRLATVTKVEEVKLLINMIPIWFFTLAFGVCATQSSTLFIKQAIIMDRHITGTSFIVPPASLFSLIALSIIITVTIYEKLLVPLLRRATGNERGISILQRIGVGMVFSLFAMIIAALIEKKRLDYAKEHHMNKTMTLSAIWLAPQFLVLGVADAFTLVGLQEYFYDQVPDSMRSLGIAFYLSVLGAASFVNNLLITVSDHLAEEISGKGWFGKDLNSSRLDRFYWMLAALTAANICCFVIVAMRYTYKTVQPSLAVVADGGDDVETATGTNNTSKFT

SEQ ID NO: 73427 - protein, 524 aa, Arabidopsis thaliana
  peptide (1)..(524): Ceres Seq. ID no. 4968290
  misc_feature (31)..(431): Pfam Name: POT family Pfam Description: POT family
  misc_feature (1)..(500): Homolog of NCBI NO: 15224397 NR Description: putative peptide/amino acid transporter; protein At2g37900.1 [Arabidopsis thaliana] >gi|25408574|pir||E84798
  misc_feature (1)..(514): Homolog of NCBI NO: 34897398 NR Description: putative peptide transport protein [Oryza sativa
  misc_feature (218)..(524): Homolog of NCBI NO: 13605523 NR Description: AT3g53960/F5K20_260 [Arabidopsis thaliana]
  misc_feature (1)..(495): Homolog of NCBI NO: 15232435 NR Description: peptide transport - like protein; protein id: supported by cDNA: 117581., supported by cDNA: gi_13430485,
  misc_feature (1)..(510): Homolog of NCBI NO: 37535270 NR Description: putative peptide transport protein [Oryza sativa
  misc_feature (1)..(495): Homolog of NCBI NO: 15240905 NR Description: oligopeptide transporter - like protein; protein At5g01180.1 [Arabidopsis thaliana] >gi|11358593|pir||T45958
  misc_feature (1)..(495): Homolog of NCBI NO: 15076661 NR Description: peptide transporter [Oryza sativa (japonica >gi|15076663|dbj|BAB62327.1| peptide transporter [Oryza sativa
  misc_feature (1)..(495): Homolog of NCBI NO: 4102839 NR Description: LeOPT1 [Lycopersicon esculentum]
  misc_feature (1)..(508): Homolog of NCBI NO: 37535262 NR Description: putative peptide transport protein [Oryza sativa
  misc_feature (1)..(518): Homolog of NCBI NO: 34895718 NR Description: putative peptide transport protein [Oryza sativa
MAVKNTNYWSGVTTLMPLLGGFVADAYLGRYGTVLLATTIYLMGLILLTLSWFIPGLKACHEDMCVEPRKAHEIAFFIAIYLISIGTGGHKPSLESFGADQFEDGHPEERKMKMSYFNWWNAGLCAGILTAVTVIVYIEDRIGWGVASIILTIVMATSFFIFRIGKPFYRYRAPSGSPLTPMLQVFVAAIAKRNLPCPSDSSLLHELTNEEYTKGRLLSSSKNLKFLDKAAVIEDRNENTKAEKQSPWRLATVTKVEEVKLLINMIPIWFFTLAFGVCATQSSTLFIKQAIIMDRHITGTSFIVPPASLFSLIALSIIITVTIYEKLLVPLLRRATGNERGISILQRIGVGMVFSLFAMIIAALIEKKRLDYAKEHHMNKTMTLSAIWLAPQFLVLGVADAFTLVGLQEYFYDQVPDSMRSLGIAFYLSVLGAASFVNNLLITVSDHLAEEISGKGWFGKDLNSSRLDRFYWMLAALTAANICCFVIVAMRYTYKTVQPSLAVVADGGDDVETATGTNNTSKFT

SEQ ID NO: 73428 - protein, 509 aa, Arabidopsis thaliana
  peptide (1)..(509): Ceres Seq. ID no. 4968291
  misc_feature (16)..(416): Pfam Name: POT family Pfam Description: POT family
  misc_feature (1)..(485): Homolog of NCBI NO: 15224397 NR Description: putative peptide/amino acid transporter; protein At2g37900.1 [Arabidopsis thaliana] >gi|25408574|pir||E84798
  misc_feature (1)..(499): Homolog of NCBI NO: 34897398 NR Description: putative peptide transport protein [Oryza sativa
  misc_feature (203)..(509): Homolog of NCBI NO: 13605523 NR Description: AT3g53960/F5K20_260 [Arabidopsis thaliana]
  misc_feature (1)..(480): Homolog of NCBI NO: 15232435 NR Description: peptide transport - like protein; protein id: supported by cDNA: 117581., supported by cDNA: gi_13430485,
  misc_feature (1)..(495): Homolog of NCBI NO: 37535270 NR Description: putative peptide transport protein [Oryza sativa
  misc_feature (1)..(480): Homolog of NCBI NO: 15240905 NR Description: oligopeptide transporter - like protein; protein At5g01180.1 [Arabidopsis thaliana] >gi|11358593|pir||T45958
  misc_feature (1)..(480): Homolog of NCBI NO: 15076661 NR Description: peptide transporter [Oryza sativa (japonica >gi|15076663|dbj|BAB62327.1| peptide transporter [Oryza sativa
  misc_feature (1)..(480): Homolog of NCBI NO: 4102839 NR Description: LeOPT1 [Lycopersicon esculentum]
  misc_feature (1)..(493): Homolog of NCBI NO: 37535262 NR Description: putative peptide transport protein [Oryza sativa
  misc_feature (1)..(503): Homolog of NCBI NO: 34895718 NR Description: putative peptide transport protein [Oryza sativa
MPLLGGFVADAYLGRYGTVLLATTIYLMGLILLTLSWFIPGLKACHEDMCVEPRKAHEIAFFIAIYLISIGTGGHKPSLESFGADQFEDGHPEERKMKMSYFNWWNAGLCAGILTAVTVIVYIEDRIGWGVASIILTIVMATSFFIFRIGKPFYRYRAPSGSPLTPMLQVFVAAIAKRNLPCPSDSSLLHELTNEEYTKGRLLSSSKNLKFLDKAAVIEDRNENTKAEKQSPWRLATVTKVEEVKLLINMIPIWFFTLAFGVCATQSSTLFIKQAIIMDRHITGTSFIVPPASLFSLIALSIIITVTIYEKLLVPLLRRATGNERGISILQRIGVGMVFSLFAMIIAALIEKKRLDYAKEHHMNKTMTLSAIWLAPQFLVLGVADAFTLVGLQEYFYDQVPDSMRSLGIAFYLSVLGAASFVNNLLITVSDHLAEEISGKGWFGKDLNSSRLDRFYWMLAALTAANICCFVIVAMRYTYKTVQPSLAVVADGGDDVETATGTNNTSKFT

SEQ ID NO: 73429 - DNA, 1167 bp, Arabidopsis thaliana
  misc_feature (1)..(1167): Ceres Seq. ID no. 4968376
  misc_feature: MA Experiment ID: 20000179 Result: Up-regulated in Transcription
  misc_feature: MA Experiment 20000179 PARAMETER Experiment Name: At_Germinating_Seeds_P Parameter: Age (hr) Value: 6 vs. 0
  misc_feature: MA Experiment 20000179 PARAMETER Experiment Name: At_Germinating_Seeds_P Parameter: Tissue Value: Germinating Seeds
  misc_feature: MA Experiment ID: 20000180 Result: Up-regulated in Transcription
  misc_feature: MA Experiment 20000180 PARAMETER Experiment Name: At_Germinating_Seeds_P Parameter: Age (hr) Value: 24 vs. 0
  misc_feature: MA Experiment 20000180 PARAMETER Experiment Name: At_Germinating_Seeds_P Parameter: Tissue Value: Germinating Seeds
atggatcctcggagaaacttccaaccaggtggctatgactctcggaataccttcacttcaggatcttttgggcctccagattttggtgaaagtgatgaagcagagttggtttctgtttcttggaatcaggattacagttgttttgctgctggcactagccatggttttcgtatatataactgtgaaccgttcaaggaaacttttaggcgagagctgaaggatggagggtttaaaattgtagagatgcttttccggagtaatatcttggcgcttgttggtggtggacctaactcccagtacccttcaaataaagtattgatttgggatgatcatcaggggcgctgcatcagtgagtttacttttcggtcggaaattcgtgcagtgaagttaagaagagatcgaattgttgttgttcttgagcacaagatatatgtctacaattttatggatctaagacttcttcatcagattgaaaatatggcaaatccaaggggactatgttgcctctctcatcacatgaatacatctgtcttggcttgtccaggtattcgtcgaggagaggtccgagttgaacattttgggcttaacatggttcaaatcattaatgctcatgattctaatatcgcgtgcatgaccttgacattggatggcttgctccttgcaactgccagtacaaagggaactctgattagaattttcaacacgatggacggaactcgtctgcaagaggtccgaagaggcgtggacagagcagatatctatagcattgctctatcaccaaacgtgcagtggcttgcagtatcaagcgacaaggggactgttcacattttctctctcagagtgagagttataggggaggacgcatactccactgaacatgagacttcttcaaattccctgcagcctcttgtttctccagccagtggtgccaaccctggttcgtcattgtcttttctgagaggtgttctaccaaaatatttcagctcggaatggtcattttctcagttccatgtacctgaagtcacccaatactttgcagcatttggtgctcagaacacaattgcaattattggcttggacggaaggtgcaatttcgatccagtgaacggaggagagatgactcagcttgaacatttccattttctgaagcaagatagcccgagatag

SEQ ID NO: 73430 - protein, 388 aa, Arabidopsis thaliana
  peptide (1)..(388): Ceres Seq. ID no. 4968377
  misc_feature (1)..(388): Homolog of NCBI NO: 30694449 NR Description: WD-40 repeat protein family [Arabidopsis thaliana]
  misc_feature (1)..(243): Homolog of NCBI NO: 11288366 NR Description: hypothetical protein T5P19.90 - Arabidopsis >gi|7594522|emb|CAB88047.1| putative protein [Arabidopsis
  misc_feature (214)..(320): Homolog of NCBI NO: 11288366 NR Description: hypothetical protein T5P19.90 - Arabidopsis >gi|7594522|emb|CAB88047.1| putative protein [Arabidopsis
  misc_feature (314)..(362): Homolog of NCBI NO: 11288366 NR Description: hypothetical protein T5P19.90 - Arabidopsis >gi|7594522|emb|CAB88047.1| putative protein [Arabidopsis
  misc_feature (21)..(386): Homolog of NCBI NO: 30688413 NR Description: WD-40 repeat protein family [Arabidopsis >gi|26450478|dbj|BAC42353.1| unknown protein [Arabidopsis
  misc_feature (30)..(386): Homolog of NCBI NO: 7487233 NR Description: hypothetical protein At2g40810 [imported] - thaliana >gi|2623295|gb|AAB86441.1| hypothetical protein
  misc_feature (3)..(321): Homolog of NCBI NO: 34896164 NR Description: hypothetical protein~similar to Arabidopsis
  misc_feature (36)..(386): Homolog of NCBI NO: 14517420 NR Description: AT3g62770/F26K9_200 [Arabidopsis thaliana]
  misc_feature (36)..(386): Homolog of NCBI NO: 11288364 NR Description: hypothetical protein F26K9.200 - Arabidopsis >gi|7362757|emb|CAB83127.1| putative protein [Arabidopsis
  misc_feature (35)..(386): Homolog of NCBI NO: 34907164 NR Description: P0423A12.19 [Oryza sativa (japonica
MDPRRNFQPGGYDSRNTFTSGSFGPPDFGESDEAELVSVSWNQDYSCFAAGTSHGFRIYNCEPFKETFRRELKDGGFKIVEMLFRSNILALVGGGPNSQYPSNKVLIWDDHQGRCISEFTFRSEIRAVKLRRDRIVVVLEHKIYVYNFMDLRLLHQIENMANPRGLCCLSHHMNTSVLACPGIRRGEVRVEHFGLNMVQIINAHDSNIACMTLTLDGLLLATASTKGTLIRIFNTMDGTRLQEVRRGVDRADIYSIALSPNVQWLAVSSDKGTVHIFSLRVRVIGEDAYSTEHETSSNSLQPLVSPASGANPGSSLSFLRGVLPKYFSSEWSFSQFHVPEVTQYFAAFGAQNTIAIIGLDGRCNFDPVNGGEMTQLEHFHFLKQDSPR

SEQ ID NO: 73431 - protein, 307 aa, Arabidopsis thaliana
  peptide (1)..(307): Ceres Seq. ID no. 4968378
  misc_feature (1)..(307): Homolog of NCBI NO: 30694449 NR Description: WD-40 repeat protein family [Arabidopsis thaliana]
  misc_feature (1)..(162): Homolog of NCBI NO: 11288366 NR Description: hypothetical protein T5P19.90 - Arabidopsis >gi|7594522|emb|CAB88047.1| putative protein [Arabidopsis
  misc_feature (133)..(239): Homolog of NCBI NO: 11288366 NR Description: hypothetical protein T5P19.90 - Arabidopsis >gi|7594522|emb|CAB88047.1| putative protein [Arabidopsis
  misc_feature (233)..(281): Homolog of NCBI NO: 11288366 NR Description: hypothetical protein T5P19.90 - Arabidopsis >gi|7594522|emb|CAB88047.1| putative protein [Arabidopsis
  misc_feature (1)..(305): Homolog of NCBI NO: 30688413 NR Description: WD-40 repeat protein family [Arabidopsis >gi|26450478|dbj|BAC42353.1| unknown protein [Arabidopsis
  misc_feature (1)..(305): Homolog of NCBI NO: 7487233 NR Description: hypothetical protein At2g40810 [imported] - thaliana >gi|2623295|gb|AAB86441.1| hypothetical protein
  misc_feature (1)..(240): Homolog of NCBI NO: 34896164 NR Description: hypothetical protein~similar to Arabidopsis
  misc_feature (1)..(305): Homolog of NCBI NO: 14517420 NR Description: AT3g62770/F26K9_200 [Arabidopsis thaliana]
  misc_feature (1)..(305): Homolog of NCBI NO: 11288364 NR Description: hypothetical protein F26K9.200 - Arabidopsis >gi|7362757|emb|CAB83127.1| putative protein [Arabidopsis
  misc_feature (1)..(305): Homolog of NCBI NO: 34907164 NR Description: P0423A12.19 [Oryza sativa (japonica
MLFRSNILALVGGGPNSQYPSNKVLIWDDHQGRCISEFTFRSEIRAVKLRRDRIVVVLEHKIYVYNFMDLRLLHQIENMANPRGLCCLSHHMNTSVLACPGIRRGEVRVEHFGLNMVQIINAHDSNIACMTLTLDGLLLATASTKGTLIRIFNTMDGTRLQEVRRGVDRADIYSIALSPNVQWLAVSSDKGTVHIFSLRVRVIGEDAYSTEHETSSNSLQPLVSPASGANPGSSLSFLRGVLPKYFSSEWSFSQFHVPEVTQYFAAFGAQNTIAIIGLDGRCNFDPVNGGEMTQLEHFHFLKQDSPR

SEQ ID NO: 73432 - protein, 240 aa, Arabidopsis thaliana
  peptide (1)..(240): Ceres Seq. ID no. 4968379
  misc_feature (1)..(240): Homolog of NCBI NO: 30694449 NR Description: WD-40 repeat protein family [Arabidopsis thaliana]
  misc_feature (1)..(95): Homolog of NCBI NO: 11288366 NR Description: hypothetical protein T5P19.90 - Arabidopsis >gi|7594522|emb|CAB88047.1| putative protein [Arabidopsis
  misc_feature (66)..(172): Homolog of NCBI NO: 11288366 NR Description: hypothetical protein T5P19.90 - Arabidopsis >gi|7594522|emb|CAB88047.1| putative protein [Arabidopsis
  misc_feature (166)..(214): Homolog of NCBI NO: 11288366 NR Description: hypothetical protein T5P19.90 - Arabidopsis >gi|7594522|emb|CAB88047.1| putative protein [Arabidopsis
  misc_feature (1)..(238): Homolog of NCBI NO: 30688413 NR Description: WD-40 repeat protein family [Arabidopsis >gi|26450478|dbj|BAC42353.1| unknown protein [Arabidopsis
  misc_feature (1)..(238): Homolog of NCBI NO: 7487233 NR Description: hypothetical protein At2g40810 [imported] - thaliana >gi|2623295|gb|AAB86441.1| hypothetical protein
  misc_feature (1)..(173): Homolog of NCBI NO: 34896164 NR Description: hypothetical protein~similar to Arabidopsis
  misc_feature (1)..(238): Homolog of NCBI NO: 14517420 NR Description: AT3g62770/F26K9_200 [Arabidopsis thaliana]
  misc_feature (1)..(238): Homolog of NCBI NO: 11288364 NR Description: hypothetical protein F26K9.200 - Arabidopsis >gi|7362757|emb|CAB83127.1| putative protein [Arabidopsis
  misc_feature (1)..(238): Homolog of NCBI NO: 34907164 NR Description: P0423A12.19 [Oryza sativa (japonica
MDLRLLHQIENMANPRGLCCLSHHMNTSVLACPGIRRGEVRVEHFGLNMVQIINAHDSNIACMTLTLDGLLLATASTKGTLIRIFNTMDGTRLQEVRRGVDRADIYSIALSPNVQWLAVSSDKGTVHIFSLRVRVIGEDAYSTEHETSSNSLQPLVSPASGANPGSSLSFLRGVLPKYFSSEWSFSQFHVPEVTQYFAAFGAQNTIAIIGLDGRCNFDPVNGGEMTQLEHFHFLKQDSPR

SEQ ID NO: 73433 - DNA, 642 bp, Arabidopsis thaliana
  misc_feature (1)..(642): Ceres Seq. ID no. 4968592
  misc_feature: MA Experiment ID: 20000264 Result: Up-regulated in Transcription
  misc_feature: MA Experiment 20000264 PARAMETER Experiment Name: At_Open_Flower_P Parameter: Age (day) Value: 21
  misc_feature: MA Experiment 20000264 PARAMETER Experiment Name: At_Open_Flower_P Parameter: Plant Line Value: WS
  misc_feature: MA Experiment 20000264 PARAMETER Experiment Name: At_Open_Flower_P Parameter: Tissue Value: Open Flower vs. Whole Plant
  misc_feature: MA Experiment ID: 20000794 Result: Up-regulated in Transcription
  misc_feature: MA Experiment 20000794 PARAMETER Experiment Name: At_Petals_P Parameter: Age (day) Value: 23-25 days
  misc_feature: MA Experiment 20000794 PARAMETER Experiment Name: At_Petals_P Parameter: Plant Line Value: WS
  misc_feature: MA Experiment 20000794 PARAMETER Experiment Name: At_Petals_P Parameter: Tissue Value: Petals vs. Whole plant
  misc_feature: MA Experiment ID: 20001910 Result: Up-regulated in Transcription
  misc_feature: MA Experiment 20001910 PARAMETER Experiment Name: At_Drought_Reproduction_P Parameter: Age (day) Value: 37
  misc_feature: MA Experiment 20001910 PARAMETER Experiment Name: At_Drought_Reproduction_P Parameter: Organism Value: A. thaliana
  misc_feature: MA Experiment 20001910 PARAMETER Experiment Name: At_Drought_Reproduction_P Parameter: Plant Line Value: WS
  misc_feature: MA Experiment 20001910 PARAMETER Experiment Name: At_Drought_Reproduction_P Parameter: Timepoint (day) Value: 7
  misc_feature: MA Experiment 20001910 PARAMETER Experiment Name: At_Drought_Reproduction_P Parameter: Tissue Value: Flowers
  misc_feature: MA Experiment 20001910 PARAMETER Experiment Name: At_Drought_Reproduction_P Parameter: Treatment Value: Drought vs. No Drought
  misc_feature: MA Experiment ID: 20001911 Result: Up-regulated in Transcription
  misc_feature: MA Experiment 20001911 PARAMETER Experiment Name: At_Drought_Reproduction_P Parameter: Age (day) Value: 40
  misc_feature: MA Experiment 20001911 PARAMETER Experiment Name: At_Drought_Reproduction_P Parameter: Organism Value: A. thaliana
  misc_feature: MA Experiment 20001911 PARAMETER Experiment Name: At_Drought_Reproduction_P Parameter: Plant Line Value: WS
  misc_feature: MA Experiment 20001911 PARAMETER Experiment Name: At_Drought_Reproduction_P Parameter: Timepoint (day) Value: 10
  misc_feature: MA Experiment 20001911 PARAMETER Experiment Name: At_Drought_Reproduction_P Parameter: Tissue Value: Flowers
  misc_feature: MA Experiment 20001911 PARAMETER Experiment Name: At_Drought_Reproduction_P Parameter: Treatment Value: Drought vs. No Drought
atggcggcgtttacagggacaacagacaaatgcaaggcgtgtgacaagacggtatacgttatggacttgatgactttggaaggaatgccttatcacaagtcatgcttcaggtgcagccattgcaatggcactctcgtgatatgtaactactcatccatggatggagttttgtattgcaagacccattttgaacagctcttcaaagaatctggaaatttcagcaagaatttccaaacagctggaaagaccgagaaatcgaatgatgcgacgaaggctccaaacaggttatcatccttctttagcggcacacaagacaaatgtgcagcttgtaagaaaacagtttatcctctagagaagatgacaatggaaggagaatcttaccacaagacttgcttcagatgtgcacatagtggttgtccattaacacattcttcatatgctgctctcgatggcgtcctttactgtaaggtccacttcagccagcttttccttgagaaaggtaattacaatcatgtcctccaagccgcggctaaccaccgtcgctcgacggctgaggaagacaaaaccgaacccaaagaagatgaagcaaaccctacagaagaagaaacttctgatgcagcagctgaagaacatgaatcctaa

SEQ ID NO: 73434 - protein, 213 aa, Arabidopsis thaliana
  peptide (1)..(213): Ceres Seq. ID no. 4968593
  misc_feature (11)..(68): Pfam Name: LIM domain Pfam Description: LIM domain
  misc_feature (1)..(213): Homolog of NCBI NO: 15233063 NR Description: LIM domain protein; protein id: At3g61230.1
  misc_feature (3)..(209): Homolog of NCBI NO: 15225897 NR Description: putative LIM-domain protein; protein id: [Arabidopsis thaliana] >gi|7488384|pir||T02467 probable
  misc_feature (3)..(202): Homolog of NCBI NO: 15223476 NR Description: LIM domain protein, putative; protein id:
  misc_feature (3)..(202): Homolog of NCBI NO: 25354704 NR Description: T1N6.19 protein - Arabidopsis thaliana Contains similarity to mRNA for transcription factor L2 from thaliana gb|X91398. It contains LIM domain containing proteins
  misc_feature (3)..(204): Homolog of NCBI NO: 8515104 NR Description: LIM domain protein PLIM-2 [Nicotiana tabacum]
  misc_feature (3)..(213): Homolog of NCBI NO: 4321401 NR Description: LIM domain protein PLIM-2 [Helianthus annuus]
  misc_feature (3)..(205): Homolog of NCBI NO: 32489824 NR Description: OSJNBb0039L24.7 [Oryza sativa (japonica
  misc_feature (4)..(212): Homolog of NCBI NO: 37535810 NR Description: putative LIM domain protein [Oryza sativa
  misc_feature (3)..(187): Homolog of NCBI NO: 7489184 NR Description: probable transcription factor SF3 - common tobacco
  misc_feature (3)..(184): Homolog of NCBI NO: 15228188 NR Description: transcription factor L2; protein id: At3g55770.1, by cDNA: 105441., supported by cDNA: gi_17380935, supported by
MAAFTGTTDKCKACDKTVYVMDLMTLEGMPYHKSCFRCSHCNGTLVICNYSSMDGVLYCKTHFEQLFKESGNFSKNFQTAGKTEKSNDATKAPNRLSSFFSGTQDKCAACKKTVYPLEKMTMEGESYHKTCFRCAHSGCPLTHSSYAALDGVLYCKVHFSQLFLEKGNYNHVLQAAANHRRSTAEEDKTEPKEDEANPTEEETSDAAAEEHES

SEQ ID NO: 73435 - protein, 193 aa, Arabidopsis thaliana
  peptide (1)..(193): Ceres Seq. ID no. 4968594
  misc_feature (1)..(48): Pfam Name: LIM domain Pfam Description: LIM domain
  misc_feature (1)..(193): Homolog of NCBI NO: 15233063 NR Description: LIM domain protein; protein id: At3g61230.1
  misc_feature (1)..(189): Homolog of NCBI NO: 15225897 NR Description: putative LIM-domain protein; protein id: [Arabidopsis thaliana] >gi|7488384|pir||T02467 probable
  misc_feature (1)..(182): Homolog of NCBI NO: 15223476 NR Description: LIM domain protein, putative; protein id:
  misc_feature (1)..(182): Homolog of NCBI NO: 25354704 NR Description: T1N6.19 protein - Arabidopsis thaliana Contains similarity to mRNA for transcription factor L2 from thaliana gb|X91398. It contains LIM domain containing proteins
  misc_feature (1)..(184): Homolog of NCBI NO: 8515104 NR Description: LIM domain protein PLIM-2 [Nicotiana tabacum]
  misc_feature (1)..(193): Homolog of NCBI NO: 4321401 NR Description: LIM domain protein PLIM-2 [Helianthus annuus]
  misc_feature (1)..(185): Homolog of NCBI NO: 32489824 NR Description: OSJNBb0039L24.7 [Oryza sativa (japonica
  misc_feature (1)..(192): Homolog of NCBI NO: 37535810 NR Description: putative LIM domain protein [Oryza sativa
  misc_feature (1)..(167): Homolog of NCBI NO: 7489184 NR Description: probable transcription factor SF3 - common tobacco
  misc_feature (1)..(164): Homolog of NCBI NO: 15228188 NR Description: transcription factor L2; protein id: At3g55770.1, by cDNA: 105441., supported by cDNA: gi_17380935, supported by
MDLMTLEGMPYHKSCFRCSHCNGTLVICNYSSMDGVLYCKTHFEQLFKESGNFSKNFQTAGKTEKSNDATKAPNRLSSFFSGTQDKCAACKKTVYPLEKMTMEGESYHKTCFRCAHSGCPLTHSSYAALDGVLYCKVHFSQLFLEKGNYNHVLQAAANHRRSTAEEDKTEPKEDEANPTEEETSDAAAEEHES

SEQ ID NO: 73436 - protein, 190 aa, Arabidopsis thaliana
  peptide (1)..(190): Ceres Seq. ID no. 4968595
  misc_feature (1)..(45): Pfam Name: LIM domain Pfam Description: LIM domain
  misc_feature (1)..(190): Homolog of NCBI NO: 15233063 NR Description: LIM domain protein; protein id: At3g61230.1
  misc_feature (1)..(186): Homolog of NCBI NO: 15225897 NR Description: putative LIM-domain protein; protein id: [Arabidopsis thaliana] >gi|7488384|pir||T02467 probable
  misc_feature (1)..(179): Homolog of NCBI NO: 15223476 NR Description: LIM domain protein, putative; protein id:
  misc_feature (1)..(179): Homolog of NCBI NO: 25354704 NR Description: T1N6.19 protein - Arabidopsis thaliana Contains similarity to mRNA for transcription factor L2 from thaliana gb|X91398. It contains LIM domain containing proteins
  misc_feature (1)..(181): Homolog of NCBI NO: 8515104 NR Description: LIM domain protein PLIM-2 [Nicotiana tabacum]
  misc_feature (1)..(190): Homolog of NCBI NO: 4321401 NR Description: LIM domain protein PLIM-2 [Helianthus annuus]
  misc_feature (1)..(182): Homolog of NCBI NO: 32489824 NR Description: OSJNBb0039L24.7 [Oryza sativa (japonica
  misc_feature (1)..(189): Homolog of NCBI NO: 37535810 NR Description: putative LIM domain protein [Oryza sativa
  misc_feature (1)..(164): Homolog of NCBI NO: 7489184 NR Description: probable transcription factor SF3 - common tobacco
  misc_feature (1)..(161): Homolog of NCBI NO: 15228188 NR Description: transcription factor L2; protein id: At3g55770.1, by cDNA: 105441., supported by cDNA: gi_17380935, supported by
MTLEGMPYHKSCFRCSHCNGTLVICNYSSMDGVLYCKTHFEQLFKESGNFSKNFQTAGKTEKSNDATKAPNRLSSFFSGTQDKCAACKKTVYPLEKMTMEGESYHKTCFRCAHSGCPLTHSSYAALDGVLYCKVHFSQLFLEKGNYNHVLQAAANHRRSTAEEDKTEPKEDEANPTEEETSDAAAEEHES

SEQ ID NO: 73437 - DNA, 1023 bp, Arabidopsis thaliana
  misc_feature (1)..(1023): Ceres Seq. ID no. 4968623
  misc_feature: MA Experiment ID: 20001760 Result: Up-regulated in Transcription
  misc_feature: MA Experiment 20001760 PARAMETER Experiment Name: At_50mM_NH4NO3_L-to-H_P Parameter: Timepoint (hr) Value: 2
  misc_feature: MA Experiment 20001760 PARAMETER Experiment Name: At_50mM_NH4NO3_L-to-H_P Parameter: Tissue Value: Siliques
  misc_feature: MA Experiment 20001760 PARAMETER Experiment Name: At_50mM_NH4NO3_L-to-H_P Parameter: Treatment Value: 50mM NH4NO3 vs 100mM Mannitol
atgatctcaaaacaagggattacagcgcaatgtttcttccggccaaagaaatttttcaggatgttgtttccaaagaaaaatttattattgaacaactttgagtcatcattaaccgagagattgaagaaactcatacctcaaaatacagatgagattctcaccttaccttggatgattctagctatggaattactttatgatacacataatgatataaacattctcatcactgatctcaagcttcattatatgactgattcggagcatggatattggtttgagaattacatgaacataaatacaaaattgctcgatctgtgtaacgcttttatgtccttgcttcgtcacatgaaccatggcattgtttgcttaaagttccttaggcataaattagaaatgaaatctgaggatctatgcactgagatttgttccgcacttgatagttggagggaaaatatcaccgcggaaatatcgaaatgccgcgaagttcttgggagatatgttgaatcattaaactttcataaagtcaagaattgtataaaagaagcaaaggttcttatgaaggcgttttatggggctaatgttcttacggcttatatctgcagtgtctttgtgatagttttgtcgaattccgacaaagatattttgcctatatatgtctggaagcaatcattgtggaaaaaagatttcttggatttgcagactatcgtaaacgtcaaaacaagagttaatatttccactgatggaacaatggtactccaagagttagaatctgttgctgccaaaatgaagaagatgtatcttacaattcaagaaggtgatgatcttgttcaagagtcctttaaggaatctattgaggaatgcaaagaagaagtcgagaaactggaacatgggttagatgaaatcttcaggaaaattggcaacttgtctgatgtaacctttaaaggacgtgaaatcattcgtgacggtttatttgattcaatgattagggagttaactcatggaccatacatatatgattaa

SEQ ID NO: 73438 - protein, 340 aa, Arabidopsis thaliana
  peptide (1)..(340): Ceres Seq. ID no. 4968624
  misc_feature (62)..(340): Homolog of NCBI NO: 15233126 NR Description: putative protein; protein id: At3g61500.1
  misc_feature (29)..(320): Homolog of NCBI NO: 16604342 NR Description: At2g46080/T3F17.27 [Arabidopsis thaliana]
  misc_feature (29)..(320): Homolog of NCBI NO: 18406969 NR Description: expressed protein; protein id: At2g46080.1, by cDNA: gi_16604341, supported by cDNA: gi_18252158 [Arabidopsis >gi|25341889|pir||E84898 hypothetical protein At2g46080
  misc_feature (29)..(324): Homolog of NCBI NO: 18378853 NR Description: expressed protein; protein id: At1g01550.1, by cDNA: gi_13194833, supported by cDNA: gi_16648870, supported cDNA: gi_17380899, supported by cDNA: gi_20259586 [Arabidopsis
  misc_feature (16)..(332): Homolog of NCBI NO: 7485228 NR Description: hypothetical protein A_IG002N01.26 - Arabidopsis >gi|2191147|gb|AAB61034.1| A_IG002N01.26 gene product thaliana] >gi|7267633|emb|CAB80945.1| hypothetical protein
  misc_feature (16)..(332): Homolog of NCBI NO: 30678866 NR Description: expressed protein [Arabidopsis thaliana]
  misc_feature (16)..(332): Homolog of NCBI NO: 28392962 NR Description: unknown protein [Arabidopsis thaliana]
  misc_feature (12)..(292): Homolog of NCBI NO: 37536014 NR Description: unknown protein [Oryza sativa (japonica
MISKQGITAQCFFRPKKFFRMLFPKKNLLLNNFESSLTERLKKLIPQNTDEILTLPWMILAMELLYDTHNDINILITDLKLHYMTDSEHGYWFENYMNINTKLLDLCNAFMSLLRHMNHGIVCLKFLRHKLEMKSEDLCTEICSALDSWRENITAEISKCREVLGRYVESLNFHKVKNCIKEAKVLMKAFYGANVLTAYICSVFVIVLSNSDKDILPIYVWKQSLWKKDFLDLQTIVNVKTRVNISTDGTMVLQELESVAAKMKKMYLTIQEGDDLVQESFKESIEECKEEVEKLEHGLDEIFRKIGNLSDVTFKGREIIRDGLFDSMIRELTHGPYIYD

SEQ ID NO: 73439 - protein, 320 aa, Arabidopsis thaliana
  peptide (1)..(320): Ceres Seq. ID no. 4968625
  misc_feature (42)..(320): Homolog of NCBI NO: 15233126 NR Description: putative protein; protein id: At3g61500.1
  misc_feature (9)..(300): Homolog of NCBI NO: 16604342 NR Description: At2g46080/T3F17.27 [Arabidopsis thaliana]
  misc_feature (9)..(300): Homolog of NCBI NO: 18406969 NR Description: expressed protein; protein id: At2g46080.1, by cDNA: gi_16604341, supported by cDNA: gi_18252158 [Arabidopsis >gi|25341889|pir||E84898 hypothetical protein At2g46080
  misc_feature (9)..(304): Homolog of NCBI NO: 18378853 NR Description: expressed protein; protein id: At1g01550.1, by cDNA: gi_13194833, supported by cDNA: gi_16648870, supported cDNA: gi_17380899, supported by cDNA: gi_20259586 [Arabidopsis
  misc_feature (1)..(312): Homolog of NCBI NO: 7485228 NR Description: hypothetical protein A_IG002N01.26 - Arabidopsis >gi|2191147|gb|AAB61034.1| A_IG002N01.26 gene product thaliana] >gi|7267633|emb|CAB80945.1| hypothetical protein
  misc_feature (1)..(312): Homolog of NCBI NO: 30678866 NR Description: expressed protein [Arabidopsis thaliana]
  misc_feature (1)..(312): Homolog of NCBI NO: 28392962 NR Description: unknown protein [Arabidopsis thaliana]
  misc_feature (1)..(272): Homolog of NCBI NO: 37536014 NR Description: unknown protein [Oryza sativa (japonica
MLFPKKNLLLNNFESSLTERLKKLIPQNTDEILTLPWMILAMELLYDTHNDINILITDLKLHYMTDSEHGYWFENYMNINTKLLDLCNAFMSLLRHMNHGIVCLKFLRHKLEMKSEDLCTEICSALDSWRENITAEISKCREVLGRYVESLNFHKVKNCIKEAKVLMKAFYGANVLTAYICSVFVIVLSNSDKDILPIYVWKQSLWKKDFLDLQTIVNVKTRVNISTDGTMVLQELESVAAKMKKMYLTIQEGDDLVQESFKESIEECKEEVEKLEHGLDEIFRKIGNLSDVTFKGREIIRDGLFDSMIRELTHGPYIYD

SEQ ID NO: 73440 - protein, 283 aa, Arabidopsis thaliana
  peptide (1)..(283): Ceres Seq. ID no. 4968626
  misc_feature (5)..(283): Homolog of NCBI NO: 15233126 NR Description: putative protein; protein id: At3g61500.1
  misc_feature (1)..(263): Homolog of NCBI NO: 16604342 NR Description: At2g46080/T3F17.27 [Arabidopsis thaliana]
  misc_feature (1)..(263): Homolog of NCBI NO: 18406969 NR Description: expressed protein; protein id: At2g46080.1, by cDNA: gi_16604341, supported by cDNA: gi_18252158 [Arabidopsis >gi|25341889|pir||E84898 hypothetical protein At2g46080
  misc_feature (1)..(267): Homolog of NCBI NO: 18378853 NR Description: expressed protein; protein id: At1g01550.1, by cDNA: gi_13194833, supported by cDNA: gi_16648870, supported cDNA: gi_17380899, supported by cDNA: gi_20259586 [Arabidopsis
  misc_feature (1)..(275): Homolog of NCBI NO: 7485228 NR Description: hypothetical protein A_IG002N01.26 - Arabidopsis >gi|2191147|gb|AAB61034.1| A_IG002N01.26 gene product thaliana] >gi|7267633|emb|CAB80945.1| hypothetical protein
  misc_feature (1)..(275): Homolog of NCBI NO: 30678866 NR Description: expressed protein [Arabidopsis thaliana]
  misc_feature (1)..(275): Homolog of NCBI NO: 28392962 NR Description: unknown protein [Arabidopsis thaliana]
  misc_feature (1)..(235): Homolog of NCBI NO: 37536014 NR Description: unknown protein [Oryza sativa (japonica
MILAMELLYDTHNDINILITDLKLHYMTDSEHGYWFENYMNINTKLLDLCNAFMSLLRHMNHGIVCLKFLRHKLEMKSEDLCTEICSALDSWRENITAEISKCREVLGRYVESLNFHKVKNCIKEAKVLMKAFYGANVLTAYICSVFVIVLSNSDKDILPIYVWKQSLWKKDFLDLQTIVNVKTRVNISTDGTMVLQELESVAAKMKKMYLTIQEGDDLVQESFKESIEECKEEVEKLEHGLDEIFRKIGNLSDVTFKGREIIRDGLFDSMIRELTHGPYIYD

SEQ ID NO: 73441 - DNA, 1686 bp, Arabidopsis thaliana
  misc_feature (1)..(1686): Ceres Seq. ID no. 4968685
  misc_feature: MA Experiment ID: 20000184 Result: Down-regulated in Transcription
  misc_feature: MA Experiment 20000184 PARAMETER Experiment Name: At_Shoots__P Parameter: Age (day) Value: 7
  misc_feature: MA Experiment 20000184 PARAMETER Experiment Name: At_Shoots__P Parameter: Tissue Value: Shoots vs. Whole Plant
  misc_feature: MA Experiment ID: 20000185 Result: Up-regulated in Transcription
  misc_feature: MA Experiment 20000185 PARAMETER Experiment Name: At_Roots__P Parameter: Age (day) Value: 7 vs. 21
  misc_feature: MA Experiment 20000185 PARAMETER Experiment Name: At_Roots__P Parameter: Organism Value: A. thaliana
  misc_feature: MA Experiment 20000185 PARAMETER Experiment Name: At_Roots__P Parameter: Tissue Value: Roots vs. Whole Plant
  misc_feature: MA Experiment ID: 20000227 Result: Down-regulated in Transcription
  misc_feature: MA Experiment 20000227 PARAMETER Experiment Name: At_Root-Tips-vs-Tops_P Parameter: Tissue Value: Root Tips vs. Root Tops
  misc_feature: MA Experiment ID: 20000439 Result: Up-regulated in Transcription
  misc_feature: MA Experiment 20000439 PARAMETER Experiment Name: At_Roots__P Parameter: Age (day) Value: 14 vs. 21
  misc_feature: MA Experiment 20000439 PARAMETER Experiment Name: At_Roots__P Parameter: Organism Value: A. thaliana
  misc_feature: MA Experiment 20000439 PARAMETER Experiment Name: At_Roots__P Parameter: Tissue Value: Roots vs. Whole Plant
  misc_feature: MA Experiment ID: 20000794 Result: Up-regulated in Transcription
  misc_feature: MA Experiment 20000794 PARAMETER Experiment Name: At_Petals_P Parameter: Age (day) Value: 23-25 days
  misc_feature: MA Experiment 20000794 PARAMETER Experiment Name: At_Petals_P Parameter: Plant Line Value: WS
  misc_feature: MA Experiment 20000794 PARAMETER Experiment Name: At_Petals_P Parameter: Tissue Value: Petals vs. Whole plant
atggaggatattgggttggttaagcaaggttggaaatggatgcaatctcagaaacatatgtgctccgatgcttgttctgcgatgcgatgctttggggagatgataggagggcttgtggagcgtcactggccattggtgtgtagtggatgtgggaagctattaggattgcttcagttgtcagttctttattggaaagactgcatttttaggggtttccattgcagcgccaaattgggttcagctgctttgcttctgataatgtggagttgcttccttagcttgacttccttatcttgcttgctctatgttctccttagtatgggagctgctgcagctgttgttctgaacttgggttgcactcctgggctctttatcgtaggactatttggaattttgattttatggatgtatgcaaacttttggatcactggaacattgtttatagtcggaggctatttattctccttaaatcatgctcgcgtggtggttcttgtggcgggcttatatgcgatgtattgtgtcaaagtcagacttggatggcttggtcttttcctctcaataaatcttgctttcttgtccaacgatatattaaattgtcttcttcaatggtgtgacaatctaagtgaaaaaccacaacacgaggaaccaaagaaaccgaaagaaacaatcatagaagaagactattcaagggaatttgagtatccttcagttcctgtcgaagatgaaaccgagacaaagattcacgagaataagtcttctgctaaaccaactgcgccttctactgttgttaataccgtaaaggaaatttctagtgttaaaatagtcaaaatagaagagtcaagttcagctgatgaaatgaagagaatactgaatagtttgaatcattatgaagcattgggggtccctcggcataaaaagatcgatgctgcggtgcttaagaaagagtataggaagaaggcaatgttggttcatcctgataaaaatatggggagtccattggcaagtgaatcattcaagaaacttcaaagtgcttacgaggttctatctgatttcgtaaagaagagagattacgatgagcaactacgaaaagaagaatctaggactaggagtgtttgtcagacatctcatgcttcttcgcatcagagtggtcctgattatcgatcagatgagtcaaggcggatacactgtacaaaatgtggtaattcacacatatggatatgtaccaataggacaaaagcaaaggcaagatggtgccaggattgtggccaatatcatcaagcaaaagatggagatggatgggtcgaactcaaagggacattacccttcgagagagcacataagattgaaataccgcgtgcttttgtttgcgcggagagcaaaatatttgacgtctcagaatgggccatttgtcagggaatggcttgtagaccaaacacgcatagaccaagctttcatgtgaacatggttgggttagaaaagacaacacagagatcaaactcaagtaggttcccatgggatctagatgtggagatgatggatgaggacgaagaagagtttgagctatggcttcaacaagctcttgcttcaggtctcttctgcgaaacctcaaaacgtagaaaaagctggagccctttcaagttgggccagatgaaaagcaagaaacagtggcgaagaacttccacttga

SEQ ID NO: 73442 - protein, 561 aa, Arabidopsis thaliana
  peptide (1)..(561): Ceres Seq. ID no. 4968686
  misc_feature (294)..(361): Pfam Name: DnaJ domain Pfam Description: DnaJ domain
  misc_feature (1)..(561): Homolog of NCBI NO: 7487909 NR Description: hypothetical protein YUP8H12R.35 - Arabidopsis >gi|3152572|gb|AAC17053.1| Contains homology to DNAJ heatshock
  misc_feature (107)..(381): Homolog of NCBI NO: 30699386 NR Description: S-locus protein, putative [Arabidopsis thaliana]
  misc_feature (1)..(45): Homolog of NCBI NO: 30699386 NR Description: S-locus protein, putative [Arabidopsis thaliana]
  misc_feature (163)..(561): Homolog of NCBI NO: 15219309 NR Description: S-locus protein, putative; protein id:
  misc_feature (38)..(136): Homolog of NCBI NO: 15219309 NR Description: S-locus protein, putative; protein id:
  misc_feature (159)..(561): Homolog of NCBI NO: 6069485 NR Description: S-locus protein 5 [Brassica rapa]
  misc_feature (168)..(561): Homolog of NCBI NO: 25518299 NR Description: hypothetical protein F19K19.3 - Arabidopsis >gi|9989051|gb|AAG10814.1|AC011808_2 Similar to DNAJ proteins
  misc_feature (279)..(501): Homolog of NCBI NO: 15240510 NR Description: putative protein; protein id: At5g49580.1 thaliana] >gi|10177624|dbj|BAB10771.1| contains similarity to
  misc_feature (56)..(219): Homolog of NCBI NO: 15240510 NR Description: putative protein; protein id: At5g49580.1 thaliana] >gi|10177624|dbj|BAB10771.1| contains similarity to
  misc_feature (51)..(544): Homolog of NCBI NO: 31249740 NR Description: putative heat shock protein [Oryza sativa
MEDIGLVKQGWKWMQSQKHMCSDACSAMRCFGEMIGGLVERHWPLVCSGCGKLLGLLQLSVLYWKDCIFRGFHCSAKLGSAALLLIMWSCFLSLTSLSCLLYVLLSMGAAAAVVLNLGCTPGLFIVGLFGILILWMYANFWITGTLFIVGGYLFSLNHARVVVLVAGLYAMYCVKVRLGWLGLFLSINLAFLSNDILNCLLQWCDNLSEKPQHEEPKKPKETIIEEDYSREFEYPSVPVEDETETKIHENKSSAKPTAPSTVVNTVKEISSVKIVKIEESSSADEMKRILNSLNHYEALGVPRHKKIDAAVLKKEYRKKAMLVHPDKNMGSPLASESFKKLQSAYEVLSDFVKKRDYDEQLRKEESRTRSVCQTSHASSHQSGPDYRSDESRRIHCTKCGNSHIWICTNRTKAKARWCQDCGQYHQAKDGDGWVELKGTLPFERAHKIEIPRAFVCAESKIFDVSEWAICQGMACRPNTHRPSFHVNMVGLEKTTQRSNSSRFPWDLDVEMMDEDEEEFELWLQQALASGLFCETSKRRKSWSPFKLGQMKSKKQWRRTST

SEQ ID NO: 73443 - protein, 548 aa, Arabidopsis thaliana
  peptide (1)..(548): Ceres Seq. ID no. 4968687
  misc_feature (281)..(348): Pfam Name: DnaJ domain Pfam Description: DnaJ domain
  misc_feature (1)..(548): Homolog of NCBI NO: 7487909 NR Description: hypothetical protein YUP8H12R.35 - Arabidopsis >gi|3152572|gb|AAC17053.1| Contains homology to DNAJ heatshock
  misc_feature (94)..(368): Homolog of NCBI NO: 30699386 NR Description: S-locus protein, putative [Arabidopsis thaliana]
  misc_feature (1)..(32): Homolog of NCBI NO: 30699386 NR Description: S-locus protein, putative [Arabidopsis thaliana]
  misc_feature (150)..(548): Homolog of NCBI NO: 15219309 NR Description: S-locus protein, putative; protein id:
  misc_feature (25)..(123): Homolog of NCBI NO: 15219309 NR Description: S-locus protein, putative; protein id:
  misc_feature (146)..(548): Homolog of NCBI NO: 6069485 NR Description: S-locus protein 5 [Brassica rapa]
  misc_feature (155)..(548): Homolog of NCBI NO: 25518299 NR Description: hypothetical protein F19K19.3 - Arabidopsis >gi|9989051|gb|AAG10814.1|AC011808_2 Similar to DNAJ proteins
  misc_feature (266)..(488): Homolog of NCBI NO: 15240510 NR Description: putative protein; protein id: At5g49580.1 thaliana] >gi|10177624|dbj|BAB10771.1| contains similarity to
  misc_feature (43)..(206): Homolog of NCBI NO: 15240510 NR Description: putative protein; protein id: At5g49580.1 thaliana] >gi|10177624|dbj|BAB10771.1| contains similarity to
  misc_feature (38)..(531): Homolog of NCBI NO: 31249740 NR Description: putative heat shock protein [Oryza sativa
MQSQKHMCSDACSAMRCFGEMIGGLVERHWPLVCSGCGKLLGLLQLSVLYWKDCIFRGFHCSAKLGSAALLLIMWSCFLSLTSLSCLLYVLLSMGAAAAVVLNLGCTPGLFIVGLFGILILWMYANFWITGTLFIVGGYLFSLNHARVVVLVAGLYAMYCVKVRLGWLGLFLSINLAFLSNDILNCLLQWCDNLSEKPQHEEPKKPKETIIEEDYSREFEYPSVPVEDETETKIHENKSSAKPTAPSTVVNTVKEISSVKIVKIEESSSADEMKRILNSLNHYEALGVPRHKKIDAAVLKKEYRKKAMLVHPDKNMGSPLASESFKKLQSAYEVLSDFVKKRDYDEQLRKEESRTRSVCQTSHASSHQSGPDYRSDESRRIHCTKCGNSHIWICTNRTKAKARWCQDCGQYHQAKDGDGWVELKGTLPFERAHKIEIPRAFVCAESKIFDVSEWAICQGMACRPNTHRPSFHVNMVGLEKTTQRSNSSRFPWDLDVEMMDEDEEEFELWLQQALASGLFCETSKRRKSWSPFKLGQMKSKKQWRRTST

SEQ ID NO: 73444 - protein, 542 aa, Arabidopsis thaliana
  peptide (1)..(542): Ceres Seq. ID no. 4968688
  misc_feature (275)..(342): Pfam Name: DnaJ domain Pfam Description: DnaJ domain
  misc_feature (1)..(542): Homolog of NCBI NO: 7487909 NR Description: hypothetical protein YUP8H12R.35 - Arabidopsis >gi|3152572|gb|AAC17053.1| Contains homology to DNAJ heatshock
  misc_feature (88)..(362): Homolog of NCBI NO: 30699386 NR Description: S-locus protein, putative [Arabidopsis thaliana]
  misc_feature (1)..(26): Homolog of NCBI NO: 30699386 NR Description: S-locus protein, putative [Arabidopsis thaliana]
  misc_feature (144)..(542): Homolog of NCBI NO: 15219309 NR Description: S-locus protein, putative; protein id:
  misc_feature (19)..(117): Homolog of NCBI NO: 15219309 NR Description: S-locus protein, putative; protein id:
  misc_feature (140)..(542): Homolog of NCBI NO: 6069485 NR Description: S-locus protein 5 [Brassica rapa]
  misc_feature (149)..(542): Homolog of NCBI NO: 25518299 NR Description: hypothetical protein F19K19.3 - Arabidopsis >gi|9989051|gb|AAG10814.1|AC011808_2 Similar to DNAJ proteins
  misc_feature (260)..(482): Homolog of NCBI NO: 15240510 NR Description: putative protein; protein id: At5g49580.1 thaliana] >gi|10177624|dbj|BAB10771.1| contains similarity to
  misc_feature (37)..(200): Homolog of NCBI NO: 15240510 NR Description: putative protein; protein id: At5g49580.1 thaliana] >gi|10177624|dbj|BAB10771.1| contains similarity to
  misc_feature (32)..(525): Homolog of NCBI NO: 31249740 NR Description: putative heat shock protein [Oryza sativa
MCSDACSAMRCFGEMIGGLVERHWPLVCSGCGKLLGLLQLSVLYWKDCIFRGFHCSAKLGSAALLLIMWSCFLSLTSLSCLLYVLLSMGAAAAVVLNLGCTPGLFIVGLFGILILWMYANFWITGTLFIVGGYLFSLNHARVVVLVAGLYAMYCVKVRLGWLGLFLSINLAFLSNDILNCLLQWCDNLSEKPQHEEPKKPKETIIEEDYSREFEYPSVPVEDETETKIHENKSSAKPTAPSTVVNTVKEISSVKIVKIEESSSADEMKRILNSLNHYEALGVPRHKKIDAAVLKKEYRKKAMLVHPDKNMGSPLASESFKKLQSAYEVLSDFVKKRDYDEQLRKEESRTRSVCQTSHASSHQSGPDYRSDESRRIHCTKCGNSHIWICTNRTKAKARWCQDCGQYHQAKDGDGWVELKGTLPFERAHKIEIPRAFVCAESKIFDVSEWAICQGMACRPNTHRPSFHVNMVGLEKTTQRSNSSRFPWDLDVEMMDEDEEEFELWLQQALASGLFCETSKRRKSWSPFKLGQMKSKKQWRRTST

SEQ ID NO: 73445 - DNA, 1344 bp, Arabidopsis thaliana
  misc_feature (1)..(1344): Ceres Seq. ID no. 4968870
  misc_feature: MA Experiment ID: 20000184 Result: Down-regulated in Transcription
  misc_feature: MA Experiment 20000184 PARAMETER Experiment Name: At_Shoots__P Parameter: Age (day) Value: 7
  misc_feature: MA Experiment 20000184 PARAMETER Experiment Name: At_Shoots__P Parameter: Tissue Value: Shoots vs. Whole Plant
atggaggaaacgctaaatcagttcgtcatggaaggcgtacctgtcaaaaaacacgacctcattcgctacgcaaaggatcttcgcaagtttcgtcaacctcaacgcgctctcgagatctttgagtggatggaaagaaaggaaatagcgtttactggcagcgatcacgcgattcgtttgaatctaattgcaaagagtaaaggcttagaggcggctgagacctacttcaacagtttagacgattctattaagaatcagtccacttatggttccttattgaactgttactgtgtggaaaaggaggaagttaaagcaaaggctcattttgaaaatatggttgatctcaatcatgtgagtaattctttgccgtttaataacctgatggctatgtatatggggctaggtcaaccagagaaggtgcctgcattggttgttgcgatgaaagagaagagtattactccttgtgatattacttactccatgtggatacaaagctgtggaagtttaaaggatttagatggagtagagaaggttcttgatgaaatgaaagcagaaggtgaaggtattttctcttggaatacatttgctaatcttgcagcaatttatattaaagtcggtctctacggtaaagcagaagaggcgttgaaatctctggagaacaatatgaatcctgacgtacgtgattgttatcattttctcattaacttgtatactggaattgcaaatgcttctgaggtttatcgagtttgggatttgcttaagaaaagataccctaatgtcaacaattcaagctatcttacaatgcttcgagcactgagtaaactcgatgacattgatggagtcaagaaagtctttgcagaatgggaatcgacatgctggacttacgatatgcggatggcgaatgtagcgattagcagctacttaaagcagaacatgtacgaagaagctgaggctgttttcaacggcgccatgaaaaagtgtaaaggtcaattctcaaaggcaaggcagcttttgatgatgcacctgttgaagaacgatcaggcagatttggctctgaagcattttgaagcggcggttttggatcaagacaagaactggacttggagctcagagctgatcagttcgttctttcttcactttgaggaagccaaagacgttgatggagcagaagaattctgcaaaaccttgacgaaatggagtcccctcagttctgaaacttacactcttcttatgaagacttacctcgctgcagggaaagcttgtccggatatgaaaaagagattggaagaacaagggatcctggtagacgaagagcaagaatgtttgcttagcaagatttgcccttga

SEQ ID NO: 73446 - protein, 447 aa, Arabidopsis thaliana
  peptide (1)..(447): Ceres Seq. ID no. 4968871
  misc_feature (227)..(261): Pfam Name: PPR repeat Pfam Description: PPR repeat
  misc_feature (1)..(447): Homolog of NCBI NO: 18411800 NR Description: expressed protein; protein id: At4g01990.1, by cDNA: gi_14517493, supported by cDNA: gi_16323353 [Arabidopsis >gi|14517494|gb|AAK62637.1| AT4g01990/T7B11_26 [Arabidopsis
  misc_feature (1)..(447): Homolog of NCBI NO: 25407143 NR Description: hypothetical protein AT4g01990 [imported] - thaliana >gi|4558568|gb|AAD22661.1|AC007138_25 hypothetical [Arabidopsis thaliana] >gi|7268583|emb|CAB80692.1| hypothetical
  misc_feature (3)..(447): Homolog of NCBI NO: 15217734 NR Description: hypothetical protein; protein id: At1g02370.1, by cDNA: gi_17529323 [Arabidopsis thaliana]
  misc_feature (3)..(447): Homolog of NCBI NO: 17529324 NR Description: unknown protein [Arabidopsis thaliana]
  misc_feature (1)..(445): Homolog of NCBI NO: 15219808 NR Description: hypothetical protein; protein id: At1g60770.1
  misc_feature (1)..(428): Homolog of NCBI NO: 34905490 NR Description: P0682B08.20 [Oryza sativa (japonica
  misc_feature (17)..(413): Homolog of NCBI NO: 32488964 NR Description: OSJNBb0038F03.9 [Oryza sativa (japonica
  misc_feature (5)..(410): Homolog of NCBI NO: 22329290 NR Description: hypothetical protein; protein id: At1g02150.1, by cDNA: gi_20453084 [Arabidopsis thaliana]
  misc_feature (5)..(410): Homolog of NCBI NO: 20453085 NR Description: At1g02150/T7I23.8 [Arabidopsis thaliana]
  misc_feature (17)..(422): Homolog of NCBI NO: 34393591 NR Description: putative DNA-binding protein [Oryza sativa
MEETLNQFVMEGVPVKKHDLIRYAKDLRKFRQPQRALEIFEWMERKEIAFTGSDHAIRLNLIAKSKGLEAAETYFNSLDDSIKNQSTYGSLLNCYCVEKEEVKAKAHFENMVDLNHVSNSLPFNNLMAMYMGLGQPEKVPALVVAMKEKSITPCDITYSMWIQSCGSLKDLDGVEKVLDEMKAEGEGIFSWNTFANLAAIYIKVGLYGKAEEALKSLENNMNPDVRDCYHFLINLYTGIANASEVYRVWDLLKKRYPNVNNSSYLTMLRALSKLDDIDGVKKVFAEWESTCWTYDMRMANVAISSYLKQNMYEEAEAVFNGAMKKCKGQFSKARQLLMMHLLKNDQADLALKHFEAAVLDQDKNWTWSSELISSFFLHFEEAKDVDGAEEFCKTLTKWSPLSSETYTLLMKTYLAAGKACPDMKKRLEEQGILVDEEQECLLSKICP

SEQ ID NO: 73447 - protein, 438 aa, Arabidopsis thaliana
  peptide (1)..(438): Ceres Seq. ID no. 4968872
  misc_feature (218)..(252): Pfam Name: PPR repeat Pfam Description: PPR repeat
  misc_feature (1)..(438): Homolog of NCBI NO: 18411800 NR Description: expressed protein; protein id: At4g01990.1, by cDNA: gi_14517493, supported by cDNA: gi_16323353 [Arabidopsis >gi|14517494|gb|AAK62637.1| AT4g01990/T7B11_26 [Arabidopsis
  misc_feature (1)..(438): Homolog of NCBI NO: 25407143 NR Description: hypothetical protein AT4g01990 [imported] - thaliana >gi|4558568|gb|AAD22661.1|AC007138_25 hypothetical [Arabidopsis thaliana] >gi|7268583|emb|CAB80692.1| hypothetical
  misc_feature (1)..(438): Homolog of NCBI NO: 15217734 NR Description: hypothetical protein; protein id: At1g02370.1, by cDNA: gi_17529323 [Arabidopsis thaliana]
  misc_feature (1)..(438): Homolog of NCBI NO: 17529324 NR Description: unknown protein [Arabidopsis thaliana]
  misc_feature (1)..(436): Homolog of NCBI NO: 15219808 NR Description: hypothetical protein; protein id: At1g60770.1
  misc_feature (1)..(419): Homolog of NCBI NO: 34905490 NR Description: P0682B08.20 [Oryza sativa (japonica
  misc_feature (8)..(404): Homolog of NCBI NO: 32488964 NR Description: OSJNBb0038F03.9 [Oryza sativa (japonica
  misc_feature (1)..(401): Homolog of NCBI NO: 22329290 NR Description: hypothetical protein; protein id: At1g02150.1, by cDNA: gi_20453084 [Arabidopsis thaliana]
  misc_feature (1)..(401): Homolog of NCBI NO: 20453085 NR Description: At1g02150/T7I23.8 [Arabidopsis thaliana]
  misc_feature (8)..(413): Homolog of NCBI NO: 34393591 NR Description: putative DNA-binding protein [Oryza sativa
MEGVPVKKHDLIRYAKDLRKFRQPQRALEIFEWMERKEIAFTGSDHAIRLNLIAKSKGLEAAETYFNSLDDSIKNQSTYGSLLNCYCVEKEEVKAKAHFENMVDLNHVSNSLPFNNLMAMYMGLGQPEKVPALVVAMKEKSITPCDITYSMWIQSCGSLKDLDGVEKVLDEMKAEGEGIFSWNTFANLAAIYIKVGLYGKAEEALKSLENNMNPDVRDCYHFLINLYTGIANASEVYRVWDLLKKRYPNVNNSSYLTMLRALSKLDDIDGVKKVFAEWESTCWTYDMRMANVAISSYLKQNMYEEAEAVFNGAMKKCKGQFSKARQLLMMHLLKNDQADLALKHFEAAVLDQDKNWTWSSELISSFFLHFEEAKDVDGAEEFCKTLTKWSPLSSETYTLLMKTYLAAGKACPDMKKRLEEQGILVDEEQECLLSKICP

SEQ ID NO: 73448 - protein, 405 aa, Arabidopsis thaliana
  peptide (1)..(405): Ceres Seq. ID no. 4968873
  misc_feature (185)..(219): Pfam Name: PPR repeat Pfam Description: PPR repeat
  misc_feature (1)..(405): Homolog of NCBI NO: 18411800 NR Description: expressed protein; protein id: At4g01990.1, by cDNA: gi_14517493, supported by cDNA: gi_16323353 [Arabidopsis >gi|14517494|gb|AAK62637.1| AT4g01990/T7B11_26 [Arabidopsis
  misc_feature (1)..(405): Homolog of NCBI NO: 25407143 NR Description: hypothetical protein AT4g01990 [imported] - thaliana >gi|4558568|gb|AAD22661.1|AC007138_25 hypothetical [Arabidopsis thaliana] >gi|7268583|emb|CAB80692.1| hypothetical
  misc_feature (1)..(405): Homolog of NCBI NO: 15217734 NR Description: hypothetical protein; protein id: At1g02370.1, by cDNA: gi_17529323 [Arabidopsis thaliana]
  misc_feature (1)..(405): Homolog of NCBI NO: 17529324 NR Description: unknown protein [Arabidopsis thaliana]
  misc_feature (1)..(403): Homolog of NCBI NO: 15219808 NR Description: hypothetical protein; protein id: At1g60770.1
  misc_feature (1)..(386): Homolog of NCBI NO: 34905490 NR Description: P0682B08.20 [Oryza sativa (japonica
  misc_feature (1)..(371): Homolog of NCBI NO: 32488964 NR Description: OSJNBb0038F03.9 [Oryza sativa (japonica
  misc_feature (1)..(368): Homolog of NCBI NO: 22329290 NR Description: hypothetical protein; protein id: At1g02150.1, by cDNA: gi_20453084 [Arabidopsis thaliana]
  misc_feature (1)..(368): Homolog of NCBI NO: 20453085 NR Description: At1g02150/T7I23.8 [Arabidopsis thaliana]
  misc_feature (1)..(380): Homolog of NCBI NO: 34393591 NR Description: putative DNA-binding protein [Oryza sativa
MERKEIAFTGSDHAIRLNLIAKSKGLEAAETYFNSLDDSIKNQSTYGSLLNCYCVEKEEVKAKAHFENMVDLNHVSNSLPFNNLMAMYMGLGQPEKVPALVVAMKEKSITPCDITYSMWIQSCGSLKDLDGVEKVLDEMKAEGEGIFSWNTFANLAAIYIKVGLYGKAEEALKSLENNMNPDVRDCYHFLINLYTGIANASEVYRVWDLLKKRYPNVNNSSYLTMLRALSKLDDIDGVKKVFAEWESTCWTYDMRMANVAISSYLKQNMYEEAEAVFNGAMKKCKGQFSKARQLLMMHLLKNDQADLALKHFEAAVLDQDKNWTWSSELISSFFLHFEEAKDVDGAEEFCKTLTKWSPLSSETYTLLMKTYLAAGKACPDMKKRLEEQGILVDEEQECLLSKICP

SEQ ID NO: 73449 - DNA, 1159 bp, Arabidopsis thaliana
  misc_feature (1)..(1159): Ceres Seq. ID no. 4970150
  misc_feature: MA Experiment ID: 108577 Result: Down-regulated in Transcription
  misc_feature: MA Experiment 108577 PARAMETER Experiment Name: At_42deg_Heat_cDNA_P Parameter: Temperature (deg C) Value: 42 vs. 22
  misc_feature: MA Experiment 108577 PARAMETER Experiment Name: At_42deg_Heat_cDNA_P Parameter: Timepoint (hr) Value: 6
  misc_feature: MA Experiment 108577 PARAMETER Experiment Name: At_42deg_Heat_cDNA_P Parameter: Tissue Value: Aerial
  misc_feature: MA Experiment ID: 108595 Result: Down-regulated in Transcription
  misc_feature: MA Experiment 108595 PARAMETER Experiment Name: At_Ler-pi_Ovule_cDNA_P Parameter: Plant Line Value: null
  misc_feature: MA Experiment ID: 20000328 Result: Down-regulated in Transcription
  misc_feature: MA Experiment 20000328 PARAMETER Experiment Name: At_42deg_Heat_Sub_P Parameter: Age (day) Value: 14
  misc_feature: MA Experiment 20000328 PARAMETER Experiment Name: At_42deg_Heat_Sub_P Parameter: Organism Value: A. thaliana
  misc_feature: MA Experiment 20000328 PARAMETER Experiment Name: At_42deg_Heat_Sub_P Parameter: Plant Line Value: WS
  misc_feature: MA Experiment 20000328 PARAMETER Experiment Name: At_42deg_Heat_Sub_P Parameter: Temperature (deg C) Value: 42 vs. 22
  misc_feature: MA Experiment 20000328 PARAMETER Experiment Name: At_42deg_Heat_Sub_P Parameter: Timepoint (hr) Value: 6
  misc_feature: MA Experiment 20000328 PARAMETER Experiment Name: At_42deg_Heat_Sub_P Parameter: Tissue Value: Aerial
  misc_feature: Pfam Name: Mito_carr Pfam Description: Mitochondrial carrier protein
aaaaaatcaaaaacagaaagaagcagagagacgatggcgagcaaagacgaattttcccgagatctcactgcgattcgctgcgccagagctacgatgcttctctattcacttgcatcatctcgcacaatcgattccgccggcgagaagcaggagaaaggagaaacgcgaagagagatagaggatctgaggagaaagcttaccatggtgaagataaagatgaatcggattaagctttgcggattgatggaactgcttcttctcgtctttttgaacattcttagctccacttgagagactaaagcttgaatatacagttcgtggtgaacagaggaacttgttggtggttgctaagtcaattgcaactacacagggcttgactggattctggaaaggtaatttgctcaatgttcttcgaactgctcctttcaaagccgtcaatttttgtgcctatgatacctatagaaagcaattgcttaaaatcgctgggaatcaagaagcaaccaactttgaaagattcgttgctggtgccgctgctgggattactgctactgtgctctgcttgccactcgacactatacgaaccaaactagtggctcggggtggagaagccttggggggaatcggaggagcttttcggtatatgatccaaacagaagggttgttctccctctacaagggtctagtgccgtccatagcaagcatggctctgtccggtgcagttttctatggcgtttacgacatccttaagtcatcgtttctgcatacaccagaaggccggaaaagactgatagacatgaagcagcagggacaagaactcaatgctctagacaggctcgagttaggacccatcagaactctcatgtacggtgctatagcaggtgcttgtactgaagtagccacttatcctttcgaagtagtgagacgacagcttcagatgcagatgggtaaaaacaagctcaatgctttagctatgggattcaatatcattgaaagaggagggatcccagctttatacgctggacttttacctagcttgctccaggtattgccttcggcttcaataagttactttgtctacgagtgtatgaagatagtacttaaagtagaataacaagattatgatattggaagagtactagagcttaaagaatcatccatt

SEQ ID NO: 73450 - protein, 156 aa, Arabidopsis thaliana; identical to SEQ ID NO: 39607
  peptide (1)..(156): Ceres Seq. ID no. 4970151
  misc_feature: Pfam Name: Mito_carr Pfam Description: Mitochondrial carrier protein
  misc_feature (1)..(156): Homolog of NCBI NO: 25406546 NR Description: hypothetical protein T11I11.12 [imported] - thaliana >gi|12324250|gb|AAG52097.1|AC012680_8 putative
  misc_feature (1)..(156): Homolog of NCBI NO: 15238315 NR Description: mitochondrial carrier protein family; protein id:
  misc_feature (1)..(155): Homolog of NCBI NO: 34860155 NR Description: similar to calcium-binding transporter [Rattus
  misc_feature (1)..(156): Homolog of NCBI NO: 231654 NR Description: Brittle-1 protein, chloroplast precursor
  misc_feature (1)..(154): Homolog of NCBI NO: 15228163 NR Description: mitochondrial carrier protein family; protein id: supported by cDNA: 260615., supported by cDNA: gi_13877984,
  misc_feature (1)..(40): Homolog of NCBI NO: 33598954 NR Description: calcium-binding transporter [Homo sapiens]
  misc_feature (94)..(155): Homolog of NCBI NO: 33598954 NR Description: calcium-binding transporter [Homo sapiens]
  misc_feature (1)..(154): Homolog of NCBI NO: 21554682 NR Description: Ca-dependent solute carrier-like protein
  misc_feature (1)..(156): Homolog of NCBI NO: 15241360 NR Description: calcium-binding transporter-like protein; protein
  misc_feature (1)..(156): Homolog of NCBI NO: 4138581 NR Description: mitochondrial energy transfer protein [Solanum

SEQ ID NO: 73451 - protein, 136 aa, Arabidopsis thaliana; identical to SEQ ID NO: 39608
  peptide (1)..(136): Ceres Seq. ID no. 4970152
  misc_feature: Pfam Name: Mito_carr Pfam Description: Mitochondrial carrier protein
  misc_feature (1)..(136): Homolog of NCBI NO: 25406546 NR Description: hypothetical protein T11I11.12 [imported] - thaliana >gi|12324250|gb|AAG52097.1|AC012680_8 putative
  misc_feature (1)..(136): Homolog of NCBI NO: 15238315 NR Description: mitochondrial carrier protein family; protein id:
  misc_feature (1)..(135): Homolog of NCBI NO: 34860155 NR Description: similar to calcium-binding transporter [Rattus
  misc_feature (1)..(136): Homolog of NCBI NO: 231654 NR Description: Brittle-1 protein, chloroplast precursor
  misc_feature (1)..(134): Homolog of NCBI NO: 15228163 NR Description: mitochondrial carrier protein family; protein id: supported by cDNA: 260615., supported by cDNA: gi_13877984,
  misc_feature (1)..(20): Homolog of NCBI NO: 33598954 NR Description: calcium-binding transporter [Homo sapiens]
  misc_feature (74)..(135): Homolog of NCBI NO: 33598954 NR Description: calcium-binding transporter [Homo sapiens]
  misc_feature (1)..(134): Homolog of NCBI NO: 21554682 NR Description: Ca-dependent solute carrier-like protein
  misc_feature (1)..(136): Homolog of NCBI NO: 15241360 NR Description: calcium-binding transporter-like protein; protein
  misc_feature (1)..(136): Homolog of NCBI NO: 4138581 NR Description: mitochondrial energy transfer protein [Solanum

SEQ ID NO: 73452 - protein, 105 aa, Arabidopsis thaliana; identical to SEQ ID NO: 39609
  peptide (1)..(105): Ceres Seq. ID no. 4970153
  misc_feature: Pfam Name: Mito_carr Pfam Description: Mitochondrial carrier protein
  misc_feature (1)..(105): Homolog of NCBI NO: 25406546 NR Description: hypothetical protein T11I11.12 [imported] - thaliana >gi|12324250|gb|AAG52097.1|AC012680_8 putative
  misc_feature (1)..(105): Homolog of NCBI NO: 15238315 NR Description: mitochondrial carrier protein family; protein id:
  misc_feature (1)..(104): Homolog of NCBI NO: 34860155 NR Description: similar to calcium-binding transporter [Rattus
  misc_feature (1)..(105): Homolog of NCBI NO: 231654 NR Description: Brittle-1 protein, chloroplast precursor
  misc_feature (1)..(103): Homolog of NCBI NO: 15228163 NR Description: mitochondrial carrier protein family; protein id: supported by cDNA: 260615., supported by cDNA: gi_13877984,
  misc_feature (43)..(104): Homolog of NCBI NO: 33598954 NR Description: calcium-binding transporter [Homo sapiens]
  misc_feature (1)..(103): Homolog of NCBI NO: 21554682 NR Description: Ca-dependent solute carrier-like protein
  misc_feature (1)..(105): Homolog of NCBI NO: 15241360 NR Description: calcium-binding transporter-like protein; protein
  misc_feature (1)..(105): Homolog of NCBI NO: 4138581 NR Description: mitochondrial energy transfer protein [Solanum
  misc_feature (18)..(102): Homolog of NCBI NO: 34903084 NR Description: unnamed protein product [Oryza sativa (japonica group)] >gi|6815061|dbj|BAA90348.1| unnamed protein product

SEQ ID NO: 73453 - DNA, 464 bp, Arabidopsis thaliana
  misc_feature (1)..(464): Ceres Seq. ID no. 4970171
  misc_feature: MA Experiment ID: 108434 Result: Down-regulated in Transcription
  misc_feature: MA Experiment 108434 PARAMETER Experiment Name: At_Root_Tips_cDNA_P Parameter: Tissue Value: Root Tips
  misc_feature: MA Experiment ID: 108435 Result: Down-regulated in Transcription
  misc_feature: MA Experiment 108435 PARAMETER Experiment Name: At_stm_Mutants_cDNA_P Parameter: Plant Line Value: wt Landsburg vs stm
  misc_feature: MA Experiment 108435 PARAMETER Experiment Name: At_stm_Mutants_cDNA_P Parameter: Tissue Value: Shoot Apical Meristem Region
  misc_feature: MA Experiment ID: 108461 Result: Up-regulated in Transcription
  misc_feature: MA Experiment 108461 PARAMETER Experiment Name: At_Germinating_Seeds_cDNA_P Parameter: Age (day) Value: 1 vs. 0
  misc_feature: MA Experiment 108461 PARAMETER Experiment Name: At_Germinating_Seeds_cDNA_P Parameter: Tissue Value: Germinating Seeds
  misc_feature: MA Experiment ID: 108462 Result: Up-regulated in Transcription
  misc_feature: MA Experiment 108462 PARAMETER Experiment Name: At_Germinating_Seeds_cDNA_P Parameter: Age (day) Value: 2 vs. 0
  misc_feature: MA Experiment 108462 PARAMETER Experiment Name: At_Germinating_Seeds_cDNA_P Parameter: Tissue Value: Germinating Seeds
  misc_feature: MA Experiment ID: 108464 Result: Up-regulated in Transcription
  misc_feature: MA Experiment 108464 PARAMETER Experiment Name: At_Germinating_Seeds_cDNA_P Parameter: Age (day) Value: 4 vs. 0
  misc_feature: MA Experiment 108464 PARAMETER Experiment Name: At_Germinating_Seeds_cDNA_P Parameter: Tissue Value: Germinating Seeds
  misc_feature: MA Experiment ID: 108488 Result: Up-regulated in Transcription
  misc_feature: MA Experiment ID: 108489 Result: Down-regulated in Transcription
  misc_feature: MA Experiment ID: 108595 Result: Down-regulated in Transcription
  misc_feature: MA Experiment 108595 PARAMETER Experiment Name: At_Ler-pi_Ovule_cDNA_P Parameter: Plant Line Value: null
  misc_feature: MA Experiment ID: 20000180 Result: Up-regulated in Transcription
  misc_feature: MA Experiment 20000180 PARAMETER Experiment Name: At_Germinating_Seeds_P Parameter: Age (hr) Value: 24 vs. 0
  misc_feature: MA Experiment 20000180 PARAMETER Experiment Name: At_Germinating_Seeds_P Parameter: Tissue Value: Germinating Seeds
  misc_feature: MA Experiment ID: 20000185 Result: Down-regulated in Transcription
  misc_feature: MA Experiment 20000185 PARAMETER Experiment Name: At_Roots__P Parameter: Age (day) Value: 7 vs. 21
  misc_feature: MA Experiment 20000185 PARAMETER Experiment Name: At_Roots__P Parameter: Organism Value: A. thaliana
  misc_feature: MA Experiment 20000185 PARAMETER Experiment Name: At_Roots__P Parameter: Tissue Value: Roots vs. Whole Plant
  misc_feature: MA Experiment ID: 20000439 Result: Down-regulated in Transcription
  misc_feature: MA Experiment 20000439 PARAMETER Experiment Name: At_Roots__P Parameter: Age (day) Value: 14 vs. 21
  misc_feature: MA Experiment 20000439 PARAMETER Experiment Name: At_Roots__P Parameter: Organism Value: A. thaliana
  misc_feature: MA Experiment 20000439 PARAMETER Experiment Name: At_Roots__P Parameter: Tissue Value: Roots vs. Whole Plant
  misc_feature: Pfam Name: PsbR Pfam Description: Photosystem II 10 kDa polypeptide PsbR
gagatcgagagaagaatagtttgatcatcttgtgagaaaaataatggctgcttcagtgatgctatcttcggtgacattgaaaccagctggtttcacggtggagaagacggcgtcgacgcctccggcagaaagggcaagggatacggtgtttacaagtacgtcgacaagtatggagctaacgtcgatggatacagtcctatttacaacgagaacgagtggtcagcgagtggtgacgtgtacaagggaggagtcaccggattggcaatttgggcggtaactctcgccggaattcttgccggaggtgctcttcttgtgtacaacacaagtgctttggctcagtaaatcttaaagttgttagcgcatgtgtaatcatgtttctataaatgtttctgtgttgttctctttctctctaatgttgtaaaactcagacatactttgaatttataagacttctagtgtttgta

SEQ ID NO: 73454 - protein, 77 aa, Arabidopsis thaliana
  peptide (1)..(77): Ceres Seq. ID no. 4970172
  misc_feature: Pfam Name: PsbR Pfam Description: Photosystem II 10 kDa polypeptide PsbR
  misc_feature (1)..(23): Homolog of NCBI NO: 8698891 NR Description: polypeptide precursor of photosystem II [Pyrus
MAASVMLSSVTLKPAGFTVEKTASTPPAERARDTVFTSTSTSMELTSMDTVLFTTRTSGQRVVTCTREESPDWQFGR

SEQ ID NO: 73455 - protein, 72 aa, Arabidopsis thaliana
  peptide (1)..(72): Ceres Seq. ID no. 4970173
  misc_feature: Pfam Name: PsbR Pfam Description: Photosystem II 10 kDa polypeptide PsbR
  misc_feature (1)..(18): Homolog of NCBI NO: 8698891 NR Description: polypeptide precursor of photosystem II [Pyrus
MLSSVTLKPAGFTVEKTASTPPAERARDTVFTSTSTSMELTSMDTVLFTTRTSGQRVVTCTREESPDWQFGR

SEQ ID NO: 73456 - DNA, 1757 bp, Arabidopsis thaliana
  misc_feature (1)..(1757): Ceres Seq. ID no. 4970201
  misc_feature: MA Experiment ID: 108434 Result: Down-regulated in Transcription
  misc_feature: MA Experiment 108434 PARAMETER Experiment Name: At_Root_Tips_cDNA_P Parameter: Tissue Value: Root Tips
  misc_feature: MA Experiment ID: 108462 Result: Up-regulated in Transcription
  misc_feature: MA Experiment 108462 PARAMETER Experiment Name: At_Germinating_Seeds_cDNA_P Parameter: Age (day) Value: 2 vs. 0
  misc_feature: MA Experiment 108462 PARAMETER Experiment Name: At_Germinating_Seeds_cDNA_P Parameter: Tissue Value: Germinating Seeds
  misc_feature: MA Experiment ID: 108463 Result: Up-regulated in Transcription
  misc_feature: MA Experiment 108463 PARAMETER Experiment Name: At_Germinating_Seeds_cDNA_P Parameter: Age (day) Value: 3 vs. 0
  misc_feature: MA Experiment 108463 PARAMETER Experiment Name: At_Germinating_Seeds_cDNA_P Parameter: Tissue Value: Germinating Seeds
  misc_feature: MA Experiment ID: 108464 Result: Up-regulated in Transcription
  misc_feature: MA Experiment 108464 PARAMETER Experiment Name: At_Germinating_Seeds_cDNA_P Parameter: Age (day) Value: 4 vs. 0
  misc_feature: MA Experiment 108464 PARAMETER Experiment Name: At_Germinating_Seeds_cDNA_P Parameter: Tissue Value: Germinating Seeds
  misc_feature: MA Experiment ID: 108488 Result: Down-regulated in Transcription
  misc_feature: MA Experiment ID: 108572 Result: Up-regulated in Transcription
  misc_feature: MA Experiment 108572 PARAMETER Experiment Name: At_Drought_cDNA_P Parameter: Timepoint (hr) Value: 1
  misc_feature: MA Experiment 108572 PARAMETER Experiment Name: At_Drought_cDNA_P Parameter: Tissue Value: Aerial
  misc_feature: MA Experiment 108572 PARAMETER Experiment Name: At_Drought_cDNA_P Parameter: Treatment Value: Drought vs. No Drought
  misc_feature: MA Experiment ID: 108573 Result: Up-regulated in Transcription
  misc_feature: MA Experiment 108573 PARAMETER Experiment Name: At_Drought_cDNA_P Parameter: Timepoint (hr) Value: 6
  misc_feature: MA Experiment 108573 PARAMETER Experiment Name: At_Drought_cDNA_P Parameter: Tissue Value: Aerial
  misc_feature: MA Experiment 108573 PARAMETER Experiment Name: At_Drought_cDNA_P Parameter: Treatment Value: Drought vs. No Drought
  misc_feature: MA Experiment ID: 108605 Result: Up-regulated in Transcription
  misc_feature: MA Experiment 108605 PARAMETER Experiment Name: At_100uM_ABA_cDNA_P Parameter: Timepoint (hr) Value: 6
  misc_feature: MA Experiment 108605 PARAMETER Experiment Name: At_100uM_ABA_cDNA_P Parameter: Tissue Value: Aerial
  misc_feature: MA Experiment 108605 PARAMETER Experiment Name: At_100uM_ABA_cDNA_P Parameter: Treatment Value: 100uM ABA vs. No Treatment
  misc_feature: MA Experiment ID: 108607 Result: Up-regulated in Transcription
  misc_feature: MA Experiment 108607 PARAMETER Experiment Name: At_100uM_ABA_cDNA_P Parameter: Timepoint (hr) Value: 4
  misc_feature: MA Experiment 108607 PARAMETER Experiment Name: At_100uM_ABA_cDNA_P Parameter: Tissue Value: Aerial
  misc_feature: MA Experiment 108607 PARAMETER Experiment Name: At_100uM_ABA_cDNA_P Parameter: Treatment Value: 100uM ABA vs. No Treatment
  misc_feature: MA Experiment ID: 108609 Result: Up-regulated in Transcription
  misc_feature: MA Experiment 108609 PARAMETER Experiment Name: At_100uM_ABA_cDNA_P Parameter: Timepoint (hr) Value: 24
  misc_feature: MA Experiment 108609 PARAMETER Experiment Name: At_100uM_ABA_cDNA_P Parameter: Tissue Value: Aerial
  misc_feature: MA Experiment 108609 PARAMETER Experiment Name: At_100uM_ABA_cDNA_P Parameter: Treatment Value: 100uM ABA vs. No Treatment
  misc_feature: MA Experiment ID: 20000069 Result: Up-regulated in Transcription
  misc_feature: MA Experiment 20000069 PARAMETER Experiment Name: At_100uM_ABA_Mutants_cDNA_P Parameter: Plant Line Value: CS23
  misc_feature: MA Experiment 20000069 PARAMETER Experiment Name: At_100uM_ABA_Mutants_cDNA_P Parameter: Timepoint (hr) Value: 6
  misc_feature: MA Experiment 20000069 PARAMETER Experiment Name: At_100uM_ABA_Mutants_cDNA_P Parameter: Tissue Value: Aerial
  misc_feature: MA Experiment 20000069 PARAMETER Experiment Name: At_100uM_ABA_Mutants_cDNA_P Parameter: Treatment Value: 100uM ABA vs. No Treatment
  misc_feature: MA Experiment ID: 20000070 Result: Up-regulated in Transcription
  misc_feature: MA Experiment 20000070 PARAMETER Experiment Name: At_100uM_ABA_Mutants_cDNA_P Parameter: Plant Line Value: CS24
  misc_feature: MA Experiment 20000070 PARAMETER Experiment Name: At_100uM_ABA_Mutants_cDNA_P Parameter: Timepoint (hr) Value: 6
  misc_feature: MA Experiment 20000070 PARAMETER Experiment Name: At_100uM_ABA_Mutants_cDNA_P Parameter: Tissue Value: Aerial
  misc_feature: MA Experiment 20000070 PARAMETER Experiment Name: At_100uM_ABA_Mutants_cDNA_P Parameter: Treatment Value: 100uM ABA vs. No Treatment
  misc_feature: MA Experiment ID: 20000071 Result: Up-regulated in Transcription
  misc_feature: MA Experiment 20000071 PARAMETER Experiment Name: At_100uM_ABA_Mutants_cDNA_P Parameter: Plant Line Value: CS8104
  misc_feature: MA Experiment 20000071 PARAMETER Experiment Name: At_100uM_ABA_Mutants_cDNA_P Parameter: Timepoint (hr) Value: 6
  misc_feature: MA Experiment 20000071 PARAMETER Experiment Name: At_100uM_ABA_Mutants_cDNA_P Parameter: Tissue Value: Aerial
  misc_feature: MA Experiment 20000071 PARAMETER Experiment Name: At_100uM_ABA_Mutants_cDNA_P Parameter: Treatment Value: 100uM ABA vs. No Treatment
  misc_feature: MA Experiment ID: 20000072 Result: Up-regulated in Transcription
  misc_feature: MA Experiment 20000072 PARAMETER Experiment Name: At_100uM_ABA_Mutants_cDNA_P Parameter: Plant Line Value: CS8105
  misc_feature: MA Experiment 20000072 PARAMETER Experiment Name: At_100uM_ABA_Mutants_cDNA_P Parameter: Timepoint (hr) Value: 6
  misc_feature: MA Experiment 20000072 PARAMETER Experiment Name: At_100uM_ABA_Mutants_cDNA_P Parameter: Tissue Value: Aerial
  misc_feature: MA Experiment 20000072 PARAMETER Experiment Name: At_100uM_ABA_Mutants_cDNA_P Parameter: Treatment Value: 100uM ABA vs. No Treatment
  misc_feature: MA Experiment ID: 20000086 Result: Up-regulated in Transcription
  misc_feature: MA Experiment 20000086 PARAMETER Experiment Name: At_100uM_ABA_Mutants_cDNA_P Parameter: Plant Line Value: CS22
  misc_feature: MA Experiment 20000086 PARAMETER Experiment Name: At_100uM_ABA_Mutants_cDNA_P Parameter: Timepoint (hr) Value: 6
  misc_feature: MA Experiment 20000086 PARAMETER Experiment Name: At_100uM_ABA_Mutants_cDNA_P Parameter: Tissue Value: Aerial
  misc_feature: MA Experiment 20000086 PARAMETER Experiment Name: At_100uM_ABA_Mutants_cDNA_P Parameter: Treatment Value: 100uM ABA vs. No Treatment
  misc_feature: MA Experiment ID: 20000087 Result: Up-regulated in Transcription
  misc_feature: MA Experiment 20000087 PARAMETER Experiment Name: At_100uM_ABA_Mutants_cDNA_P Parameter: Plant Line Value: WS
  misc_feature: MA Experiment 20000087 PARAMETER Experiment Name: At_100uM_ABA_Mutants_cDNA_P Parameter: Timepoint (hr) Value: 6
  misc_feature: MA Experiment 20000087 PARAMETER Experiment Name: At_100uM_ABA_Mutants_cDNA_P Parameter: Tissue Value: Aerial
  misc_feature: MA Experiment 20000087 PARAMETER Experiment Name: At_100uM_ABA_Mutants_cDNA_P Parameter: Treatment Value: 100uM ABA vs. No Treatment
  misc_feature: MA Experiment ID: 20000088 Result: Up-regulated in Transcription
  misc_feature: MA Experiment 20000088 PARAMETER Experiment Name: At_100uM_ABA_Mutants_cDNA_P Parameter: Plant Line Value: Landsberg
  misc_feature: MA Experiment 20000088 PARAMETER Experiment Name: At_100uM_ABA_Mutants_cDNA_P Parameter: Timepoint (hr) Value: 6
  misc_feature: MA Experiment 20000088 PARAMETER Experiment Name: At_100uM_ABA_Mutants_cDNA_P Parameter: Tissue Value: Aerial
  misc_feature: MA Experiment 20000088 PARAMETER Experiment Name: At_100uM_ABA_Mutants_cDNA_P Parameter: Treatment Value: 100uM ABA vs. No Treatment
  misc_feature: MA Experiment ID: 20000089 Result: Up-regulated in Transcription
  misc_feature: MA Experiment ID: 20000111 Result: Down-regulated in Transcription
  misc_feature: MA Experiment 20000111 PARAMETER Experiment Name: At_42deg_Heat_cDNA_P Parameter: Temperature (deg C) Value: 42 vs. 22
  misc_feature: MA Experiment 20000111 PARAMETER Experiment Name: At_42deg_Heat_cDNA_P Parameter: Timepoint (hr) Value: 6
  misc_feature: MA Experiment 20000111 PARAMETER Experiment Name: At_42deg_Heat_cDNA_P Parameter: Tissue Value: Aerial
  misc_feature: MA Experiment ID: 20000113 Result: Down-regulated in Transcription
  misc_feature: MA Experiment 20000113 PARAMETER Experiment Name: At_42deg_Heat_cDNA_P Parameter: Temperature (deg C) Value: 42 vs. 22
  misc_feature: MA Experiment 20000113 PARAMETER Experiment Name: At_42deg_Heat_cDNA_P Parameter: Timepoint (hr) Value: 8
  misc_feature: MA Experiment 20000113 PARAMETER Experiment Name: At_42deg_Heat_cDNA_P Parameter: Tissue Value: Aerial
  misc_feature: MA Experiment ID: 20000117 Result: Up-regulated in Transcription
  misc_feature: MA Experiment 20000117 PARAMETER Experiment Name: At_100uM_ABA_Mutants_cDNA_P Parameter: Plant Line Value: Columbia
  misc_feature: MA Experiment 20000117 PARAMETER Experiment Name: At_100uM_ABA_Mutants_cDNA_P Parameter: Timepoint (hr) Value: 6
  misc_feature: MA Experiment 20000117 PARAMETER Experiment Name: At_100uM_ABA_Mutants_cDNA_P Parameter: Tissue Value: Aerial
  misc_feature: MA Experiment 20000117 PARAMETER Experiment Name: At_100uM_ABA_Mutants_cDNA_P Parameter: Treatment Value: 100uM ABA vs. No Treatment
  misc_feature: MA Experiment ID: 20000169 Result: Up-regulated in Transcription
  misc_feature: MA Experiment 20000169 PARAMETER Experiment Name: At_100uM_ABA_P Parameter: Age (day) Value: 14
  misc_feature: MA Experiment 20000169 PARAMETER Experiment Name: At_100uM_ABA_P Parameter: Organism Value: A. thaliana
  misc_feature: MA Experiment 20000169 PARAMETER Experiment Name: At_100uM_ABA_P Parameter: Plant Line Value: WS
  misc_feature: MA Experiment 20000169 PARAMETER Experiment Name: At_100uM_ABA_P Parameter: Timepoint (hr) Value: 6
  misc_feature: MA Experiment 20000169 PARAMETER Experiment Name: At_100uM_ABA_P Parameter: Tissue Value: Aerial
  misc_feature: MA Experiment 20000169 PARAMETER Experiment Name: At_100uM_ABA_P Parameter: Treatment Value: 100uM ABA vs. No Treatment
  misc_feature: MA Experiment ID: 20000173 Result: Down-regulated in Transcription
  misc_feature: MA Experiment 20000173 PARAMETER Experiment Name: At_42deg_Heat_P Parameter: Age (day) Value: 14
  misc_feature: MA Experiment 20000173 PARAMETER Experiment Name: At_42deg_Heat_P Parameter: Organism Value: A. thaliana
  misc_feature: MA Experiment 20000173 PARAMETER Experiment Name: At_42deg_Heat_P Parameter: Plant Line Value: WS
  misc_feature: MA Experiment 20000173 PARAMETER Experiment Name: At_42deg_Heat_P Parameter: Temperature (deg C) Value: 42 vs. 22
  misc_feature: MA Experiment 20000173 PARAMETER Experiment Name: At_42deg_Heat_P Parameter: Timepoint (hr) Value: 6
  misc_feature: MA Experiment 20000173 PARAMETER Experiment Name: At_42deg_Heat_P Parameter: Tissue Value: Aerial
  misc_feature: MA Experiment ID: 20000179 Result: Up-regulated in Transcription
  misc_feature: MA Experiment 20000179 PARAMETER Experiment Name: At_Germinating_Seeds_P Parameter: Age (hr) Value: 6 vs. 0
  misc_feature: MA Experiment 20000179 PARAMETER Experiment Name: At_Germinating_Seeds_P Parameter: Tissue Value: Germinating Seeds
  misc_feature: MA Experiment ID: 20000180 Result: Up-regulated in Transcription
  misc_feature: MA Experiment 20000180 PARAMETER Experiment Name: At_Germinating_Seeds_P Parameter: Age (hr) Value: 24 vs. 0
  misc_feature: MA Experiment 20000180 PARAMETER Experiment Name: At_Germinating_Seeds_P Parameter: Tissue Value: Germinating Seeds
  misc_feature: MA Experiment ID: 20000184 Result: Down-regulated in Transcription
  misc_feature: MA Experiment 20000184 PARAMETER Experiment Name: At_Shoots__P Parameter: Age (day) Value: 7
  misc_feature: MA Experiment 20000184 PARAMETER Experiment Name: At_Shoots__P Parameter: Tissue Value: Shoots vs. Whole Plant
  misc_feature: MA Experiment ID: 20000224 Result: Up-regulated in Transcription
  misc_feature: MA Experiment ID: 20000436 Result: Up-regulated in Transcription
  misc_feature: MA Experiment 20000436 PARAMETER Experiment Name: At_Drought_P Parameter: Age (day) Value: 7
  misc_feature: MA Experiment 20000436 PARAMETER Experiment Name: At_Drought_P Parameter: Organism Value: A. thaliana
  misc_feature: MA Experiment 20000436 PARAMETER Experiment Name: At_Drought_P Parameter: Plant Line Value: WS
  misc_feature: MA Experiment 20000436 PARAMETER Experiment Name: At_Drought_P Parameter: Timepoint (hr) Value: 12
  misc_feature: MA Experiment 20000436 PARAMETER Experiment Name: At_Drought_P Parameter: Tissue Value: Whole Plant
  misc_feature: MA Experiment 20000436 PARAMETER Experiment Name: At_Drought_P Parameter: Treatment Value: Drought vs. No Drought
  misc_feature: MA Experiment ID: 20000437 Result: Up-regulated in Transcription
  misc_feature: MA Experiment 20000437 PARAMETER Experiment Name: At_Drought_P Parameter: Age (day) Value: 8
  misc_feature: MA Experiment 20000437 PARAMETER Experiment Name: At_Drought_P Parameter: Organism Value: A. thaliana
  misc_feature: MA Experiment 20000437 PARAMETER Experiment Name: At_Drought_P Parameter: Plant Line Value: WS
  misc_feature: MA Experiment 20000437 PARAMETER Experiment Name: At_Drought_P Parameter: Timepoint (hr) Value: 24
  misc_feature: MA Experiment 20000437 PARAMETER Experiment Name: At_Drought_P Parameter: Tissue Value: Whole Plant
  misc_feature: MA Experiment 20000437 PARAMETER Experiment Name: At_Drought_P Parameter: Treatment Value: Drought vs. No Drought
  misc_feature: MA Experiment ID: 20000453 Result: Up-regulated in Transcription
  misc_feature: MA Experiment 20000453 PARAMETER Experiment Name: At_100uM_ABA_P Parameter: Age (day) Value: 15
  misc_feature: MA Experiment 20000453 PARAMETER Experiment Name: At_100uM_ABA_P Parameter: Organism Value: A. thaliana
  misc_feature: MA Experiment 20000453 PARAMETER Experiment Name: At_100uM_ABA_P Parameter: Plant Line Value: WS
  misc_feature: MA Experiment 20000453 PARAMETER Experiment Name: At_100uM_ABA_P Parameter: Timepoint (hr) Value: 24
  misc_feature: MA Experiment 20000453 PARAMETER Experiment Name: At_100uM_ABA_P Parameter: Tissue Value: Aerial
  misc_feature: MA Experiment 20000453 PARAMETER Experiment Name: At_100uM_ABA_P Parameter: Treatment Value: 100uM ABA vs. No Treatment
  misc_feature: MA Experiment ID: 20000794 Result: Up-regulated in Transcription
  misc_feature: MA Experiment 20000794 PARAMETER Experiment Name: At_Petals_P Parameter: Age (day) Value: 23-25 days
  misc_feature: MA Experiment 20000794 PARAMETER Experiment Name: At_Petals_P Parameter: Plant Line Value: WS
  misc_feature: MA Experiment 20000794 PARAMETER Experiment Name: At_Petals_P Parameter: Tissue Value: Petals vs. Whole plant
  misc_feature: MA Experiment ID: 20001905 Result: Up-regulated in Transcription
  misc_feature: MA Experiment 20001905 PARAMETER Experiment Name: At_Drought_Reproduction_P Parameter: Age (day) Value: 40
  misc_feature: MA Experiment 20001905 PARAMETER Experiment Name: At_Drought_Reproduction_P Parameter: Organism Value: A. thaliana
  misc_feature: MA Experiment 20001905 PARAMETER Experiment Name: At_Drought_Reproduction_P Parameter: Plant Line Value: WS
  misc_feature: MA Experiment 20001905 PARAMETER Experiment Name: At_Drought_Reproduction_P Parameter: Timepoint (day) Value: 10
  misc_feature: MA Experiment 20001905 PARAMETER Experiment Name: At_Drought_Reproduction_P Parameter: Tissue Value: Rosettes
  misc_feature: MA Experiment 20001905 PARAMETER Experiment Name: At_Drought_Reproduction_P Parameter: Treatment Value: Drought vs. No Drought
  misc_feature: MA Experiment ID: 20001911 Result: Up-regulated in Transcription
  misc_feature: MA Experiment 20001911 PARAMETER Experiment Name: At_Drought_Reproduction_P Parameter: Age (day) Value: 40
  misc_feature: MA Experiment 20001911 PARAMETER Experiment Name: At_Drought_Reproduction_P Parameter: Organism Value: A. thaliana
  misc_feature: MA Experiment 20001911 PARAMETER Experiment Name: At_Drought_Reproduction_P Parameter: Plant Line Value: WS
  misc_feature: MA Experiment 20001911 PARAMETER Experiment Name: At_Drought_Reproduction_P Parameter: Timepoint (day) Value: 10
  misc_feature: MA Experiment 20001911 PARAMETER Experiment Name: At_Drought_Reproduction_P Parameter: Tissue Value: Flowers
  misc_feature: MA Experiment 20001911 PARAMETER Experiment Name: At_Drought_Reproduction_P Parameter: Treatment Value: Drought vs. No Drought
atcctctgttttgtaaccaatctcagctctccctctcaaacaatccaggattcttcagattcctctcctttgatcctctctttaacaatctctctctctctgttttcttcgatccgttgtaggagaaaatggtcgttatcaacagtctccgacgcttggcgcgtaccactcaggttcatttgcacagtaagtatgccacttgcatgtctgggaactccacttccaggaggattttcactactgaggcagcacctgagaagaaaaacactgttggtctaaagggcatgatatgcttgcaccttttactgctggatggcagagtgctgatttagatcccttggtcattgcaaagtctgagggaagttatgtgtatgatgatactgggaaaaaatatcttgactctctcgctggtttatggtgtactgccttaggaggaaatgagccaaggcttgtttctgccgctgttgaacagttgaacaccttgccgttttatcactccttttggaaccgtactactaaaccttctctggatcttgctaaggttcttttagagatgttcacggccaacaaaatggccaaagcattttttacaagcggtggatcagatgccaacgatacccaggtcaagctggtttggtattacaataacgcacttggaaggcccgagaagaaaaagtttatcgcgagaaagaaatcgtaccatggctccactctaatatcagcaagtttgtccggccttcccccgctacaccaaaattttgatttacctgcaccatttgtgttgcacacagattgccctcattattggcgttttcatcttccaggcgaaacggaagaggagttctcaaccagattagccaagaatttagaggatctaatcatcaaagaaggaccagaaactattggtgcttttatagctgaaccagtcatgggtgctgggggtgtgatacctccacctgctacctactttgaaaaggttcaagctgttgttaagaaatatgatatcttgttcattgctgatgaggtgatatgtgcatttggaaggctcgggacaatgtttggctgtgacaaatacaacattaagccagatcttgtgaccttagctaaggcactgtcttcagcatatatgccgattggagccattcttatgagccaagaagtggcagatgtcataaattctcatagcagcaagctaggcgttttctcccatggatttacttattctggtcatccagtttcgtgtgctgtagcaattgaagcgttaaagatatacaaggagaggaacataccagagtatgtcgccaaagttgccccaaggtttcaagatggagttaaagcgtttgcctctggtagtcctattattggagagacaagaggaacaggtttgattcttgggactgagtttgtagacaataaatctccgaacgaaccatttccaccagaatggggtgttggcgcattctttggagccgagtgccagaagcacgggatgttagtccgtgttgcaggtgatggcattttgatgtctccaccgctcattatctcacctgaagagattgatgagttgatttctatctatgggaaagcattgaaggcaacggaagagaaggtaaaagaactcaaggctcagcacaagaagtgaaaagcagagtcaaaatgatgttgatgaaaaatgttttttagattctcaaagtttggatcctttgtttttttttttaacacacaacaagtctttaaataagtacattttaatgagg

SEQ ID NO: 73457 - protein, 450 aa, Arabidopsis thaliana; identical to SEQ ID NO: 26479
  peptide (1)..(450): Ceres Seq. ID no. 4970202
  misc_feature (6)..(438): Pfam Name: Aminotransferase class-III Pfam Description: Aminotransferase class-III
  misc_feature (1)..(450): Homolog of NCBI NO: 18403295 NR Description: aminotransferase, putative; protein id: supported by cDNA: gi_14030434, supported by cDNA: gi_14334463 thaliana] >gi|14334464|gb|AAK59430.1| putative aminotransferase
  misc_feature (1)..(450): Homolog of NCBI NO: 14030435 NR Description: gamma-aminobutyrate transaminase subunit
  misc_feature (1)..(450): Homolog of NCBI NO: 11994739 NR Description: aminotransferase-like protein [Arabidopsis
  misc_feature (1)..(447): Homolog of NCBI NO: 29837282 NR Description: gamma-aminobutyrate transaminase subunit
  misc_feature (1)..(449): Homolog of NCBI NO: 29837286 NR Description: gamma-aminobutyrate transaminase subunit
  misc_feature (1)..(447): Homolog of NCBI NO: 33340007 NR Description: putative aminotransferase [Oryza sativa]
  misc_feature (1)..(449): Homolog of NCBI NO: 38344250 NR Description: OSJNBa0008M17.3 [Oryza sativa (japonica
  misc_feature (1)..(450): Homolog of NCBI NO: 19171207 NR Description: viroid RNA-binding protein [Lycopersicon
  misc_feature (1)..(447): Homolog of NCBI NO: 3599491 NR Description: putative aminotransferase [Capsicum chinense]
  misc_feature (1)..(449): Homolog of NCBI NO: 29837284 NR Description: gamma-aminobutyrate transaminase subunit

SEQ ID NO: 73458 - protein, 362 aa, Arabidopsis thaliana
  peptide (1)..(362): Ceres Seq. ID no. 4970203
  misc_feature (1)..(350): Pfam Name: Aminotransferase class-III Pfam Description: Aminotransferase class-III
  misc_feature (1)..(362): Homolog of NCBI NO: 18403295 NR Description: aminotransferase, putative; protein id: supported by cDNA: gi_14030434, supported by cDNA: gi_14334463 thaliana] >gi|14334464|gb|AAK59430.1| putative aminotransferase
  misc_feature (1)..(362): Homolog of NCBI NO: 14030435 NR Description: gamma-aminobutyrate transaminase subunit
  misc_feature (1)..(362): Homolog of NCBI NO: 11994739 NR Description: aminotransferase-like protein [Arabidopsis
  misc_feature (1)..(359): Homolog of NCBI NO: 29837282 NR Description: gamma-aminobutyrate transaminase subunit
  misc_feature (1)..(361): Homolog of NCBI NO: 29837286 NR Description: gamma-aminobutyrate transaminase subunit
  misc_feature (1)..(359): Homolog of NCBI NO: 33340007 NR Description: putative aminotransferase [Oryza sativa]
  misc_feature (1)..(361): Homolog of NCBI NO: 38344250 NR Description: OSJNBa0008M17.3 [Oryza sativa (japonica
  misc_feature (1)..(362): Homolog of NCBI NO: 19171207 NR Description: viroid RNA-binding protein [Lycopersicon
  misc_feature (1)..(359): Homolog of NCBI NO: 3599491 NR Description: putative aminotransferase [Capsicum chinense]
  misc_feature (1)..(361): Homolog of NCBI NO: 29837284 NR Description: gamma-aminobutyrate transaminase subunit
MFTANKMAKAFFTSGGSDANDTQVKLVWYYNNALGRPEKKKFIARKKSYHGSTLISASLSGLPPLHQNFDLPAPFVLHTDCPHYWRFHLPGETEEEFSTRLAKNLEDLIIKEGPETIGAFIAEPVMGAGGVIPPPATYFEKVQAVVKKYDILFIADEVICAFGRLGTMFGCDKYNIKPDLVTLAKALSSAYMPIGAILMSQEVADVINSHSSKLGVFSHGFTYSGHPVSCAVAIEALKIYKERNIPEYVAKVAPRFQDGVKAFASGSPIIGETRGTGLILGTEFVDNKSPNEPFPPEWGVGAFFGAECQKHGMLVRVAGDGILMSPPLIISPEEIDELISIYGKALKATEEKVKELKAQHKK

SEQ ID NO: 73459 - protein, 356 aa, Arabidopsis thaliana
  peptide (1)..(356): Ceres Seq. ID no. 4970204
  misc_feature (1)..(344): Pfam Name: Aminotransferase class-III Pfam Description: Aminotransferase class-III
  misc_feature (1)..(356): Homolog of NCBI NO: 18403295 NR Description: aminotransferase, putative; protein id: supported by cDNA: gi_14030434, supported by cDNA: gi_14334463 thaliana] >gi|14334464|gb|AAK59430.1| putative aminotransferase
  misc_feature (1)..(356): Homolog of NCBI NO: 14030435 NR Description: gamma-aminobutyrate transaminase subunit
  misc_feature (1)..(356): Homolog of NCBI NO: 11994739 NR Description: aminotransferase-like protein [Arabidopsis
  misc_feature (1)..(353): Homolog of NCBI NO: 29837282 NR Description: gamma-aminobutyrate transaminase subunit
  misc_feature (1)..(355): Homolog of NCBI NO: 29837286 NR Description: gamma-aminobutyrate transaminase subunit
  misc_feature (1)..(353): Homolog of NCBI NO: 33340007 NR Description: putative aminotransferase [Oryza sativa]
  misc_feature (1)..(355): Homolog of NCBI NO: 38344250 NR Description: OSJNBa0008M17.3 [Oryza sativa (japonica
  misc_feature (1)..(356): Homolog of NCBI NO: 19171207 NR Description: viroid RNA-binding protein [Lycopersicon
  misc_feature (1)..(353): Homolog of NCBI NO: 3599491 NR Description: putative aminotransferase [Capsicum chinense]
  misc_feature (1)..(355): Homolog of NCBI NO: 29837284 NR Description: gamma-aminobutyrate transaminase subunit
MAKAFFTSGGSDANDTQVKLVWYYNNALGRPEKKKFIARKKSYHGSTLISASLSGLPPLHQNFDLPAPFVLHTDCPHYWRFHLPGETEEEFSTRLAKNLEDLIIKEGPETIGAFIAEPVMGAGGVIPPPATYFEKVQAVVKKYDILFIADEVICAFGRLGTMFGCDKYNIKPDLVTLAKALSSAYMPIGAILMSQEVADVINSHSSKLGVFSHGFTYSGHPVSCAVAIEALKIYKERNIPEYVAKVAPRFQDGVKAFASGSPIIGETRGTGLILGTEFVDNKSPNEPFPPEWGVGAFFGAECQKHGMLVRVAGDGILMSPPLIISPEEIDELISIYGKALKATEEKVKELKAQHKK

SEQ ID NO: 73460 - DNA, 696 bp, Arabidopsis thaliana
  misc_feature (1)..(696): Ceres Seq. ID no. 4970209
  misc_feature: MA Experiment ID: 108463 Result: Down-regulated in Transcription
  misc_feature: MA Experiment 108463 PARAMETER Experiment Name: At_Germinating_Seeds_cDNA_P Parameter: Age (day) Value: 3 vs. 0
  misc_feature: MA Experiment 108463 PARAMETER Experiment Name: At_Germinating_Seeds_cDNA_P Parameter: Tissue Value: Germinating Seeds
  misc_feature: MA Experiment ID: 20000451 Result: Up-regulated in Transcription
  misc_feature: MA Experiment 20000451 PARAMETER Experiment Name: At_CS6879_Shoots-Roots_P Parameter: Age (day) Value: 14
  misc_feature: MA Experiment 20000451 PARAMETER Experiment Name: At_CS6879_Shoots-Roots_P Parameter: Organism Value: A. thaliana
  misc_feature: MA Experiment 20000451 PARAMETER Experiment Name: At_CS6879_Shoots-Roots_P Parameter: Plant Line Value: CS6879 vs. WS
  misc_feature: MA Experiment 20000451 PARAMETER Experiment Name: At_CS6879_Shoots-Roots_P Parameter: Tissue Value: Roots
  misc_feature: MA Experiment ID: 20000794 Result: Down-regulated in Transcription
  misc_feature: MA Experiment 20000794 PARAMETER Experiment Name: At_Petals_P Parameter: Age (day) Value: 23-25 days
  misc_feature: MA Experiment 20000794 PARAMETER Experiment Name: At_Petals_P Parameter: Plant Line Value: WS
  misc_feature: MA Experiment 20000794 PARAMETER Experiment Name: At_Petals_P Parameter: Tissue Value: Petals vs. Whole plant
aaggaacctcgtgtggtcatcgtcttcgtacctttctgctttctacgccgtcaaaatctaactgctcgacagtgaccatgcaaagctcaatgacaatggaactacgaccatcaggtgattccggttcatctgacgtcgatgctgagatcagcgatggcttttcaccgctcgatacttctcacagagacgtcgctgatgaaggttcgttgctgagaagagcagagatgtatcaagactacatgaagcaagtaccaatcccgacgaatcgtggctcgttgattccgttcacaagctgggttggattaagcatttcaatgaaacagctttatggtcagcctctacattacctcacgaatgttctcttacaacgatgggatcaatcacgattcggtactgattctgaagaacagaggttggattctatcattcatcctactaaagctgaagctactatctggcttgttgaagagattcatcgactcactccttctcatcttcacatggctcttctttggagatctgatcctatgtatcactctttcattgacccaatctttcctgagaaatgaacaagttcttgaattgtgatgaaccatccttttttgtatctacttttgcttttagaaaccttgttcaagcattgaagcttatatgtataattgcagggtcttattcaataaaatgtgaatcttcctt

SEQ ID NO: 73461 - protein, 188 aa, Arabidopsis thaliana
  peptide (1)..(188): Ceres Seq. ID no. 4970210
  misc_feature (26)..(188): Homolog of NCBI NO: 30686741 NR Description: expressed protein [Arabidopsis thaliana]
  misc_feature (26)..(145): Homolog of NCBI NO: 30102560 NR Description: At3g22680 [Arabidopsis thaliana]
GTSCGHRLRTFLLSTPSKSNCSTVTMQSSMTMELRPSGDSGSSDVDAEISDGFSPLDTSHRDVADEGSLLRRAEMYQDYMKQVPIPTNRGSLIPFTSWVGLSISMKQLYGQPLHYLTNVLLQRWDQSRFGTDSEEQRLDSIIHPTKAEATIWLVEEIHRLTPSHLHMALLWRSDPMYHSFIDPIFPEK

SEQ ID NO: 73462 - protein, 163 aa, Arabidopsis thaliana; identical to SEQ ID NO: 25944
  peptide (1)..(163): Ceres Seq. ID no. 4970211
  misc_feature (1)..(163): Homolog of NCBI NO: 30686741 NR Description: expressed protein [Arabidopsis thaliana]
  misc_feature (1)..(120): Homolog of NCBI NO: 30102560 NR Description: At3g22680 [Arabidopsis thaliana]

SEQ ID NO: 73463 - protein, 159 aa, Arabidopsis thaliana; identical to SEQ ID NO: 25945
  peptide (1)..(159): Ceres Seq. ID no. 4970212
  misc_feature (1)..(159): Homolog of NCBI NO: 30686741 NR Description: expressed protein [Arabidopsis thaliana]
  misc_feature (1)..(116): Homolog of NCBI NO: 30102560 NR Description: At3g22680 [Arabidopsis thaliana]

SEQ ID NO: 73464 - DNA, 1277 bp, Arabidopsis thaliana
  misc_feature (1)..(1277): Ceres Seq. ID no. 4970342
  misc_feature: MA Experiment ID: 108434 Result: Down-regulated in Transcription
  misc_feature: MA Experiment 108434 PARAMETER Experiment Name: At_Root_Tips_cDNA_P Parameter: Tissue Value: Root Tips
  misc_feature: MA Experiment ID: 108595 Result: Down-regulated in Transcription
  misc_feature: MA Experiment 108595 PARAMETER Experiment Name: At_Ler-pi_Ovule_cDNA_P Parameter: Plant Line Value: null
  misc_feature: MA Experiment ID: 20000113 Result: Down-regulated in Transcription
  misc_feature: MA Experiment 20000113 PARAMETER Experiment Name: At_42deg_Heat_cDNA_P Parameter: Temperature (deg C) Value: 42 vs. 22
  misc_feature: MA Experiment 20000113 PARAMETER Experiment Name: At_42deg_Heat_cDNA_P Parameter: Timepoint (hr) Value: 8
  misc_feature: MA Experiment 20000113 PARAMETER Experiment Name: At_42deg_Heat_cDNA_P Parameter: Tissue Value: Aerial
  misc_feature: MA Experiment ID: 20000171 Result: Down-regulated in Transcription
  misc_feature: MA Experiment 20000171 PARAMETER Experiment Name: At_42deg_Heat_P Parameter: Age (day) Value: 14
  misc_feature: MA Experiment 20000171 PARAMETER Experiment Name: At_42deg_Heat_P Parameter: Organism Value: A. thaliana
  misc_feature: MA Experiment 20000171 PARAMETER Experiment Name: At_42deg_Heat_P Parameter: Plant Line Value: WS
  misc_feature: MA Experiment 20000171 PARAMETER Experiment Name: At_42deg_Heat_P Parameter: Temperature (deg C) Value: 42 vs. 22
  misc_feature: MA Experiment 20000171 PARAMETER Experiment Name: At_42deg_Heat_P Parameter: Timepoint (hr) Value: 1
  misc_feature: MA Experiment 20000171 PARAMETER Experiment Name: At_42deg_Heat_P Parameter: Tissue Value: Aerial
  misc_feature: MA Experiment ID: 20000173 Result: Down-regulated in Transcription
  misc_feature: MA Experiment 20000173 PARAMETER Experiment Name: At_42deg_Heat_P Parameter: Age (day) Value: 14
  misc_feature: MA Experiment 20000173 PARAMETER Experiment Name: At_42deg_Heat_P Parameter: Organism Value: A. thaliana
  misc_feature: MA Experiment 20000173 PARAMETER Experiment Name: At_42deg_Heat_P Parameter: Plant Line Value: WS
  misc_feature: MA Experiment 20000173 PARAMETER Experiment Name: At_42deg_Heat_P Parameter: Temperature (deg C) Value: 42 vs. 22
  misc_feature: MA Experiment 20000173 PARAMETER Experiment Name: At_42deg_Heat_P Parameter: Timepoint (hr) Value: 6
  misc_feature: MA Experiment 20000173 PARAMETER Experiment Name: At_42deg_Heat_P Parameter: Tissue Value: Aerial
  misc_feature: MA Experiment ID: 20000184 Result: Down-regulated in Transcription
  misc_feature: MA Experiment 20000184 PARAMETER Experiment Name: At_Shoots__P Parameter: Age (day) Value: 7
  misc_feature: MA Experiment 20000184 PARAMETER Experiment Name: At_Shoots__P Parameter: Tissue Value: Shoots vs. Whole Plant
  misc_feature: MA Experiment ID: 20000234 Result: Down-regulated in Transcription
  misc_feature: MA Experiment 20000234 PARAMETER Experiment Name: At_Siliques_P Parameter: Age (day) Value: 21
  misc_feature: MA Experiment 20000234 PARAMETER Experiment Name: At_Siliques_P Parameter: Organism Value: A. thaliana
  misc_feature: MA Experiment 20000234 PARAMETER Experiment Name: At_Siliques_P Parameter: Plant Line Value: WS
  misc_feature: MA Experiment 20000234 PARAMETER Experiment Name: At_Siliques_P Parameter: Tissue Value: Less Than 5mm Siliques vs. Whole Plant
  misc_feature: MA Experiment ID: 20001247 Result: Up-regulated in Transcription
  misc_feature: MA Experiment 20001247 PARAMETER Experiment Name: At_Far-red-induction_P Parameter: Age (day) Value: 7
  misc_feature: MA Experiment 20001247 PARAMETER Experiment Name: At_Far-red-induction_P Parameter: Light Value: Far-red vs. White
  misc_feature: MA Experiment 20001247 PARAMETER Experiment Name: At_Far-red-induction_P Parameter: Organism Value: A. thaliana
  misc_feature: MA Experiment 20001247 PARAMETER Experiment Name: At_Far-red-induction_P Parameter: Plant Line Value: Columbia
  misc_feature: MA Experiment 20001247 PARAMETER Experiment Name: At_Far-red-induction_P Parameter: Timepoint (hr) Value: 1
  misc_feature: MA Experiment 20001247 PARAMETER Experiment Name: At_Far-red-induction_P Parameter: Tissue Value: Whole Plant
  misc_feature: MA Experiment ID: 20001557 Result: Up-regulated in Transcription
  misc_feature: MA Experiment 20001557 PARAMETER Experiment Name: At_Drought_Soil_Dry_P Parameter: Age (day) Value: 27
  misc_feature: MA Experiment 20001557 PARAMETER Experiment Name: At_Drought_Soil_Dry_P Parameter: Organism Value: A. thaliana
  misc_feature: MA Experiment 20001557 PARAMETER Experiment Name: At_Drought_Soil_Dry_P Parameter: Plant Line Value: WS
  misc_feature: MA Experiment 20001557 PARAMETER Experiment Name: At_Drought_Soil_Dry_P Parameter: Post Timepoint (hr) Value: 3
  misc_feature: MA Experiment 20001557 PARAMETER Experiment Name: At_Drought_Soil_Dry_P Parameter: Post-Treatment Value: Re-Water vs. No Drought
  misc_feature: MA Experiment 20001557 PARAMETER Experiment Name: At_Drought_Soil_Dry_P Parameter: Timepoint (day) Value: 13
  misc_feature: MA Experiment 20001557 PARAMETER Experiment Name: At_Drought_Soil_Dry_P Parameter: Treatment Value: Drought vs. No Drought
  misc_feature: MA Experiment ID: 20001558 Result: Up-regulated in Transcription
  misc_feature: MA Experiment 20001558 PARAMETER Experiment Name: At_Drought_Soil_Dry_P Parameter: Age (day) Value: 27
  misc_feature: MA Experiment 20001558 PARAMETER Experiment Name: At_Drought_Soil_Dry_P Parameter: Organism Value: A. thaliana
  misc_feature: MA Experiment 20001558 PARAMETER Experiment Name: At_Drought_Soil_Dry_P Parameter: Plant Line Value: WS
  misc_feature: MA Experiment 20001558 PARAMETER Experiment Name: At_Drought_Soil_Dry_P Parameter: Post Timepoint (hr) Value: 6
  misc_feature: MA Experiment 20001558 PARAMETER Experiment Name: At_Drought_Soil_Dry_P Parameter: Post-Treatment Value: Re-Water vs. No Drought
  misc_feature: MA Experiment 20001558 PARAMETER Experiment Name: At_Drought_Soil_Dry_P Parameter: Timepoint (day) Value: 13
  misc_feature: MA Experiment 20001558 PARAMETER Experiment Name: At_Drought_Soil_Dry_P Parameter: Treatment Value: Drought vs. No Drought
aaaagctgaaacaaagagttcgagaaaaatttcgattctcttgctcgtaaaagcttcttttgattctctttgactctgttttgtggatagctcctgaagaagaagaagatgatggtagtgaacagctttgatctatggcaaaaagatgttttcttctctgcagctgaagagaatggagtctgcttatagattgtggattagagagaagaaagatgagatttgtaaggaacttcaagcagctttaggtacagctaaatggcagttggaggagtttgagaaggcagtgagattgagtcataaacggtgtggggataatgattcttcatccacacggcataaacagtttgttaccgctattgaaaaccagattcatcgcgtagaaacttctctgcaagaagcttatagtgaaaatgggaaaaagcctctccgttgggttgatcttaatgaagaagagcgtgatgacttagcaatgtttctctctggatcttctcgaacttcacagagttttagtggtgagagcagcatcaagtcgagagagtctactaatagttctctagttgaaaacgttatggaagtttcagctaaagtaacattcaagaaagctaaagtttatggtgatggctctgagtgtgtcatagacattgaagaaagagtgacacctggccaagcagagaaatcagttgggctgagaagaatatggagttcaccaaatttcaattctttgagaattatagttcctggtggtgataatgaagaagaaaaggagacattggtggcacaaatagaagcgacgcctaaagttaaaggaactaagtctgtattgtggatgcagagacttcctgatcataatcagctctttgacaagaccggttgctttcaaaatccgatacgcttaccgtttaatcacccgatcaagtttattgtttccttattgctaatggtgtttctactattacccttcgtagtgtatttgtcttgagaattttaccacggttcgaaactgtcaagaagctgctaaagagatcagctttcgcgtctaatggttaggattcataatcccacaagaacaaacagagattaaaaagctttacatatgttacttttaacttgttgctttggttcttcagggaacgtatagaaacattgaaacgtgtaagattaagtaaagggattagagtttatattacggctttggctaccgttgataaagatgtaaatgcaatattcgtttcgtagatgtttgacaatacaatgccataagaatcaagatttatgcc

SEQ ID NO: 73465 - protein, 277 aa, Arabidopsis thaliana
  peptide (1)..(277): Ceres Seq. ID no. 4970343
  misc_feature (10)..(277): Homolog of NCBI NO: 30680486 NR Description: expressed protein [Arabidopsis thaliana]
  misc_feature (10)..(237): Homolog of NCBI NO: 7485788 NR Description: hypothetical protein At2g18860 [imported] - thaliana >gi|4185152|gb|AAD08955.1| unknown protein [Arabidopsis >gi|20197038|gb|AAM14887.1| unknown protein [Arabidopsis
  misc_feature (10)..(274): Homolog of NCBI NO: 18417554 NR Description: putative protein; protein id: At4g30240.1, by cDNA: gi_16226656 [Arabidopsis thaliana] AT4g30240/F9N11_90 [Arabidopsis thaliana]
  misc_feature (10)..(272): Homolog of NCBI NO: 7486766 NR Description: hypothetical protein F9N11.90 - Arabidopsis >gi|5730134|emb|CAB52468.1| putative protein [Arabidopsis >gi|7269924|emb|CAB81017.1| putative protein [Arabidopsis
  misc_feature (9)..(120): Homolog of NCBI NO: 18396454 NR Description: putative clathrin-coat assembly protein; protein At1g27700.1, supported by cDNA: gi_15450632, supported by cDNA: [Arabidopsis thaliana] >gi|15450633|gb|AAK96588.1|
  misc_feature (9)..(120): Homolog of NCBI NO: 25403328 NR Description: protein T22C5.15 [imported] - Arabidopsis >gi|6693035|gb|AAF24961.1|AC012375_24 T22C5.15 [Arabidopsis
  misc_feature (10)..(119): Homolog of NCBI NO: 40253501 NR Description: clathrin-coat assembly protein-like [Oryza sativa
  misc_feature (24)..(115): Homolog of NCBI NO: 26006490 NR Description: Hypothetical protein [Oryza sativa (japonica
  misc_feature (25)..(242): Homolog of NCBI NO: 37533116 NR Description: unknown protein [Oryza sativa (japonica
MFSSLQLKRMESAYRLWIREKKDEICKELQAALGTAKWQLEEFEKAVRLSHKRCGDNDSSSTRHKQFVTAIENQIHRVETSLQEAYSENGKKPLRWVDLNEEERDDLAMFLSGSSRTSQSFSGESSIKSRESTNSSLVENVMEVSAKVTFKKAKVYGDGSECVIDIEERVTPGQAEKSVGLRRIWSSPNFNSLRIIVPGGDNEEEKETLVAQIEATPKVKGTKSVLWMQRLPDHNQLFDKTGCFQNPIRLPFNHPIKFIVSLLLMVFLLLPFVVYLS

SEQ ID NO: 73466 - protein, 268 aa, Arabidopsis thaliana
  peptide (1)..(268): Ceres Seq. ID no. 4970344
  misc_feature (1)..(268): Homolog of NCBI NO: 30680486 NR Description: expressed protein [Arabidopsis thaliana]
  misc_feature (1)..(228): Homolog of NCBI NO: 7485788 NR Description: hypothetical protein At2g18860 [imported] - thaliana >gi|4185152|gb|AAD08955.1| unknown protein [Arabidopsis >gi|20197038|gb|AAM14887.1| unknown protein [Arabidopsis
  misc_feature (1)..(265): Homolog of NCBI NO: 18417554 NR Description: putative protein; protein id: At4g30240.1, by cDNA: gi_16226656 [Arabidopsis thaliana] AT4g30240/F9N11_90 [Arabidopsis thaliana]
  misc_feature (1)..(263): Homolog of NCBI NO: 7486766 NR Description: hypothetical protein F9N11.90 - Arabidopsis >gi|5730134|emb|CAB52468.1| putative protein [Arabidopsis >gi|7269924|emb|CAB81017.1| putative protein [Arabidopsis
  misc_feature (1)..(111): Homolog of NCBI NO: 18396454 NR Description: putative clathrin-coat assembly protein; protein At1g27700.1, supported by cDNA: gi_15450632, supported by cDNA: [Arabidopsis thaliana] >gi|15450633|gb|AAK96588.1|
  misc_feature (1)..(111): Homolog of NCBI NO: 25403328 NR Description: protein T22C5.15 [imported] - Arabidopsis >gi|6693035|gb|AAF24961.1|AC012375_24 T22C5.15 [Arabidopsis
  misc_feature (1)..(110): Homolog of NCBI NO: 40253501 NR Description: clathrin-coat assembly protein-like [Oryza sativa
  misc_feature (15)..(106): Homolog of NCBI NO: 26006490 NR Description: Hypothetical protein [Oryza sativa (japonica
  misc_feature (16)..(233): Homolog of NCBI NO: 37533116 NR Description: unknown protein [Oryza sativa (japonica
MESAYRLWIREKKDEICKELQAALGTAKWQLEEFEKAVRLSHKRCGDNDSSSTRHKQFVTAIENQIHRVETSLQEAYSENGKKPLRWVDLNEEERDDLAMFLSGSSRTSQSFSGESSIKSRESTNSSLVENVMEVSAKVTFKKAKVYGDGSECVIDIEERVTPGQAEKSVGLRRIWSSPNFNSLRIIVPGGDNEEEKETLVAQIEATPKVKGTKSVLWMQRLPDHNQLFDKTGCFQNPIRLPFNHPIKFIVSLLLMVFLLLPFVVYLS

SEQ ID NO: 73467 - protein, 169 aa, Arabidopsis thaliana
  peptide (1)..(169): Ceres Seq. ID no. 4970345
  misc_feature (1)..(169): Homolog of NCBI NO: 30680486 NR Description: expressed protein [Arabidopsis thaliana]
  misc_feature (1)..(129): Homolog of NCBI NO: 7485788 NR Description: hypothetical protein At2g18860 [imported] - thaliana >gi|4185152|gb|AAD08955.1| unknown protein [Arabidopsis >gi|20197038|gb|AAM14887.1| unknown protein [Arabidopsis
  misc_feature (1)..(166): Homolog of NCBI NO: 18417554 NR Description: putative protein; protein id: At4g30240.1, by cDNA: gi_16226656 [Arabidopsis thaliana] AT4g30240/F9N11_90 [Arabidopsis thaliana]
  misc_feature (1)..(164): Homolog of NCBI NO: 7486766 NR Description: hypothetical protein F9N11.90 - Arabidopsis >gi|5730134|emb|CAB52468.1| putative protein [Arabidopsis >gi|7269924|emb|CAB81017.1| putative protein [Arabidopsis
  misc_feature (1)..(12): Homolog of NCBI NO: 18396454 NR Description: putative clathrin-coat assembly protein; protein At1g27700.1, supported by cDNA: gi_15450632, supported by cDNA: [Arabidopsis thaliana] >gi|15450633|gb|AAK96588.1|
  misc_feature (1)..(12): Homolog of NCBI NO: 25403328 NR Description: protein T22C5.15 [imported] - Arabidopsis >gi|6693035|gb|AAF24961.1|AC012375_24 T22C5.15 [Arabidopsis
  misc_feature (1)..(11): Homolog of NCBI NO: 40253501 NR Description: clathrin-coat assembly protein-like [Oryza sativa
  misc_feature (1)..(134): Homolog of NCBI NO: 37533116 NR Description: unknown protein [Oryza sativa (japonica
MFLSGSSRTSQSFSGESSIKSRESTNSSLVENVMEVSAKVTFKKAKVYGDGSECVIDIEERVTPGQAEKSVGLRRIWSSPNFNSLRIIVPGGDNEEEKETLVAQIEATPKVKGTKSVLWMQRLPDHNQLFDKTGCFQNPIRLPFNHPIKFIVSLLLMVFLLLPFVVYLS

SEQ ID NO: 73468 - DNA, 996 bp, Arabidopsis thaliana
  misc_feature (1)..(996): Ceres Seq. ID no. 4970350
  misc_feature: MA Experiment ID: 20000184 Result: Down-regulated in Transcription
  misc_feature: MA Experiment 20000184 PARAMETER Experiment Name: At_Shoots__P Parameter: Age (day) Value: 7
  misc_feature: MA Experiment 20000184 PARAMETER Experiment Name: At_Shoots__P Parameter: Tissue Value: Shoots vs. Whole Plant
acaaataacaacaacaatttcgccggcgtcgtcgtcgtcgtctctccatcaccgtctctgctgcattgattcgcagcactgagtcctaaatttccagtgtaaaaaaaatcagaaaatggacaacttggaagatttgaagattgtggcagagcagtggtctaaacaaggacttgaatttgttcaaaaaataccaccacctcagctttatactgccattggtgttctcttattagctaccatttggctcttatctattcgtttgtttagacgtacaaaatccaatactgtactcctctctgggctaagtggaagtggcaaaacagttctcttctatcaactacgagatggatcttcccatcagggtgctgtaacgtcaatggaaccgaacgaaggcacctttgtgcttcacaatgaaaacaacactaagaaaggaaaagtaaagcctgttcatcttattgatgttcctggacactctcggcttatatctaagctagaagaatacttgcctcgagccgccgctgttgtgtttgtagtagatgcattggagttcctcccaaatatccgggcagcttcagagtacctttacgacattctgaccaatgctagcgttattaagaataagaccccggttctgctttgctgtaacaagacagataaagtaactgcacacaccaaagagttcatccgcaagcagatggagaaagaaatagataaacttagggtttcgaggagcgcaatatcaacagctgatatagcgaatgacttcactcttgggattgaaggagaagtgttttccttttcgcattgccataacaaagtcacggtcgctgaggcgtctggactaacaggagaaacagatcaggtacaagagttcatcagagaacacgtaaagccatgaggattgtgtaagcatctcagagaatgtacttaaatgtcttttcatttgtttgtaaatgaaattataatttgagaacttagatgatattcgttggaagg

SEQ ID NO: 73469 - protein, 260 aa, Arabidopsis thaliana; identical to SEQ ID NO: 29425
  peptide (1)..(260): Ceres Seq. ID no. 4970351
  misc_feature (60)..(194): Pfam Name: ADP-ribosylation factor family Pfam Description: ADP-ribosylation factor family
  misc_feature (1)..(260): Homolog of NCBI NO: 15224229 NR Description: putative signal recognition particle receptor subunit; protein id: At2g18770.1, supported by cDNA: 14084.
  misc_feature (1)..(260): Homolog of NCBI NO: 15239201 NR Description: signal recognition particle receptor beta
  misc_feature (19)..(241): Homolog of NCBI NO: 32450191 NR Description: Unknown (protein for MGC:64420) [Xenopus laevis]
  misc_feature (22)..(248): Homolog of NCBI NO: 31340540 NR Description: Signal recognition particle receptor beta subunit (Protein APMCF1) >gi|22761735|dbj|BAC11675.1| unnamed protein [Homo sapiens] >gi|24528583|gb|AAD34888.3|AF141882_1 APMCF1 [Homo
  misc_feature (22)..(248): Homolog of NCBI NO: 38649415 NR Description: Signal recognition particle receptor, beta
  misc_feature (22)..(241): Homolog of NCBI NO: 38174090 NR Description: Unknown (protein for MGC:75930) [Silurana
  misc_feature (22)..(248): Homolog of NCBI NO: 6678137 NR Description: signal recognition particle receptor, B subunit musculus] >gi|1351115|sp|P47758|SRPB_MOUSE Signal recognition
  misc_feature (22)..(248): Homolog of NCBI NO: 12842535 NR Description: unnamed protein product [Mus musculus]
  misc_feature (22)..(248): Homolog of NCBI NO: 27721301 NR Description: similar to signal recognition particle receptor,
  misc_feature (22)..(248): Homolog of NCBI NO: 14042265 NR Description: unnamed protein product [Homo sapiens]

SEQ ID NO: 73470 - protein, 173 aa, Arabidopsis thaliana; identical to SEQ ID NO: 29426
  peptide (1)..(173): Ceres Seq. ID no. 4970352
  misc_feature (1)..(107): Pfam Name: ADP-ribosylation factor family Pfam Description: ADP-ribosylation factor family
  misc_feature (1)..(173): Homolog of NCBI NO: 15224229 NR Description: putative signal recognition particle receptor subunit; protein id: At2g18770.1, supported by cDNA: 14084.
  misc_feature (1)..(173): Homolog of NCBI NO: 15239201 NR Description: signal recognition particle receptor beta
  misc_feature (1)..(154): Homolog of NCBI NO: 32450191 NR Description: Unknown (protein for MGC:64420) [Xenopus laevis]
  misc_feature (1)..(161): Homolog of NCBI NO: 31340540 NR Description: Signal recognition particle receptor beta subunit (Protein APMCF1) >gi|22761735|dbj|BAC11675.1| unnamed protein [Homo sapiens] >gi|24528583|gb|AAD34888.3|AF141882_1 APMCF1 [Homo
  misc_feature (1)..(161): Homolog of NCBI NO: 38649415 NR Description: Signal recognition particle receptor, beta
  misc_feature (1)..(154): Homolog of NCBI NO: 38174090 NR Description: Unknown (protein for MGC:75930) [Silurana
  misc_feature (1)..(161): Homolog of NCBI NO: 6678137 NR Description: signal recognition particle receptor, B subunit musculus] >gi|1351115|sp|P47758|SRPB_MOUSE Signal recognition
  misc_feature (1)..(161): Homolog of NCBI NO: 27721301 NR Description: similar to signal recognition particle receptor,
  misc_feature (1)..(161): Homolog of NCBI NO: 12842535 NR Description: unnamed protein product [Mus musculus]
  misc_feature (1)..(161): Homolog of NCBI NO: 14042265 NR Description: unnamed protein product [Homo sapiens]

SEQ ID NO: 73471 - DNA, 1485 bp, Arabidopsis thaliana
  misc_feature (1)..(1485): Ceres Seq. ID no. 4970496
  misc_feature: MA Experiment ID: 108434 Result: Up-regulated in Transcription
  misc_feature: MA Experiment 108434 PARAMETER Experiment Name: At_Root_Tips_cDNA_P Parameter: Tissue Value: Root Tips
  misc_feature: MA Experiment ID: 108461 Result: Up-regulated in Transcription
  misc_feature: MA Experiment 108461 PARAMETER Experiment Name: At_Germinating_Seeds_cDNA_P Parameter: Age (day) Value: 1 vs. 0
  misc_feature: MA Experiment 108461 PARAMETER Experiment Name: At_Germinating_Seeds_cDNA_P Parameter: Tissue Value: Germinating Seeds
  misc_feature: MA Experiment ID: 108462 Result: Up-regulated in Transcription
  misc_feature: MA Experiment 108462 PARAMETER Experiment Name: At_Germinating_Seeds_cDNA_P Parameter: Age (day) Value: 2 vs. 0
  misc_feature: MA Experiment 108462 PARAMETER Experiment Name: At_Germinating_Seeds_cDNA_P Parameter: Tissue Value: Germinating Seeds
  misc_feature: MA Experiment ID: 108573 Result: Up-regulated in Transcription
  misc_feature: MA Experiment 108573 PARAMETER Experiment Name: At_Drought_cDNA_P Parameter: Timepoint (hr) Value: 6
  misc_feature: MA Experiment 108573 PARAMETER Experiment Name: At_Drought_cDNA_P Parameter: Tissue Value: Aerial
  misc_feature: MA Experiment 108573 PARAMETER Experiment Name: At_Drought_cDNA_P Parameter: Treatment Value: Drought vs. No Drought
  misc_feature: MA Experiment ID: 108595 Result: Down-regulated in Transcription
  misc_feature: MA Experiment 108595 PARAMETER Experiment Name: At_Ler-pi_Ovule_cDNA_P Parameter: Plant Line Value: null
  misc_feature: MA Experiment ID: 20000069 Result: Down-regulated in Transcription
  misc_feature: MA Experiment 20000069 PARAMETER Experiment Name: At_100uM_ABA_Mutants_cDNA_P Parameter: Plant Line Value: CS23
  misc_feature: MA Experiment 20000069 PARAMETER Experiment Name: At_100uM_ABA_Mutants_cDNA_P Parameter: Timepoint (hr) Value: 6
  misc_feature: MA Experiment 20000069 PARAMETER Experiment Name: At_100uM_ABA_Mutants_cDNA_P Parameter: Tissue Value: Aerial
  misc_feature: MA Experiment 20000069 PARAMETER Experiment Name: At_100uM_ABA_Mutants_cDNA_P Parameter: Treatment Value: 100uM ABA vs. No Treatment
  misc_feature: MA Experiment ID: 20000087 Result: Down-regulated in Transcription
  misc_feature: MA Experiment 20000087 PARAMETER Experiment Name: At_100uM_ABA_Mutants_cDNA_P Parameter: Plant Line Value: WS
  misc_feature: MA Experiment 20000087 PARAMETER Experiment Name: At_100uM_ABA_Mutants_cDNA_P Parameter: Timepoint (hr) Value: 6
  misc_feature: MA Experiment 20000087 PARAMETER Experiment Name: At_100uM_ABA_Mutants_cDNA_P Parameter: Tissue Value: Aerial
  misc_feature: MA Experiment 20000087 PARAMETER Experiment Name: At_100uM_ABA_Mutants_cDNA_P Parameter: Treatment Value: 100uM ABA vs. No Treatment
  misc_feature: MA Experiment ID: 20000089 Result: Down-regulated in Transcription
  misc_feature: MA Experiment ID: 20000117 Result: Down-regulated in Transcription
  misc_feature: MA Experiment 20000117 PARAMETER Experiment Name: At_100uM_ABA_Mutants_cDNA_P Parameter: Plant Line Value: Columbia
  misc_feature: MA Experiment 20000117 PARAMETER Experiment Name: At_100uM_ABA_Mutants_cDNA_P Parameter: Timepoint (hr) Value: 6
  misc_feature: MA Experiment 20000117 PARAMETER Experiment Name: At_100uM_ABA_Mutants_cDNA_P Parameter: Tissue Value: Aerial
  misc_feature: MA Experiment 20000117 PARAMETER Experiment Name: At_100uM_ABA_Mutants_cDNA_P Parameter: Treatment Value: 100uM ABA vs. No Treatment
  misc_feature: MA Experiment ID: 20000224 Result: Down-regulated in Transcription
gattacttgtttctttgatttctccttccatagaaccgaattgttttcagtctgagatttctcctgccgagagaacgattttaatctattttcctcgagagtagaaaatggctgatggtgaagatattcaaccccttgtctgtgacaatggaactggaatggttaaggctggttttgctggggatgatgcaccgagggctgtgtttccaagtattgttggccgtcctcgccacactggagtgatggttggaatgggacagaaggatgcatatgttggcgatgaagctcaatccaagcgtggtattcttacccttaaataccctattgagcacggtattgtcaacaattgggatgatatggaaaaaatctggcatcatactttctacaatgagctccgtgttgctcccgaggagcatcctattctgctcactgaagcgcctcttaacccaaaggctaaccgtgagaagatgactcagatcatgtttgaaacctttaacgctccggctatgtatgtcgccattcaagctgtcctgtcgctttatgctagtggtcgtactactggtattgtgcttgactctggagatggtgtgagtcacacggtccctatctatgagggttacgctctcccgcatgcaatcctacgtcttgatcttgcaggtcgtgacctcacagatgctctgatgaagatcctcactgagcgtggttactctttcaccacaacagctgagcgtgaaattgtcagagacatcaaggagaagctttgctacattgctcttgactatgagcaggagcttgagacggctaaaaccagctcttctgtagagaagaactatgagttacctgatgggcaagtgatcaccattggatctgagcgtttccgttgccctgaggttctttaccagccatctatgatcggtatggagaatgctggtatccatgaaaccacctacaactccataatgaaatgtgatgttgacatcagaaaggacttgtatggtaacattgtgctcagtggtggaacaactatgttccctggaattgctgacagaatgagcaaagagatcactgctttggcaccgagcagcatgaagatcaaagtcgttgcacctcctgagaggaaatactctgtctggattggaggatccatcttggcctccctcagtaccttccagcagatgtggatcgcaaaggcagaatatgatgagtcaggcccgtcgattgttcaccggaaatgcttttgagcttgaagttaagtctgcttccggagaagccctgggggttttccagtttgtccttactgggtttttatcttcgttctctgctcttctttgtttttcttcttcaatattttcagattctggcctaagacattttgaagaatttacattatctgtttgtagtgttggttaaactgttgtcttgttccttttatttattttggatgacacaactgtgtttgagtgaataagaactcctgatttttcc

SEQ ID NO: 73472 - protein, 377 aa, Arabidopsis thaliana; identical to SEQ ID NO: 36003
  peptide (1)..(377): Ceres Seq. ID no. 4970497
  misc_feature (1)..(377): Pfam Name: Actin Pfam Description: Actin
  misc_feature (1)..(362): Homolog of NCBI NO: 11276980 NR Description: actin (ACT3) - Arabidopsis thaliana
  misc_feature (1)..(377): Homolog of NCBI NO: 18409908 NR Description: actin (ACT3); protein id: At3g53750.1, supported cDNA: 25785., supported by cDNA: gi_15146303 [Arabidopsis >gi|22326216|ref|NP_565867.2| actin 3; protein id: At2g37620.1,
  misc_feature (1)..(377): Homolog of NCBI NO: 71633 NR Description: actin - Arabidopsis thaliana
  misc_feature (1)..(377): Homolog of NCBI NO: 11276975 NR Description: actin [imported] - upland cotton
  misc_feature (1)..(377): Homolog of NCBI NO: 11276977 NR Description: actin [imported] - Striga asiatica
  misc_feature (1)..(377): Homolog of NCBI NO: 231503 NR Description: ACTIN 97 >gi|100417|pir||S20098 actin 97 - potato
  misc_feature (1)..(377): Homolog of NCBI NO: 11276978 NR Description: actin ACT2 [imported] - Striga asiatica
  misc_feature (1)..(377): Homolog of NCBI NO: 23092520 NR Description: actin [Phalaenopsis hybrid cultivar]
  misc_feature (1)..(377): Homolog of NCBI NO: 15231447 NR Description: actin 12; protein id: At3g46520.1 [Arabidopsis
  misc_feature (1)..(377): Homolog of NCBI NO: 32186890 NR Description: actin [Gossypium hirsutum]

SEQ ID NO: 73473 - protein, 360 aa, Arabidopsis thaliana; identical to SEQ ID NO: 36004
  peptide (1)..(360): Ceres Seq. ID no. 4970498
  misc_feature (1)..(360): Pfam Name: Actin Pfam Description: Actin
  misc_feature (1)..(345): Homolog of NCBI NO: 11276980 NR Description: actin (ACT3) - Arabidopsis thaliana
  misc_feature (1)..(360): Homolog of NCBI NO: 18409908 NR Description: actin (ACT3); protein id: At3g53750.1, supported cDNA: 25785., supported by cDNA: gi_15146303 [Arabidopsis >gi|22326216|ref|NP_565867.2| actin 3; protein id: At2g37620.1,
  misc_feature (1)..(360): Homolog of NCBI NO: 71633 NR Description: actin - Arabidopsis thaliana
  misc_feature (1)..(360): Homolog of NCBI NO: 11276975 NR Description: actin [imported] - upland cotton
  misc_feature (1)..(360): Homolog of NCBI NO: 11276977 NR Description: actin [imported] - Striga asiatica
  misc_feature (1)..(360): Homolog of NCBI NO: 231503 NR Description: ACTIN 97 >gi|100417|pir||S20098 actin 97 - potato
  misc_feature (1)..(360): Homolog of NCBI NO: 11276978 NR Description: actin ACT2 [imported] - Striga asiatica
  misc_feature (1)..(360): Homolog of NCBI NO: 23092520 NR Description: actin [Phalaenopsis hybrid cultivar]
  misc_feature (1)..(360): Homolog of NCBI NO: 15231447 NR Description: actin 12; protein id: At3g46520.1 [Arabidopsis
  misc_feature (1)..(360): Homolog of NCBI NO: 32186890 NR Description: actin [Gossypium hirsutum]

SEQ ID NO: 73474 - protein, 332 aa, Arabidopsis thaliana; identical to SEQ ID NO: 36005
  peptide (1)..(332): Ceres Seq. ID no. 4970499
  misc_feature (1)..(332): Pfam Name: Actin Pfam Description: Actin
  misc_feature (1)..(317): Homolog of NCBI NO: 11276980 NR Description: actin (ACT3) - Arabidopsis thaliana
  misc_feature (1)..(332): Homolog of NCBI NO: 18409908 NR Description: actin (ACT3); protein id: At3g53750.1, supported cDNA: 25785., supported by cDNA: gi_15146303 [Arabidopsis >gi|22326216|ref|NP_565867.2| actin 3; protein id: At2g37620.1,
  misc_feature (1)..(332): Homolog of NCBI NO: 71633 NR Description: actin - Arabidopsis thaliana
  misc_feature (1)..(332): Homolog of NCBI NO: 11276975 NR Description: actin [imported] - upland cotton
  misc_feature (1)..(332): Homolog of NCBI NO: 11276977 NR Description: actin [imported] - Striga asiatica
  misc_feature (1)..(332): Homolog of NCBI NO: 231503 NR Description: ACTIN 97 >gi|100417|pir||S20098 actin 97 - potato
  misc_feature (1)..(332): Homolog of NCBI NO: 11276978 NR Description: actin ACT2 [imported] - Striga asiatica
  misc_feature (1)..(332): Homolog of NCBI NO: 23092520 NR Description: actin [Phalaenopsis hybrid cultivar]
  misc_feature (1)..(332): Homolog of NCBI NO: 15231447 NR Description: actin 12; protein id: At3g46520.1 [Arabidopsis
  misc_feature (1)..(332): Homolog of NCBI NO: 32186890 NR Description: actin [Gossypium hirsutum]

SEQ ID NO: 73475 - DNA, 1130 bp, Arabidopsis thaliana
  misc_feature (1)..(1130): Ceres Seq. ID no. 4970520
  misc_feature: MA Experiment ID: 108434 Result: Up-regulated in Transcription
  misc_feature: MA Experiment 108434 PARAMETER Experiment Name: At_Root_Tips_cDNA_P Parameter: Tissue Value: Root Tips
  misc_feature: MA Experiment ID: 108462 Result: Up-regulated in Transcription
  misc_feature: MA Experiment 108462 PARAMETER Experiment Name: At_Germinating_Seeds_cDNA_P Parameter: Age (day) Value: 2 vs. 0
  misc_feature: MA Experiment 108462 PARAMETER Experiment Name: At_Germinating_Seeds_cDNA_P Parameter: Tissue Value: Germinating Seeds
  misc_feature: MA Experiment ID: 20000179 Result: Up-regulated in Transcription
  misc_feature: MA Experiment 20000179 PARAMETER Experiment Name: At_Germinating_Seeds_P Parameter: Age (hr) Value: 6 vs. 0
  misc_feature: MA Experiment 20000179 PARAMETER Experiment Name: At_Germinating_Seeds_P Parameter: Tissue Value: Germinating Seeds
  misc_feature: MA Experiment ID: 20000185 Result: Up-regulated in Transcription
  misc_feature: MA Experiment 20000185 PARAMETER Experiment Name: At_Roots__P Parameter: Age (day) Value: 7 vs. 21
  misc_feature: MA Experiment 20000185 PARAMETER Experiment Name: At_Roots__P Parameter: Organism Value: A. thaliana
  misc_feature: MA Experiment 20000185 PARAMETER Experiment Name: At_Roots__P Parameter: Tissue Value: Roots vs. Whole Plant
  misc_feature: MA Experiment ID: 20000227 Result: Up-regulated in Transcription
  misc_feature: MA Experiment 20000227 PARAMETER Experiment Name: At_Root-Tips-vs-Tops_P Parameter: Tissue Value: Root Tips vs. Root Tops
  misc_feature: MA Experiment ID: 20000234 Result: Up-regulated in Transcription
  misc_feature: MA Experiment 20000234 PARAMETER Experiment Name: At_Siliques_P Parameter: Age (day) Value: 21
  misc_feature: MA Experiment 20000234 PARAMETER Experiment Name: At_Siliques_P Parameter: Organism Value: A. thaliana
  misc_feature: MA Experiment 20000234 PARAMETER Experiment Name: At_Siliques_P Parameter: Plant Line Value: WS
  misc_feature: MA Experiment 20000234 PARAMETER Experiment Name: At_Siliques_P Parameter: Tissue Value: Less Than 5mm Siliques vs. Whole Plant
  misc_feature: MA Experiment ID: 20000439 Result: Up-regulated in Transcription
  misc_feature: MA Experiment 20000439 PARAMETER Experiment Name: At_Roots__P Parameter: Age (day) Value: 14 vs. 21
  misc_feature: MA Experiment 20000439 PARAMETER Experiment Name: At_Roots__P Parameter: Organism Value: A. thaliana
  misc_feature: MA Experiment 20000439 PARAMETER Experiment Name: At_Roots__P Parameter: Tissue Value: Roots vs. Whole Plant
  misc_feature: Pfam Name: Aldo_ket_red Pfam Description: Aldo/keto reductase family
acaaacctcctccgtctttcgtaaaaggttctcgagatctaagtctcacttctaaagctctgacaatggcggacgaaatcggattcttccaactcaacaccggagcaaagatcccatcggttggtctcgggacatggcaagctgctcctggcgtcgttggagacgccgtcgccgccgctgtgaagattggatatcagcatattgattgtgcttcaagatatggcaatgaaattgagattgggaaagttctgaagaagttgtttgatgatggcgtagtgaagcgtgagaagctgttcatcacatcaaaaatctggttgactgatcttgaccctccggatgtacaggacgcattgaacagaactcttcaggatctgcagcttgattatgttgatttgtatctcatgcactggcctgttcggttgaagaaaggtactgttgactttaagcctgagaacattatgcctatcgatattccgagcacatggaaagcaatggaagcactggttgattcaggcaaggcaagagccattggcgtaagtaatttctctacaaagaaactctcagatcttgtggaggctgctcgtgttcctcccgctgtaaaccaggtggaatgtcatccttcatggcaacaacataagctacatgagttttgcaagtccaaagggatccacctctcaggatattcgccattgggatctcctggaacaacgtgggtgaaggccgatgttttaaagagtccggttattgaaatgattgctaaagaaatcgggaagtctcccgcacaaaccgcgcttcgatggggacttcaaatgggtcatagtatacttcccaaaagcacaaatgaaggaagaatcagagagaactttgatgtcttgggatggtctattccaaaagaaatgtttgacaagttttccaagatagagcaggctaggttagtccaaggcacgtcgtttgttcatgagacgttgagtccttataaaacacttgaagagctttgggatggtgagatctgaatcaaaagatgtcttttgttgaattttaaagttgaaaaagaacaaagttccactgctttaagctttgatcgagaatgtgtaaacgattcaattttcaataaaagtaggattttgcag

SEQ ID NO: 73476 - protein, 336 aa, Arabidopsis thaliana; identical to SEQ ID NO: 41268
  peptide (1)..(336): Ceres Seq. ID no. 4970521
  misc_feature: Pfam Name: Aldo_ket_red Pfam Description: Aldo/keto reductase family
  misc_feature (22)..(336): Homolog of NCBI NO: 15232354 NR Description: aldo/keto reductase family; protein id: supported by cDNA: 119862. [Arabidopsis thaliana]
  misc_feature (22)..(336): Homolog of NCBI NO: 30687247 NR Description: aldo/keto reductase family [Arabidopsis thaliana]
  misc_feature (33)..(336): Homolog of NCBI NO: 28393400 NR Description: putative aldo/keto reductase [Arabidopsis
  misc_feature (22)..(336): Homolog of NCBI NO: 30687261 NR Description: aldo/keto reductase family [Arabidopsis thaliana]
  misc_feature (22)..(309): Homolog of NCBI NO: 25283479 NR Description: probable alcohol dehydrogenase [imported] -
  misc_feature (308)..(336): Homolog of NCBI NO: 25283479 NR Description: probable alcohol dehydrogenase [imported] -
  misc_feature (22)..(310): Homolog of NCBI NO: 7431114 NR Description: aldehyde dehydrogenase homolog At2g37770 - thaliana >gi|3236259|gb|AAC23647.1| putative alcohol
  misc_feature (22)..(336): Homolog of NCBI NO: 7431112 NR Description: abscisic acid activated protein - alfalfa
  misc_feature (22)..(336): Homolog of NCBI NO: 13160397 NR Description: aldose reductase [Digitalis purpurea]
  misc_feature (22)..(336): Homolog of NCBI NO: 13160399 NR Description: aldose reductase [Digitalis purpurea]

SEQ ID NO: 73477 - protein, 315 aa, Arabidopsis thaliana; identical to SEQ ID NO: 41269
  peptide (1)..(315): Ceres Seq. ID no. 4970522
  misc_feature: Pfam Name: Aldo_ket_red Pfam Description: Aldo/keto reductase family
  misc_feature (1)..(315): Homolog of NCBI NO: 15232354 NR Description: aldo/keto reductase family; protein id: supported by cDNA: 119862. [Arabidopsis thaliana]
  misc_feature (1)..(315): Homolog of NCBI NO: 30687247 NR Description: aldo/keto reductase family [Arabidopsis thaliana]
  misc_feature (12)..(315): Homolog of NCBI NO: 28393400 NR Description: putative aldo/keto reductase [Arabidopsis
  misc_feature (1)..(315): Homolog of NCBI NO: 30687261 NR Description: aldo/keto reductase family [Arabidopsis thaliana]
  misc_feature (1)..(288): Homolog of NCBI NO: 25283479 NR Description: probable alcohol dehydrogenase [imported] -
  misc_feature (287)..(315): Homolog of NCBI NO: 25283479 NR Description: probable alcohol dehydrogenase [imported] -
  misc_feature (1)..(289): Homolog of NCBI NO: 7431114 NR Description: aldehyde dehydrogenase homolog At2g37770 - thaliana >gi|3236259|gb|AAC23647.1| putative alcohol
  misc_feature (1)..(315): Homolog of NCBI NO: 7431112 NR Description: abscisic acid activated protein - alfalfa
  misc_feature (1)..(315): Homolog of NCBI NO: 13160397 NR Description: aldose reductase [Digitalis purpurea]
  misc_feature (1)..(315): Homolog of NCBI NO: 13160399 NR Description: aldose reductase [Digitalis purpurea]

SEQ ID NO: 73478 - protein, 203 aa, Arabidopsis thaliana; identical to SEQ ID NO: 41270
  peptide (1)..(203): Ceres Seq. ID no. 4970523
  misc_feature: Pfam Name: Aldo_ket_red Pfam Description: Aldo/keto reductase family
  misc_feature (1)..(203): Homolog of NCBI NO: 15232354 NR Description: aldo/keto reductase family; protein id: supported by cDNA: 119862. [Arabidopsis thaliana]
  misc_feature (1)..(203): Homolog of NCBI NO: 30687247 NR Description: aldo/keto reductase family [Arabidopsis thaliana]
  misc_feature (1)..(203): Homolog of NCBI NO: 28393400 NR Description: putative aldo/keto reductase [Arabidopsis
  misc_feature (1)..(203): Homolog of NCBI NO: 30687261 NR Description: aldo/keto reductase family [Arabidopsis thaliana]
  misc_feature (1)..(176): Homolog of NCBI NO: 25283479 NR Description: probable alcohol dehydrogenase [imported] -
  misc_feature (175)..(203): Homolog of NCBI NO: 25283479 NR Description: probable alcohol dehydrogenase [imported] -
  misc_feature (1)..(177): Homolog of NCBI NO: 7431114 NR Description: aldehyde dehydrogenase homolog At2g37770 - thaliana >gi|3236259|gb|AAC23647.1| putative alcohol
  misc_feature (1)..(203): Homolog of NCBI NO: 7431112 NR Description: abscisic acid activated protein - alfalfa
  misc_feature (1)..(203): Homolog of NCBI NO: 13160397 NR Description: aldose reductase [Digitalis purpurea]
  misc_feature (1)..(203): Homolog of NCBI NO: 13160399 NR Description: aldose reductase [Digitalis purpurea]

SEQ ID NO: 73479 - DNA, 651 bp, Arabidopsis thaliana
  misc_feature (1)..(651): Ceres Seq. ID no. 4970620
  misc_feature: MA Experiment ID: 108434 Result: Down-regulated in Transcription
  misc_feature: MA Experiment 108434 PARAMETER Experiment Name: At_Root_Tips_cDNA_P Parameter: Tissue Value: Root Tips
  misc_feature: MA Experiment ID: 108435 Result: Down-regulated in Transcription
  misc_feature: MA Experiment 108435 PARAMETER Experiment Name: At_stm_Mutants_cDNA_P Parameter: Plant Line Value: wt Landsburg vs stm
  misc_feature: MA Experiment 108435 PARAMETER Experiment Name: At_stm_Mutants_cDNA_P Parameter: Tissue Value: Shoot Apical Meristem Region
  misc_feature: MA Experiment ID: 108461 Result: Up-regulated in Transcription
  misc_feature: MA Experiment 108461 PARAMETER Experiment Name: At_Germinating_Seeds_cDNA_P Parameter: Age (day) Value: 1 vs. 0
  misc_feature: MA Experiment 108461 PARAMETER Experiment Name: At_Germinating_Seeds_cDNA_P Parameter: Tissue Value: Germinating Seeds
  misc_feature: MA Experiment ID: 108462 Result: Up-regulated in Transcription
  misc_feature: MA Experiment 108462 PARAMETER Experiment Name: At_Germinating_Seeds_cDNA_P Parameter: Age (day) Value: 2 vs. 0
  misc_feature: MA Experiment 108462 PARAMETER Experiment Name: At_Germinating_Seeds_cDNA_P Parameter: Tissue Value: Germinating Seeds
  misc_feature: MA Experiment ID: 108464 Result: Up-regulated in Transcription
  misc_feature: MA Experiment 108464 PARAMETER Experiment Name: At_Germinating_Seeds_cDNA_P Parameter: Age (day) Value: 4 vs. 0
  misc_feature: MA Experiment 108464 PARAMETER Experiment Name: At_Germinating_Seeds_cDNA_P Parameter: Tissue Value: Germinating Seeds
  misc_feature: MA Experiment ID: 108501 Result: Down-regulated in Transcription
  misc_feature: MA Experiment 108501 PARAMETER Experiment Name: At_ap2_floral_buds_cDNA_P Parameter: Plant Line Value: ap2 (Ler.)
  misc_feature: MA Experiment 108501 PARAMETER Experiment Name: At_ap2_floral_buds_cDNA_P Parameter: Tissue Value: Closed Flower
  misc_feature: MA Experiment ID: 108577 Result: Down-regulated in Transcription
  misc_feature: MA Experiment 108577 PARAMETER Experiment Name: At_42deg_Heat_cDNA_P Parameter: Temperature (deg C) Value: 42 vs. 22
  misc_feature: MA Experiment 108577 PARAMETER Experiment Name: At_42deg_Heat_cDNA_P Parameter: Timepoint (hr) Value: 6
  misc_feature: MA Experiment 108577 PARAMETER Experiment Name: At_42deg_Heat_cDNA_P Parameter: Tissue Value: Aerial
  misc_feature: MA Experiment ID: 108607 Result: Up-regulated in Transcription
  misc_feature: MA Experiment 108607 PARAMETER Experiment Name: At_100uM_ABA_cDNA_P Parameter: Timepoint (hr) Value: 4
  misc_feature: MA Experiment 108607 PARAMETER Experiment Name: At_100uM_ABA_cDNA_P Parameter: Tissue Value: Aerial
  misc_feature: MA Experiment 108607 PARAMETER Experiment Name: At_100uM_ABA_cDNA_P Parameter: Treatment Value: 100uM ABA vs. No Treatment
  misc_feature: MA Experiment ID: 20000072 Result: Up-regulated in Transcription
  misc_feature: MA Experiment 20000072 PARAMETER Experiment Name: At_100uM_ABA_Mutants_cDNA_P Parameter: Plant Line Value: CS8105
  misc_feature: MA Experiment 20000072 PARAMETER Experiment Name: At_100uM_ABA_Mutants_cDNA_P Parameter: Timepoint (hr) Value: 6
  misc_feature: MA Experiment 20000072 PARAMETER Experiment Name: At_100uM_ABA_Mutants_cDNA_P Parameter: Tissue Value: Aerial
  misc_feature: MA Experiment 20000072 PARAMETER Experiment Name: At_100uM_ABA_Mutants_cDNA_P Parameter: Treatment Value: 100uM ABA vs. No Treatment
  misc_feature: MA Experiment ID: 20000087 Result: Up-regulated in Transcription
  misc_feature: MA Experiment 20000087 PARAMETER Experiment Name: At_100uM_ABA_Mutants_cDNA_P Parameter: Plant Line Value: WS
  misc_feature: MA Experiment 20000087 PARAMETER Experiment Name: At_100uM_ABA_Mutants_cDNA_P Parameter: Timepoint (hr) Value: 6
  misc_feature: MA Experiment 20000087 PARAMETER Experiment Name: At_100uM_ABA_Mutants_cDNA_P Parameter: Tissue Value: Aerial
  misc_feature: MA Experiment 20000087 PARAMETER Experiment Name: At_100uM_ABA_Mutants_cDNA_P Parameter: Treatment Value: 100uM ABA vs. No Treatment
  misc_feature: MA Experiment ID: 20000111 Result: Down-regulated in Transcription
  misc_feature: MA Experiment 20000111 PARAMETER Experiment Name: At_42deg_Heat_cDNA_P Parameter: Temperature (deg C) Value: 42 vs. 22
  misc_feature: MA Experiment 20000111 PARAMETER Experiment Name: At_42deg_Heat_cDNA_P Parameter: Timepoint (hr) Value: 6
  misc_feature: MA Experiment 20000111 PARAMETER Experiment Name: At_42deg_Heat_cDNA_P Parameter: Tissue Value: Aerial
  misc_feature: MA Experiment ID: 20000112 Result: Down-regulated in Transcription
  misc_feature: MA Experiment 20000112 PARAMETER Experiment Name: At_42deg_Heat_cDNA_P Parameter: Temperature (deg C) Value: 42 vs. 22
  misc_feature: MA Experiment 20000112 PARAMETER Experiment Name: At_42deg_Heat_cDNA_P Parameter: Timepoint (hr) Value: 2
  misc_feature: MA Experiment 20000112 PARAMETER Experiment Name: At_42deg_Heat_cDNA_P Parameter: Tissue Value: Aerial
  misc_feature: MA Experiment ID: 20000113 Result: Down-regulated in Transcription
  misc_feature: MA Experiment 20000113 PARAMETER Experiment Name: At_42deg_Heat_cDNA_P Parameter: Temperature (deg C) Value: 42 vs. 22
  misc_feature: MA Experiment 20000113 PARAMETER Experiment Name: At_42deg_Heat_cDNA_P Parameter: Timepoint (hr) Value: 8
  misc_feature: MA Experiment 20000113 PARAMETER Experiment Name: At_42deg_Heat_cDNA_P Parameter: Tissue Value: Aerial
  misc_feature: MA Experiment ID: 20000117 Result: Up-regulated in Transcription
  misc_feature: MA Experiment 20000117 PARAMETER Experiment Name: At_100uM_ABA_Mutants_cDNA_P Parameter: Plant Line Value: Columbia
  misc_feature: MA Experiment 20000117 PARAMETER Experiment Name: At_100uM_ABA_Mutants_cDNA_P Parameter: Timepoint (hr) Value: 6
  misc_feature: MA Experiment 20000117 PARAMETER Experiment Name: At_100uM_ABA_Mutants_cDNA_P Parameter: Tissue Value: Aerial
  misc_feature: MA Experiment 20000117 PARAMETER Experiment Name: At_100uM_ABA_Mutants_cDNA_P Parameter: Treatment Value: 100uM ABA vs. No Treatment
  misc_feature: MA Experiment ID: 20000144 Result: Down-regulated in Transcription
  misc_feature: MA Experiment 20000144 PARAMETER Experiment Name: At_42deg_Heat_cDNA_P Parameter: Temperature (deg C) Value: 42 vs. 22
  misc_feature: MA Experiment 20000144 PARAMETER Experiment Name: At_42deg_Heat_cDNA_P Parameter: Timepoint (hr) Value: 1
  misc_feature: MA Experiment 20000144 PARAMETER Experiment Name: At_42deg_Heat_cDNA_P Parameter: Tissue Value: Aerial
  misc_feature: MA Experiment ID: 20000234 Result: Down-regulated in Transcription
  misc_feature: MA Experiment 20000234 PARAMETER Experiment Name: At_Siliques_P Parameter: Age (day) Value: 21
  misc_feature: MA Experiment 20000234 PARAMETER Experiment Name: At_Siliques_P Parameter: Organism Value: A. thaliana
  misc_feature: MA Experiment 20000234 PARAMETER Experiment Name: At_Siliques_P Parameter: Plant Line Value: WS
  misc_feature: MA Experiment 20000234 PARAMETER Experiment Name: At_Siliques_P Parameter: Tissue Value: Less Than 5mm Siliques vs. Whole Plant
  misc_feature: MA Experiment ID: 20000235 Result: Down-regulated in Transcription
  misc_feature: MA Experiment 20000235 PARAMETER Experiment Name: At_Siliques_P Parameter: Age (day) Value: 21
  misc_feature: MA Experiment 20000235 PARAMETER Experiment Name: At_Siliques_P Parameter: Organism Value: A. thaliana
  misc_feature: MA Experiment 20000235 PARAMETER Experiment Name: At_Siliques_P Parameter: Plant Line Value: WS
  misc_feature: MA Experiment 20000235 PARAMETER Experiment Name: At_Siliques_P Parameter: Tissue Value: 5-10mm Siliques vs. Whole Plant
  misc_feature: MA Experiment ID: 20001247 Result: Up-regulated in Transcription
  misc_feature: MA Experiment 20001247 PARAMETER Experiment Name: At_Far-red-induction_P Parameter: Age (day) Value: 7
  misc_feature: MA Experiment 20001247 PARAMETER Experiment Name: At_Far-red-induction_P Parameter: Light Value: Far-red vs. White
  misc_feature: MA Experiment 20001247 PARAMETER Experiment Name: At_Far-red-induction_P Parameter: Organism Value: A. thaliana
  misc_feature: MA Experiment 20001247 PARAMETER Experiment Name: At_Far-red-induction_P Parameter: Plant Line Value: Columbia
  misc_feature: MA Experiment 20001247 PARAMETER Experiment Name: At_Far-red-induction_P Parameter: Timepoint (hr) Value: 1
  misc_feature: MA Experiment 20001247 PARAMETER Experiment Name: At_Far-red-induction_P Parameter: Tissue Value: Whole Plant
  misc_feature: MA Experiment ID: 20001248 Result: Up-regulated in Transcription
  misc_feature: MA Experiment 20001248 PARAMETER Experiment Name: At_Far-red-induction_P Parameter: Age (day) Value: 7
  misc_feature: MA Experiment 20001248 PARAMETER Experiment Name: At_Far-red-induction_P Parameter: Light Value: Far-red vs. White
  misc_feature: MA Experiment 20001248 PARAMETER Experiment Name: At_Far-red-induction_P Parameter: Organism Value: A. thaliana
  misc_feature: MA Experiment 20001248 PARAMETER Experiment Name: At_Far-red-induction_P Parameter: Plant Line Value: Columbia
  misc_feature: MA Experiment 20001248 PARAMETER Experiment Name: At_Far-red-induction_P Parameter: Timepoint (hr) Value: 4
  misc_feature: MA Experiment 20001248 PARAMETER Experiment Name: At_Far-red-induction_P Parameter: Tissue Value: Whole Plant
  misc_feature: MA Experiment ID: 20001450 Result: Up-regulated in Transcription
  misc_feature: MA Experiment 20001450 PARAMETER Experiment Name: At_Far-red-induction_P Parameter: Age (day) Value: 7
  misc_feature: MA Experiment 20001450 PARAMETER Experiment Name: At_Far-red-induction_P Parameter: Light Value: Far-red vs. White
  misc_feature: MA Experiment 20001450 PARAMETER Experiment Name: At_Far-red-induction_P Parameter: Organism Value: A. thaliana
  misc_feature: MA Experiment 20001450 PARAMETER Experiment Name: At_Far-red-induction_P Parameter: Plant Line Value: Columbia
  misc_feature: MA Experiment 20001450 PARAMETER Experiment Name: At_Far-red-induction_P Parameter: Timepoint (hr) Value: 8
  misc_feature: MA Experiment 20001450 PARAMETER Experiment Name: At_Far-red-induction_P Parameter: Tissue Value: Whole Plant
  misc_feature: MA Experiment ID: 20001560 Result: Down-regulated in Transcription
  misc_feature: MA Experiment 20001560 PARAMETER Experiment Name: At_Drought_Soil_Dry_P Parameter: Age (day) Value: 28
  misc_feature: MA Experiment 20001560 PARAMETER Experiment Name: At_Drought_Soil_Dry_P Parameter: Organism Value: A. thaliana
  misc_feature: MA Experiment 20001560 PARAMETER Experiment Name: At_Drought_Soil_Dry_P Parameter: Plant Line Value: WS
  misc_feature: MA Experiment 20001560 PARAMETER Experiment Name: At_Drought_Soil_Dry_P Parameter: Post Timepoint (hr) Value: None
  misc_feature: MA Experiment 20001560 PARAMETER Experiment Name: At_Drought_Soil_Dry_P Parameter: Post-Treatment Value: None
  misc_feature: MA Experiment 20001560 PARAMETER Experiment Name: At_Drought_Soil_Dry_P Parameter: Timepoint (day) Value: 14
  misc_feature: MA Experiment 20001560 PARAMETER Experiment Name: At_Drought_Soil_Dry_P Parameter: Treatment Value: Drought vs. No Drought
atatttgaagttcgtggattttgaaggatttgattggtttccatgatctagagttttgagaatggcgatggtatcaggaagacgatctactctaaaccccgacgcacctctttttattccggcagctgtacgacaagtggaagatttctcaccggagtggtggcaattggtgacaacttcgacttggtaccctgattactggatcagtcagcagcagcaaggcgcggatggtttctatgacaacggagagaatgagaatggtggaggtcatatcgatgtagctgatcttcttccagaatcatttgattttgatgatatggaagatttctttgacactgatgctgctgagtttgatcaaggattcgatggaagaatgtattaccaagcaccttccgaatttggctttggaaagaatggtgagatggttaagaaatcaagtggaaacaggagcccgagatcgattgtggaaccagctaagtatgcggaaaagccagcgaaatggggaaaccagagggttgctgctgctccgagaaacatccaccagcctcgctgaagagatatgttgttaactagtcagagaagtcagagcagttcggtctgtgtatctttagccaccactgtacctttgtaatttttagtatttgcttccac

SEQ ID NO: 73480 - protein, 163 aa, Arabidopsis thaliana; identical to SEQ ID NO: 20801
  peptide (1)..(163): Ceres Seq. ID no. 4970621
  misc_feature (1)..(163): Homolog of NCBI NO: 15227351 NR Description: ERD15 protein; protein id: At2g41430.1, supported cDNA: 31388., supported by cDNA: gi_13926319, supported by cDNA: supported by cDNA: gi_17473678, supported by cDNA:
  misc_feature (1)..(163): Homolog of NCBI NO: 21592689 NR Description: ERD15 protein [Arabidopsis thaliana]
  misc_feature (1)..(163): Homolog of NCBI NO: 8489786 NR Description: dehydration-induced protein ERD15 [Lycopersicon
  misc_feature (9)..(163): Homolog of NCBI NO: 32352142 NR Description: hypothetical protein [Oryza sativa (japonica
  misc_feature (9)..(163): Homolog of NCBI NO: 34395186 NR Description: unknown protein [Oryza sativa (japonica
  misc_feature (9)..(163): Homolog of NCBI NO: 34899128 NR Description: P0496C02.30 [Oryza sativa (japonica
  misc_feature (2)..(82): Homolog of NCBI NO: 18414176 NR Description: Expressed protein; protein id: At4g14270.1, by cDNA: 30129., supported by cDNA: gi_15028002, supported by gi_20259214 [Arabidopsis thaliana] >gi|15028003|gb|AAK76532.1|
  misc_feature (2)..(58): Homolog of NCBI NO: 21592596 NR Description: unknown [Arabidopsis thaliana]

SEQ ID NO: 73481 - protein, 161 aa, Arabidopsis thaliana; identical to SEQ ID NO: 20802
  peptide (1)..(161): Ceres Seq. ID no. 4970622
  misc_feature (1)..(161): Homolog of NCBI NO: 15227351 NR Description: ERD15 protein; protein id: At2g41430.1, supported cDNA: 31388., supported by cDNA: gi_13926319, supported by cDNA: supported by cDNA: gi_17473678, supported by cDNA:
  misc_feature (1)..(161): Homolog of NCBI NO: 21592689 NR Description: ERD15 protein [Arabidopsis thaliana]
  misc_feature (1)..(161): Homolog of NCBI NO: 8489786 NR Description: dehydration-induced protein ERD15 [Lycopersicon
  misc_feature (7)..(161): Homolog of NCBI NO: 32352142 NR Description: hypothetical protein [Oryza sativa (japonica
  misc_feature (7)..(161): Homolog of NCBI NO: 34395186 NR Description: unknown protein [Oryza sativa (japonica
  misc_feature (7)..(161): Homolog of NCBI NO: 34899128 NR Description: P0496C02.30 [Oryza sativa (japonica
  misc_feature (1)..(80): Homolog of NCBI NO: 18414176 NR Description: Expressed protein; protein id: At4g14270.1, by cDNA: 30129., supported by cDNA: gi_15028002, supported by gi_20259214 [Arabidopsis thaliana] >gi|15028003|gb|AAK76532.1|
  misc_feature (1)..(56): Homolog of NCBI NO: 21592596 NR Description: unknown [Arabidopsis thaliana]

SEQ ID NO: 73482 - protein, 85 aa, Arabidopsis thaliana; identical to SEQ ID NO: 20803
  peptide (1)..(85): Ceres Seq. ID no. 4970623

SEQ ID NO: 73483 - DNA, 1375 bp, Arabidopsis thaliana
  misc_feature (1)..(1375): Ceres Seq. ID no. 4970740
  misc_feature: MA Experiment ID: 108461 Result: Up-regulated in Transcription
  misc_feature: MA Experiment 108461 PARAMETER Experiment Name: At_Germinating_Seeds_cDNA_P Parameter: Age (day) Value: 1 vs. 0
  misc_feature: MA Experiment 108461 PARAMETER Experiment Name: At_Germinating_Seeds_cDNA_P Parameter: Tissue Value: Germinating Seeds
  misc_feature: MA Experiment ID: 108569 Result: Up-regulated in Transcription
  misc_feature: MA Experiment 108569 PARAMETER Experiment Name: At_0.001%_MeJA__cDNA_P Parameter: Timepoint (hr) Value: 6
  misc_feature: MA Experiment 108569 PARAMETER Experiment Name: At_0.001%_MeJA__cDNA_P Parameter: Tissue Value: Aerial
  misc_feature: MA Experiment 108569 PARAMETER Experiment Name: At_0.001%_MeJA__cDNA_P Parameter: Treatment Value: 0.001% MeJA vs. No Treatment
  misc_feature: MA Experiment ID: 108585 Result: Up-regulated in Transcription
  misc_feature: MA Experiment 108585 PARAMETER Experiment Name: At_5mM_NaNP_cDNA_P Parameter: Timepoint (hr) Value: 6
  misc_feature: MA Experiment 108585 PARAMETER Experiment Name: At_5mM_NaNP_cDNA_P Parameter: Tissue Value: Aerial
  misc_feature: MA Experiment 108585 PARAMETER Experiment Name: At_5mM_NaNP_cDNA_P Parameter: Treatment Value: null
  misc_feature: MA Experiment ID: 20000180 Result: Up-regulated in Transcription
  misc_feature: MA Experiment 20000180 PARAMETER Experiment Name: At_Germinating_Seeds_P Parameter: Age (hr) Value: 24 vs. 0
  misc_feature: MA Experiment 20000180 PARAMETER Experiment Name: At_Germinating_Seeds_P Parameter: Tissue Value: Germinating Seeds
  misc_feature: MA Experiment ID: 20000184 Result: Up-regulated in Transcription
  misc_feature: MA Experiment 20000184 PARAMETER Experiment Name: At_Shoots__P Parameter: Age (day) Value: 7
  misc_feature: MA Experiment 20000184 PARAMETER Experiment Name: At_Shoots__P Parameter: Tissue Value: Shoots vs. Whole Plant
  misc_feature: MA Experiment ID: 20000185 Result: Up-regulated in Transcription
  misc_feature: MA Experiment 20000185 PARAMETER Experiment Name: At_Roots__P Parameter: Age (day) Value: 7 vs. 21
  misc_feature: MA Experiment 20000185 PARAMETER Experiment Name: At_Roots__P Parameter: Organism Value: A. thaliana
  misc_feature: MA Experiment 20000185 PARAMETER Experiment Name: At_Roots__P Parameter: Tissue Value: Roots vs. Whole Plant
  misc_feature: MA Experiment ID: 20000234 Result: Up-regulated in Transcription
  misc_feature: MA Experiment 20000234 PARAMETER Experiment Name: At_Siliques_P Parameter: Age (day) Value: 21
  misc_feature: MA Experiment 20000234 PARAMETER Experiment Name: At_Siliques_P Parameter: Organism Value: A. thaliana
  misc_feature: MA Experiment 20000234 PARAMETER Experiment Name: At_Siliques_P Parameter: Plant Line Value: WS
  misc_feature: MA Experiment 20000234 PARAMETER Experiment Name: At_Siliques_P Parameter: Tissue Value: Less Than 5mm Siliques vs. Whole Plant
  misc_feature: MA Experiment ID: 20000235 Result: Up-regulated in Transcription
  misc_feature: MA Experiment 20000235 PARAMETER Experiment Name: At_Siliques_P Parameter: Age (day) Value: 21
  misc_feature: MA Experiment 20000235 PARAMETER Experiment Name: At_Siliques_P Parameter: Organism Value: A. thaliana
  misc_feature: MA Experiment 20000235 PARAMETER Experiment Name: At_Siliques_P Parameter: Plant Line Value: WS
  misc_feature: MA Experiment 20000235 PARAMETER Experiment Name: At_Siliques_P Parameter: Tissue Value: 5-10mm Siliques vs. Whole Plant
  misc_feature: MA Experiment ID: 20000264 Result: Up-regulated in Transcription
  misc_feature: MA Experiment 20000264 PARAMETER Experiment Name: At_Open_Flower_P Parameter: Age (day) Value: 21
  misc_feature: MA Experiment 20000264 PARAMETER Experiment Name: At_Open_Flower_P Parameter: Plant Line Value: WS
  misc_feature: MA Experiment 20000264 PARAMETER Experiment Name: At_Open_Flower_P Parameter: Tissue Value: Open Flower vs. Whole Plant
  misc_feature: MA Experiment ID: 20000265 Result: Up-regulated in Transcription
  misc_feature: MA Experiment 20000265 PARAMETER Experiment Name: At_Open_Flower_P Parameter: Age (day) Value: 21
  misc_feature: MA Experiment 20000265 PARAMETER Experiment Name: At_Open_Flower_P Parameter: Plant Line Value: WS
  misc_feature: MA Experiment 20000265 PARAMETER Experiment Name: At_Open_Flower_P Parameter: Tissue Value: Closed Flower vs. Whole Plant
  misc_feature: MA Experiment ID: 20000286 Result: Up-regulated in Transcription
  misc_feature: MA Experiment 20000286 PARAMETER Experiment Name: At_Open_Flower_P Parameter: Age (day) Value: 21
  misc_feature: MA Experiment 20000286 PARAMETER Experiment Name: At_Open_Flower_P Parameter: Plant Line Value: WS
  misc_feature: MA Experiment 20000286 PARAMETER Experiment Name: At_Open_Flower_P Parameter: Tissue Value: Half Open vs. Whole Plant
  misc_feature: MA Experiment ID: 20000439 Result: Up-regulated in Transcription
  misc_feature: MA Experiment 20000439 PARAMETER Experiment Name: At_Roots__P Parameter: Age (day) Value: 14 vs. 21
  misc_feature: MA Experiment 20000439 PARAMETER Experiment Name: At_Roots__P Parameter: Organism Value: A. thaliana
  misc_feature: MA Experiment 20000439 PARAMETER Experiment Name: At_Roots__P Parameter: Tissue Value: Roots vs. Whole Plant
  misc_feature: MA Experiment ID: 20001451 Result: Down-regulated in Transcription
  misc_feature: MA Experiment 20001451 PARAMETER Experiment Name: At_Far-red-induction_P Parameter: Age (day) Value: 7
  misc_feature: MA Experiment 20001451 PARAMETER Experiment Name: At_Far-red-induction_P Parameter: Light Value: Far-red vs. White
  misc_feature: MA Experiment 20001451 PARAMETER Experiment Name: At_Far-red-induction_P Parameter: Organism Value: A. thaliana
  misc_feature: MA Experiment 20001451 PARAMETER Experiment Name: At_Far-red-induction_P Parameter: Plant Line Value: Columbia
  misc_feature: MA Experiment 20001451 PARAMETER Experiment Name: At_Far-red-induction_P Parameter: Timepoint (hr) Value: 24
  misc_feature: MA Experiment 20001451 PARAMETER Experiment Name: At_Far-red-induction_P Parameter: Tissue Value: Whole Plant
  misc_feature: MA Experiment ID: 20001557 Result: Up-regulated in Transcription
  misc_feature: MA Experiment 20001557 PARAMETER Experiment Name: At_Drought_Soil_Dry_P Parameter: Age (day) Value: 27
  misc_feature: MA Experiment 20001557 PARAMETER Experiment Name: At_Drought_Soil_Dry_P Parameter: Organism Value: A. thaliana
  misc_feature: MA Experiment 20001557 PARAMETER Experiment Name: At_Drought_Soil_Dry_P Parameter: Plant Line Value: WS
  misc_feature: MA Experiment 20001557 PARAMETER Experiment Name: At_Drought_Soil_Dry_P Parameter: Post Timepoint (hr) Value: 3
  misc_feature: MA Experiment 20001557 PARAMETER Experiment Name: At_Drought_Soil_Dry_P Parameter: Post-Treatment Value: Re-Water vs. No Drought
  misc_feature: MA Experiment 20001557 PARAMETER Experiment Name: At_Drought_Soil_Dry_P Parameter: Timepoint (day) Value: 13
  misc_feature: MA Experiment 20001557 PARAMETER Experiment Name: At_Drought_Soil_Dry_P Parameter: Treatment Value: Drought vs. No Drought
  misc_feature: MA Experiment ID: 20001558 Result: Up-regulated in Transcription
  misc_feature: MA Experiment 20001558 PARAMETER Experiment Name: At_Drought_Soil_Dry_P Parameter: Age (day) Value: 27
  misc_feature: MA Experiment 20001558 PARAMETER Experiment Name: At_Drought_Soil_Dry_P Parameter: Organism Value: A. thaliana
  misc_feature: MA Experiment 20001558 PARAMETER Experiment Name: At_Drought_Soil_Dry_P Parameter: Plant Line Value: WS
  misc_feature: MA Experiment 20001558 PARAMETER Experiment Name: At_Drought_Soil_Dry_P Parameter: Post Timepoint (hr) Value: 6
  misc_feature: MA Experiment 20001558 PARAMETER Experiment Name: At_Drought_Soil_Dry_P Parameter: Post-Treatment Value: Re-Water vs. No Drought
  misc_feature: MA Experiment 20001558 PARAMETER Experiment Name: At_Drought_Soil_Dry_P Parameter: Timepoint (day) Value: 13
  misc_feature: MA Experiment 20001558 PARAMETER Experiment Name: At_Drought_Soil_Dry_P Parameter: Treatment Value: Drought vs. No Drought
  misc_feature: MA Experiment ID: 20001560 Result: Up-regulated in Transcription
  misc_feature: MA Experiment 20001560 PARAMETER Experiment Name: At_Drought_Soil_Dry_P Parameter: Age (day) Value: 28
  misc_feature: MA Experiment 20001560 PARAMETER Experiment Name: At_Drought_Soil_Dry_P Parameter: Organism Value: A. thaliana
  misc_feature: MA Experiment 20001560 PARAMETER Experiment Name: At_Drought_Soil_Dry_P Parameter: Plant Line Value: WS
  misc_feature: MA Experiment 20001560 PARAMETER Experiment Name: At_Drought_Soil_Dry_P Parameter: Post Timepoint (hr) Value: None
  misc_feature: MA Experiment 20001560 PARAMETER Experiment Name: At_Drought_Soil_Dry_P Parameter: Post-Treatment Value: None
  misc_feature: MA Experiment 20001560 PARAMETER Experiment Name: At_Drought_Soil_Dry_P Parameter: Timepoint (day) Value: 14
  misc_feature: MA Experiment 20001560 PARAMETER Experiment Name: At_Drought_Soil_Dry_P Parameter: Treatment Value: Drought vs. No Drought
  misc_feature: MA Experiment ID: 20001905 Result: Up-regulated in Transcription
  misc_feature: MA Experiment 20001905 PARAMETER Experiment Name: At_Drought_Reproduction_P Parameter: Age (day) Value: 40
  misc_feature: MA Experiment 20001905 PARAMETER Experiment Name: At_Drought_Reproduction_P Parameter: Organism Value: A. thaliana
  misc_feature: MA Experiment 20001905 PARAMETER Experiment Name: At_Drought_Reproduction_P Parameter: Plant Line Value: WS
  misc_feature: MA Experiment 20001905 PARAMETER Experiment Name: At_Drought_Reproduction_P Parameter: Timepoint (day) Value: 10
  misc_feature: MA Experiment 20001905 PARAMETER Experiment Name: At_Drought_Reproduction_P Parameter: Tissue Value: Rosettes
  misc_feature: MA Experiment 20001905 PARAMETER Experiment Name: At_Drought_Reproduction_P Parameter: Treatment Value: Drought vs. No Drought
ctcccatcacctccgatctcaaatctcacaatcttttctctccaaattctcttctctctgaatcaatccaatcatggttgagccggcgaacaccgttggaattccggtgaaccacatcccattgttgaaggatgagctcgatatcgtgatccccacgatccgtaacctcgatttcctggagatgtggaggccttttcttcagccttaccatctgattatcgtccaagatggagatccatcgaagaccattgctgtccctgaagggttcgattacgaactctacaacaggaacgacatcaaccgtatccttggtcctaaagcttcctgcatttccttcaaggactctgcttgtcgttgcttcggctacatggtctccaagaagaagtacatcttcactattgatgacgattgcttcgttgctaaggatccatctggaaaagctgtgaacgctcttgagcaacacatcaagaaccttctctgcccatcaactccatttttcttcaacaccttgtacgacccataccgtgaaggtgctgacttcgtccgtggataccctttcagtctccgtgagggtgtttccaccgctgtttcccacggtctgtggctcaacatccctgattacgatgcccctacccaacttgtgaagcctaaggaaaggaacacaagtatgtggatgctgtcatgaccatcccaaagggaactcttttccctatgtgtggtatgaacttggcctttgaccgtgagctcattggtccggctatgtactttggtctcatgggtgatggtcagcctattggtcgctacgacgatatgtgggctggatggtgtatcaaggtgatctgtgaccatttgggattgggagtgaagacaggtttgccctacatttaccacagcaaagccagcaacccgtttgtgaacttgaagaaggagtacaagggaatcttctggcaggaggatatcattcctttcttccagagcgcaaagctcacgaaagaagctgtgacagttcaacaatgctacatggagctgtccaagttggtgaaggagaagctaagccccattgatccttactttgacaagcttgcagatgctatggtcacttggattgaagcttgggatgagcttaacccacccactaaagcttgagcagcaaaaaaaccaccaccgcagttttggttattagctcaacatatcatctatcttctccgttttgtttttgttttgtcttttctcaaattttccggcgattcttcagttcgtttttaagttgccggagtttatttaaatagtgaatggtgtagttctatttatgaccgagacaatctctcttttgaggtttttcgtttttgtttcaataataaaaaatcatatccct

SEQ ID NO: 73484 - protein, 203 aa, Arabidopsis thaliana
  peptide (1)..(203): Ceres Seq. ID no. 4970741
  misc_feature (13)..(197): Pfam Name: Reversibly glycosylated polypeptide Pfam Description: Reversibly glycosylated polypeptide
  misc_feature (1)..(197): Homolog of NCBI NO: 15232865 NR Description: reversibly glycosylated polypeptide-1; protein
  misc_feature (1)..(197): Homolog of NCBI NO: 2317729 NR Description: reversibly glycosylated polypeptide-1
  misc_feature (1)..(197): Homolog of NCBI NO: 15242351 NR Description: reversibly glycosylated polypeptide-3; protein At5g15650.1, supported by cDNA: 35863., supported by cDNA: supported by cDNA: gi_2317730 [Arabidopsis thaliana]
  misc_feature (1)..(197): Homolog of NCBI NO: 2317731 NR Description: reversibly glycosylated polypeptide-2
  misc_feature (1)..(197): Homolog of NCBI NO: 21593071 NR Description: reversibly glycosylated polypeptide-3
  misc_feature (9)..(197): Homolog of NCBI NO: 34582499 NR Description: Alpha-1,4-glucan-protein synthase [UDP-forming] 2
  misc_feature (5)..(197): Homolog of NCBI NO: 4158221 NR Description: reversibly glycosylated polypeptide [Oryza sativa
  misc_feature (5)..(197): Homolog of NCBI NO: 34915190 NR Description: reversibly glycosylated polypeptide [Oryza sativa
  misc_feature (5)..(203): Homolog of NCBI NO: 4158232 NR Description: reversibly glycosylated polypeptide [Triticum
  misc_feature (5)..(196): Homolog of NCBI NO: 34588146 NR Description: Alpha-1,4-glucan-protein synthase [UDP-forming] glucose:protein transglucosylase) (UPTG) (Amylogenin) (Golgi
MVEPANTVGIPVNHIPLLKDELDIVIPTIRNLDFLEMWRPFLQPYHLIIVQDGDPSKTIAVPEGFDYELYNRNDINRILGPKASCISFKDSACRCFGYMVSKKKYIFTIDDDCFVAKDPSGKAVNALEQHIKNLLCPSTPFFFNTLYDPYREGADFVRGYPFSLREGVSTAVSHGLWLNIPDYDAPTQLVKPKERNTSMWMLS

SEQ ID NO: 73485 - protein, 167 aa, Arabidopsis thaliana
  peptide (1)..(167): Ceres Seq. ID no. 4970742
  misc_feature (1)..(161): Pfam Name: Reversibly glycosylated polypeptide Pfam Description: Reversibly glycosylated polypeptide
  misc_feature (1)..(161): Homolog of NCBI NO: 15232865 NR Description: reversibly glycosylated polypeptide-1; protein
  misc_feature (1)..(161): Homolog of NCBI NO: 2317729 NR Description: reversibly glycosylated polypeptide-1
  misc_feature (1)..(161): Homolog of NCBI NO: 15242351 NR Description: reversibly glycosylated polypeptide-3; protein At5g15650.1, supported by cDNA: 35863., supported by cDNA: supported by cDNA: gi_2317730 [Arabidopsis thaliana]
  misc_feature (1)..(161): Homolog of NCBI NO: 2317731 NR Description: reversibly glycosylated polypeptide-2
  misc_feature (1)..(161): Homolog of NCBI NO: 21593071 NR Description: reversibly glycosylated polypeptide-3
  misc_feature (1)..(161): Homolog of NCBI NO: 34582499 NR Description: Alpha-1,4-glucan-protein synthase [UDP-forming] 2
  misc_feature (1)..(161): Homolog of NCBI NO: 4158221 NR Description: reversibly glycosylated polypeptide [Oryza sativa
  misc_feature (1)..(161): Homolog of NCBI NO: 34915190 NR Description: reversibly glycosylated polypeptide [Oryza sativa
  misc_feature (1)..(167): Homolog of NCBI NO: 4158232 NR Description: reversibly glycosylated polypeptide [Triticum
  misc_feature (1)..(160): Homolog of NCBI NO: 34588146 NR Description: Alpha-1,4-glucan-protein synthase [UDP-forming] glucose:protein transglucosylase) (UPTG) (Amylogenin) (Golgi
MWRPFLQPYHLIIVQDGDPSKTIAVPEGFDYELYNRNDINRILGPKASCISFKDSACRCFGYMVSKKKYIFTIDDDCFVAKDPSGKAVNALEQHIKNLLCPSTPFFFNTLYDPYREGADFVRGYPFSLREGVSTAVSHGLWLNIPDYDAPTQLVKPKERNTSMWMLS

SEQ ID NO: 73486 - protein, 154 aa, Arabidopsis thaliana
  peptide (1)..(154): Ceres Seq. ID no. 4970743
  misc_feature (1)..(153): Pfam Name: Reversibly glycosylated polypeptide Pfam Description: Reversibly glycosylated polypeptide
  misc_feature (1)..(154): Homolog of NCBI NO: 15232865 NR Description: reversibly glycosylated polypeptide-1; protein
  misc_feature (1)..(154): Homolog of NCBI NO: 2317729 NR Description: reversibly glycosylated polypeptide-1
  misc_feature (1)..(151): Homolog of NCBI NO: 15242351 NR Description: reversibly glycosylated polypeptide-3; protein At5g15650.1, supported by cDNA: 35863., supported by cDNA: supported by cDNA: gi_2317730 [Arabidopsis thaliana]
  misc_feature (1)..(151): Homolog of NCBI NO: 2317731 NR Description: reversibly glycosylated polypeptide-2
  misc_feature (1)..(151): Homolog of NCBI NO: 21593071 NR Description: reversibly glycosylated polypeptide-3
  misc_feature (1)..(154): Homolog of NCBI NO: 34582499 NR Description: Alpha-1,4-glucan-protein synthase [UDP-forming] 2
  misc_feature (1)..(154): Homolog of NCBI NO: 4158221 NR Description: reversibly glycosylated polypeptide [Oryza sativa
  misc_feature (1)..(154): Homolog of NCBI NO: 34915190 NR Description: reversibly glycosylated polypeptide [Oryza sativa
  misc_feature (1)..(154): Homolog of NCBI NO: 4158232 NR Description: reversibly glycosylated polypeptide [Triticum
  misc_feature (1)..(154): Homolog of NCBI NO: 34588146 NR Description: Alpha-1,4-glucan-protein synthase [UDP-forming] glucose:protein transglucosylase) (UPTG) (Amylogenin) (Golgi
MTIPKGTLFPMCGMNLAFDRELIGPAMYFGLMGDGQPIGRYDDMWAGWCIKVICDHLGLGVKTGLPYIYHSKASNPFVNLKKEYKGIFWQEDIIPFFQSAKLTKEAVTVQQCYMELSKLVKEKLSPIDPYFDKLADAMVTWIEAWDELNPPTKA

SEQ ID NO: 73487 - DNA, 2201 bp, Arabidopsis thaliana
  misc_feature (1)..(2201): Ceres Seq. ID no. 4970861
  misc_feature: MA Experiment ID: 108462 Result: Down-regulated in Transcription
  misc_feature: MA Experiment 108462 PARAMETER Experiment Name: At_Germinating_Seeds_cDNA_P Parameter: Age (day) Value: 2 vs. 0
  misc_feature: MA Experiment 108462 PARAMETER Experiment Name: At_Germinating_Seeds_cDNA_P Parameter: Tissue Value: Germinating Seeds
  misc_feature: MA Experiment ID: 108463 Result: Down-regulated in Transcription
  misc_feature: MA Experiment 108463 PARAMETER Experiment Name: At_Germinating_Seeds_cDNA_P Parameter: Age (day) Value: 3 vs. 0
  misc_feature: MA Experiment 108463 PARAMETER Experiment Name: At_Germinating_Seeds_cDNA_P Parameter: Tissue Value: Germinating Seeds
  misc_feature: MA Experiment ID: 108464 Result: Down-regulated in Transcription
  misc_feature: MA Experiment 108464 PARAMETER Experiment Name: At_Germinating_Seeds_cDNA_P Parameter: Age (day) Value: 4 vs. 0
  misc_feature: MA Experiment 108464 PARAMETER Experiment Name: At_Germinating_Seeds_cDNA_P Parameter: Tissue Value: Germinating Seeds
  misc_feature: MA Experiment ID: 20001557 Result: Up-regulated in Transcription
  misc_feature: MA Experiment 20001557 PARAMETER Experiment Name: At_Drought_Soil_Dry_P Parameter: Age (day) Value: 27
  misc_feature: MA Experiment 20001557 PARAMETER Experiment Name: At_Drought_Soil_Dry_P Parameter: Organism Value: A. thaliana
  misc_feature: MA Experiment 20001557 PARAMETER Experiment Name: At_Drought_Soil_Dry_P Parameter: Plant Line Value: WS
  misc_feature: MA Experiment 20001557 PARAMETER Experiment Name: At_Drought_Soil_Dry_P Parameter: Post Timepoint (hr) Value: 3
  misc_feature: MA Experiment 20001557 PARAMETER Experiment Name: At_Drought_Soil_Dry_P Parameter: Post-Treatment Value: Re-Water vs. No Drought
  misc_feature: MA Experiment 20001557 PARAMETER Experiment Name: At_Drought_Soil_Dry_P Parameter: Timepoint (day) Value: 13
  misc_feature: MA Experiment 20001557 PARAMETER Experiment Name: At_Drought_Soil_Dry_P Parameter: Treatment Value: Drought vs. No Drought
  misc_feature: Pfam Name: IBB Pfam Description: Importin beta binding domain
gctttcattctttggatgcgctgttgtcaacttgtccctcgctgcctctgcttcttaactctttctttatcacttttccactcccaaatcaatttttaggttttttttataattataatttatttgctctcggcaggatctatataatacacagaccagtctttgcgtgtgcttgtgtgcattcattgatcgggtttatatcttttcatcggattttctttgtcgagcaagagccatgtcactgagacccaacgctaagacggaggttcgccggaaccgatacaaagttgcagtggatgcggaggaaggacgacggaggagagaagacaacatggttgagatccgtaaaagcaagcgtgaggagagtttgatgaagaagagacgtgaaggtatgcaagctcttcagggtttcccttcagcttccgccgcctccgtcgataagaagttggatagtctgaaggatatggtcgctggggtttggtccgatgaccctgccttgcagcttgagtccactactcagttcaggaagcttctctctattgagagaagtcctccaatcgaggaagtgataagtgctggtgttgttcctaggtttgttgagtttcttaagaaagaagattaccccgccattcagtttgaggcagcttgggctctaacaaacattgcatctggaacatcggatcacactaaggttgtaatcgatcacaatgctgttccaatctttgttcagcttcttgcttcccctagcgatgatgttcgtgaacaggctgtatgggctttgggtaacgttgctggtgattcaccacggtgccgtgatcttgttcttggatgtggggcactgcttccgctgctcaatcagcttaatgagcatgctaaattgtccatgcttcgaaatgccacttggaccttgtcaaacttctgtcgtggcaagcctcagcctcactttgaccaggtcaaacctgctcttcccgcccttgaacgactaattcattcagatgatgaagaagtcttgacagatgcctgttgggctctttcttacctctctgatgggaccaatgacaaaatccagactgtcatccaggccggtgttgtcccaaaacttgttgaacttctcctccatcattctccatctgtgctaattcctgctcttcgcactgttggaaatatagttactggagatgatatacaaacacagtgcgtgatcaatagtggtgctctaccttgtcttgccaacctgctcactcaaaaccataagaaaagcataaagaaggaagcttgctggacgatttcaaacatcacagcaggcaacaaagatcagatccagacggtagttgaggctaatttgatttccccgttggtgagtctgcttcaaaatgctgaatttgacattaagaaggaagctgcatgggcaatttcaaatgcaacttcaggtggttctcatgatcaaataaaatacctggtggagcaagggtgcataaaaccattatgcgatctcctggtttgcccagatccaagaatcataactgtctgccttgaaggattggaaaacattttgaaggtgggagaggcagagaagaacttgggtcacacaggagacatgaactattacgctcagctgattgatgatgcagaagggctagaaaagatcgagaaccttcagagccatgacaacaatgagatctatgagaaggctgttaaaattctggagacatactggcttgaagaggaagatgatgagacacagcaacctccaggtgttgatggttctcaggctgggttccagtttggagggaatcaagctccagtaccatccggaggattcaacttcagctgaaggtaaataaaagaatggaattggaagcttgcaacttgagaatggtgaaaggtcagagtcagtcagagtctagtttcactgccatggttatactccaggtctggtctggtctggtctcagaggtttgtaccgggtggtcggtttaaaagtacagcgtctgagaaagtgtttggttcattgtccagggctatttttttgaaatgactggtacaccggtcgtgagtcgacctttgtgttgtttttaaattttggagggttataaaaacttacagtggagtcttttgtttttgtgttgacaacagtttgtatgtcggttaaaaaattgaaaccataaaccctttattggtcttaatatgtttggtgtctg

SEQ ID NO: 73488 - protein, 532 aa, Arabidopsis thaliana; identical to SEQ ID NO: 28267
  peptide (1)..(532): Ceres Seq. ID no. 4970862
  misc_feature: Pfam Name: IBB Pfam Description: Importin beta binding domain
  misc_feature (1)..(532): Homolog of NCBI NO: 15230778 NR Description: importin alpha; protein id: At3g06720.2, by cDNA: 9351., supported by cDNA: gi_13699776, supported by gi_15809793, supported by cDNA: gi_20453047, supported by cDNA:
  misc_feature (1)..(532): Homolog of NCBI NO: 15809794 NR Description: AT3g06720/F3E22_14 [Arabidopsis thaliana]
  misc_feature (1)..(532): Homolog of NCBI NO: 25314876 NR Description: probable nuclear transport factor importin
  misc_feature (1)..(532): Homolog of NCBI NO: 13699777 NR Description: AtKAP alpha [Arabidopsis thaliana]
  misc_feature (1)..(531): Homolog of NCBI NO: 13605661 NR Description: AT3g06720/F3E22_14 [Arabidopsis thaliana]
  misc_feature (1)..(531): Homolog of NCBI NO: 25314870 NR Description: probable nuclear transport factor importin alpha
  misc_feature (1)..(531): Homolog of NCBI NO: 13752562 NR Description: importin alpha 2 [Capsicum annuum]
  misc_feature (1)..(532): Homolog of NCBI NO: 3915737 NR Description: Importin alpha subunit (Karyopherin alpha
  misc_feature (1)..(531): Homolog of NCBI NO: 6682927 NR Description: importin alpha 1b [Oryza sativa (japonica
  misc_feature (1)..(531): Homolog of NCBI NO: 30421147 NR Description: importin alpha [Toxoplasma gondii]

SEQ ID NO: 73489 - protein, 500 aa, Arabidopsis thaliana; identical to SEQ ID NO: 28268
  peptide (1)..(500): Ceres Seq. ID no. 4970863
  misc_feature: Pfam Name: IBB Pfam Description: Importin beta binding domain
  misc_feature (1)..(500): Homolog of NCBI NO: 15230778 NR Description: importin alpha; protein id: At3g06720.2, by cDNA: 9351., supported by cDNA: gi_13699776, supported by gi_15809793, supported by cDNA: gi_20453047, supported by cDNA:
  misc_feature (1)..(500): Homolog of NCBI NO: 15809794 NR Description: AT3g06720/F3E22_14 [Arabidopsis thaliana]
  misc_feature (1)..(500): Homolog of NCBI NO: 25314876 NR Description: probable nuclear transport factor importin
  misc_feature (1)..(500): Homolog of NCBI NO: 13699777 NR Description: AtKAP alpha [Arabidopsis thaliana]
  misc_feature (1)..(499): Homolog of NCBI NO: 13605661 NR Description: AT3g06720/F3E22_14 [Arabidopsis thaliana]
  misc_feature (1)..(499): Homolog of NCBI NO: 25314870 NR Description: probable nuclear transport factor importin alpha
  misc_feature (1)..(499): Homolog of NCBI NO: 13752562 NR Description: importin alpha 2 [Capsicum annuum]
  misc_feature (1)..(500): Homolog of NCBI NO: 3915737 NR Description: Importin alpha subunit (Karyopherin alpha
  misc_feature (1)..(499): Homolog of NCBI NO: 6682927 NR Description: importin alpha 1b [Oryza sativa (japonica
  misc_feature (1)..(499): Homolog of NCBI NO: 30421147 NR Description: importin alpha [Toxoplasma gondii]

SEQ ID NO: 73490 - protein, 487 aa, Arabidopsis thaliana; identical to SEQ ID NO: 28269
  peptide (1)..(487): Ceres Seq. ID no. 4970864
  misc_feature: Pfam Name: IBB Pfam Description: Importin beta binding domain
  misc_feature (1)..(487): Homolog of NCBI NO: 15230778 NR Description: importin alpha; protein id: At3g06720.2, by cDNA: 9351., supported by cDNA: gi_13699776, supported by gi_15809793, supported by cDNA: gi_20453047, supported by cDNA:
  misc_feature (1)..(487): Homolog of NCBI NO: 15809794 NR Description: AT3g06720/F3E22_14 [Arabidopsis thaliana]
  misc_feature (1)..(487): Homolog of NCBI NO: 25314876 NR Description: probable nuclear transport factor importin
  misc_feature (1)..(487): Homolog of NCBI NO: 13699777 NR Description: AtKAP alpha [Arabidopsis thaliana]
  misc_feature (1)..(486): Homolog of NCBI NO: 13605661 NR Description: AT3g06720/F3E22_14 [Arabidopsis thaliana]
  misc_feature (1)..(486): Homolog of NCBI NO: 25314870 NR Description: probable nuclear transport factor importin alpha
  misc_feature (1)..(486): Homolog of NCBI NO: 13752562 NR Description: importin alpha 2 [Capsicum annuum]
  misc_feature (1)..(487): Homolog of NCBI NO: 3915737 NR Description: Importin alpha subunit (Karyopherin alpha
  misc_feature (1)..(486): Homolog of NCBI NO: 6682927 NR Description: importin alpha 1b [Oryza sativa (japonica
  misc_feature (1)..(486): Homolog of NCBI NO: 30421147 NR Description: importin alpha [Toxoplasma gondii]

SEQ ID NO: 73491 - DNA, 1041 bp, Arabidopsis thaliana
  misc_feature (1)..(1041): Ceres Seq. ID no. 4970938
  misc_feature: MA Experiment ID: 108434 Result: Down-regulated in Transcription
  misc_feature: MA Experiment 108434 PARAMETER Experiment Name: At_Root_Tips_cDNA_P Parameter: Tissue Value: Root Tips
  misc_feature: MA Experiment ID: 108461 Result: Up-regulated in Transcription
  misc_feature: MA Experiment 108461 PARAMETER Experiment Name: At_Germinating_Seeds_cDNA_P Parameter: Age (day) Value: 1 vs. 0
  misc_feature: MA Experiment 108461 PARAMETER Experiment Name: At_Germinating_Seeds_cDNA_P Parameter: Tissue Value: Germinating Seeds
  misc_feature: MA Experiment ID: 108561 Result: Up-regulated in Transcription
  misc_feature: MA Experiment 108561 PARAMETER Experiment Name: At_100uM_ABA_cDNA_P Parameter: Timepoint (hr) Value: 6
  misc_feature: MA Experiment 108561 PARAMETER Experiment Name: At_100uM_ABA_cDNA_P Parameter: Tissue Value: Aerial
  misc_feature: MA Experiment 108561 PARAMETER Experiment Name: At_100uM_ABA_cDNA_P Parameter: Treatment Value: 100uM ABA vs. No Treatment
  misc_feature: MA Experiment ID: 108579 Result: Down-regulated in Transcription
  misc_feature: MA Experiment 108579 PARAMETER Experiment Name: At_4deg_Cold_cDNA_P Parameter: Temperature (deg C) Value: 4 vs. 22
  misc_feature: MA Experiment 108579 PARAMETER Experiment Name: At_4deg_Cold_cDNA_P Parameter: Timepoint (hr) Value: 6
  misc_feature: MA Experiment 108579 PARAMETER Experiment Name: At_4deg_Cold_cDNA_P Parameter: Tissue Value: Aerial
  misc_feature: MA Experiment ID: 108605 Result: Up-regulated in Transcription
  misc_feature: MA Experiment 108605 PARAMETER Experiment Name: At_100uM_ABA_cDNA_P Parameter: Timepoint (hr) Value: 6
  misc_feature: MA Experiment 108605 PARAMETER Experiment Name: At_100uM_ABA_cDNA_P Parameter: Tissue Value: Aerial
  misc_feature: MA Experiment 108605 PARAMETER Experiment Name: At_100uM_ABA_cDNA_P Parameter: Treatment Value: 100uM ABA vs. No Treatment
  misc_feature: MA Experiment ID: 108607 Result: Up-regulated in Transcription
  misc_feature: MA Experiment 108607 PARAMETER Experiment Name: At_100uM_ABA_cDNA_P Parameter: Timepoint (hr) Value: 4
  misc_feature: MA Experiment 108607 PARAMETER Experiment Name: At_100uM_ABA_cDNA_P Parameter: Tissue Value: Aerial
  misc_feature: MA Experiment 108607 PARAMETER Experiment Name: At_100uM_ABA_cDNA_P Parameter: Treatment Value: 100uM ABA vs. No Treatment
  misc_feature: MA Experiment ID: 20000069 Result: Up-regulated in Transcription
  misc_feature: MA Experiment 20000069 PARAMETER Experiment Name: At_100uM_ABA_Mutants_cDNA_P Parameter: Plant Line Value: CS23
  misc_feature: MA Experiment 20000069 PARAMETER Experiment Name: At_100uM_ABA_Mutants_cDNA_P Parameter: Timepoint (hr) Value: 6
  misc_feature: MA Experiment 20000069 PARAMETER Experiment Name: At_100uM_ABA_Mutants_cDNA_P Parameter: Tissue Value: Aerial
  misc_feature: MA Experiment 20000069 PARAMETER Experiment Name: At_100uM_ABA_Mutants_cDNA_P Parameter: Treatment Value: 100uM ABA vs. No Treatment
  misc_feature: MA Experiment ID: 20000070 Result: Up-regulated in Transcription
  misc_feature: MA Experiment 20000070 PARAMETER Experiment Name: At_100uM_ABA_Mutants_cDNA_P Parameter: Plant Line Value: CS24
  misc_feature: MA Experiment 20000070 PARAMETER Experiment Name: At_100uM_ABA_Mutants_cDNA_P Parameter: Timepoint (hr) Value: 6
  misc_feature: MA Experiment 20000070 PARAMETER Experiment Name: At_100uM_ABA_Mutants_cDNA_P Parameter: Tissue Value: Aerial
  misc_feature: MA Experiment 20000070 PARAMETER Experiment Name: At_100uM_ABA_Mutants_cDNA_P Parameter: Treatment Value: 100uM ABA vs. No Treatment
  misc_feature: MA Experiment ID: 20000071 Result: Up-regulated in Transcription
  misc_feature: MA Experiment 20000071 PARAMETER Experiment Name: At_100uM_ABA_Mutants_cDNA_P Parameter: Plant Line Value: CS8104
  misc_feature: MA Experiment 20000071 PARAMETER Experiment Name: At_100uM_ABA_Mutants_cDNA_P Parameter: Timepoint (hr) Value: 6
  misc_feature: MA Experiment 20000071 PARAMETER Experiment Name: At_100uM_ABA_Mutants_cDNA_P Parameter: Tissue Value: Aerial
  misc_feature: MA Experiment 20000071 PARAMETER Experiment Name: At_100uM_ABA_Mutants_cDNA_P Parameter: Treatment Value: 100uM ABA vs. No Treatment
  misc_feature: MA Experiment ID: 20000087 Result: Up-regulated in Transcription
  misc_feature: MA Experiment 20000087 PARAMETER Experiment Name: At_100uM_ABA_Mutants_cDNA_P Parameter: Plant Line Value: WS
  misc_feature: MA Experiment 20000087 PARAMETER Experiment Name: At_100uM_ABA_Mutants_cDNA_P Parameter: Timepoint (hr) Value: 6
  misc_feature: MA Experiment 20000087 PARAMETER Experiment Name: At_100uM_ABA_Mutants_cDNA_P Parameter: Tissue Value: Aerial
  misc_feature: MA Experiment 20000087 PARAMETER Experiment Name: At_100uM_ABA_Mutants_cDNA_P Parameter: Treatment Value: 100uM ABA vs. No Treatment
  misc_feature: MA Experiment ID: 20000088 Result: Up-regulated in Transcription
  misc_feature: MA Experiment 20000088 PARAMETER Experiment Name: At_100uM_ABA_Mutants_cDNA_P Parameter: Plant Line Value: Landsberg
  misc_feature: MA Experiment 20000088 PARAMETER Experiment Name: At_100uM_ABA_Mutants_cDNA_P Parameter: Timepoint (hr) Value: 6
  misc_feature: MA Experiment 20000088 PARAMETER Experiment Name: At_100uM_ABA_Mutants_cDNA_P Parameter: Tissue Value: Aerial
  misc_feature: MA Experiment 20000088 PARAMETER Experiment Name: At_100uM_ABA_Mutants_cDNA_P Parameter: Treatment Value: 100uM ABA vs. No Treatment
  misc_feature: MA Experiment ID: 20000111 Result: Down-regulated in Transcription
  misc_feature: MA Experiment 20000111 PARAMETER Experiment Name: At_42deg_Heat_cDNA_P Parameter: Temperature (deg C) Value: 42 vs. 22
  misc_feature: MA Experiment 20000111 PARAMETER Experiment Name: At_42deg_Heat_cDNA_P Parameter: Timepoint (hr) Value: 6
  misc_feature: MA Experiment 20000111 PARAMETER Experiment Name: At_42deg_Heat_cDNA_P Parameter: Tissue Value: Aerial
  misc_feature: MA Experiment ID: 20000113 Result: Down-regulated in Transcription
  misc_feature: MA Experiment 20000113 PARAMETER Experiment Name: At_42deg_Heat_cDNA_P Parameter: Temperature (deg C) Value: 42 vs. 22
  misc_feature: MA Experiment 20000113 PARAMETER Experiment Name: At_42deg_Heat_cDNA_P Parameter: Timepoint (hr) Value: 8
  misc_feature: MA Experiment 20000113 PARAMETER Experiment Name: At_42deg_Heat_cDNA_P Parameter: Tissue Value: Aerial
  misc_feature: MA Experiment ID: 20000117 Result: Up-regulated in Transcription
  misc_feature: MA Experiment 20000117 PARAMETER Experiment Name: At_100uM_ABA_Mutants_cDNA_P Parameter: Plant Line Value: Columbia
  misc_feature: MA Experiment 20000117 PARAMETER Experiment Name: At_100uM_ABA_Mutants_cDNA_P Parameter: Timepoint (hr) Value: 6
  misc_feature: MA Experiment 20000117 PARAMETER Experiment Name: At_100uM_ABA_Mutants_cDNA_P Parameter: Tissue Value: Aerial
  misc_feature: MA Experiment 20000117 PARAMETER Experiment Name: At_100uM_ABA_Mutants_cDNA_P Parameter: Treatment Value: 100uM ABA vs. No Treatment
  misc_feature: MA Experiment ID: 20000169 Result: Up-regulated in Transcription
  misc_feature: MA Experiment 20000169 PARAMETER Experiment Name: At_100uM_ABA_P Parameter: Age (day) Value: 14
  misc_feature: MA Experiment 20000169 PARAMETER Experiment Name: At_100uM_ABA_P Parameter: Organism Value: A. thaliana
  misc_feature: MA Experiment 20000169 PARAMETER Experiment Name: At_100uM_ABA_P Parameter: Plant Line Value: WS
  misc_feature: MA Experiment 20000169 PARAMETER Experiment Name: At_100uM_ABA_P Parameter: Timepoint (hr) Value: 6
  misc_feature: MA Experiment 20000169 PARAMETER Experiment Name: At_100uM_ABA_P Parameter: Tissue Value: Aerial
  misc_feature: MA Experiment 20000169 PARAMETER Experiment Name: At_100uM_ABA_P Parameter: Treatment Value: 100uM ABA vs. No Treatment
  misc_feature: MA Experiment ID: 20000173 Result: Down-regulated in Transcription
  misc_feature: MA Experiment 20000173 PARAMETER Experiment Name: At_42deg_Heat_P Parameter: Age (day) Value: 14
  misc_feature: MA Experiment 20000173 PARAMETER Experiment Name: At_42deg_Heat_P Parameter: Organism Value: A. thaliana
  misc_feature: MA Experiment 20000173 PARAMETER Experiment Name: At_42deg_Heat_P Parameter: Plant Line Value: WS
  misc_feature: MA Experiment 20000173 PARAMETER Experiment Name: At_42deg_Heat_P Parameter: Temperature (deg C) Value: 42 vs. 22
  misc_feature: MA Experiment 20000173 PARAMETER Experiment Name: At_42deg_Heat_P Parameter: Timepoint (hr) Value: 6
  misc_feature: MA Experiment 20000173 PARAMETER Experiment Name: At_42deg_Heat_P Parameter: Tissue Value: Aerial
  misc_feature: MA Experiment ID: 20000179 Result: Up-regulated in Transcription
  misc_feature: MA Experiment 20000179 PARAMETER Experiment Name: At_Germinating_Seeds_P Parameter: Age (hr) Value: 6 vs. 0
  misc_feature: MA Experiment 20000179 PARAMETER Experiment Name: At_Germinating_Seeds_P Parameter: Tissue Value: Germinating Seeds
  misc_feature: MA Experiment ID: 20000180 Result: Up-regulated in Transcription
  misc_feature: MA Experiment 20000180 PARAMETER Experiment Name: At_Germinating_Seeds_P Parameter: Age (hr) Value: 24 vs. 0
  misc_feature: MA Experiment 20000180 PARAMETER Experiment Name: At_Germinating_Seeds_P Parameter: Tissue Value: Germinating Seeds
  misc_feature: MA Experiment ID: 20000184 Result: Down-regulated in Transcription
  misc_feature: MA Experiment 20000184 PARAMETER Experiment Name: At_Shoots__P Parameter: Age (day) Value: 7
  misc_feature: MA Experiment 20000184 PARAMETER Experiment Name: At_Shoots__P Parameter: Tissue Value: Shoots vs. Whole Plant
  misc_feature: MA Experiment ID: 20000185 Result: Up-regulated in Transcription
  misc_feature: MA Experiment 20000185 PARAMETER Experiment Name: At_Roots__P Parameter: Age (day) Value: 7 vs. 21
  misc_feature: MA Experiment 20000185 PARAMETER Experiment Name: At_Roots__P Parameter: Organism Value: A. thaliana
  misc_feature: MA Experiment 20000185 PARAMETER Experiment Name: At_Roots__P Parameter: Tissue Value: Roots vs. Whole Plant
  misc_feature: MA Experiment ID: 20000224 Result: Down-regulated in Transcription
  misc_feature: MA Experiment ID: 20000227 Result: Down-regulated in Transcription
  misc_feature: MA Experiment 20000227 PARAMETER Experiment Name: At_Root-Tips-vs-Tops_P Parameter: Tissue Value: Root Tips vs. Root Tops
  misc_feature: MA Experiment ID: 20000453 Result: Up-regulated in Transcription
  misc_feature: MA Experiment 20000453 PARAMETER Experiment Name: At_100uM_ABA_P Parameter: Age (day) Value: 15
  misc_feature: MA Experiment 20000453 PARAMETER Experiment Name: At_100uM_ABA_P Parameter: Organism Value: A. thaliana
  misc_feature: MA Experiment 20000453 PARAMETER Experiment Name: At_100uM_ABA_P Parameter: Plant Line Value: WS
  misc_feature: MA Experiment 20000453 PARAMETER Experiment Name: At_100uM_ABA_P Parameter: Timepoint (hr) Value: 24
  misc_feature: MA Experiment 20000453 PARAMETER Experiment Name: At_100uM_ABA_P Parameter: Tissue Value: Aerial
  misc_feature: MA Experiment 20000453 PARAMETER Experiment Name: At_100uM_ABA_P Parameter: Treatment Value: 100uM ABA vs. No Treatment
  misc_feature: MA Experiment ID: 20000794 Result: Up-regulated in Transcription
  misc_feature: MA Experiment 20000794 PARAMETER Experiment Name: At_Petals_P Parameter: Age (day) Value: 23-25 days
  misc_feature: MA Experiment 20000794 PARAMETER Experiment Name: At_Petals_P Parameter: Plant Line Value: WS
  misc_feature: MA Experiment 20000794 PARAMETER Experiment Name: At_Petals_P Parameter: Tissue Value: Petals vs. Whole plant
  misc_feature: MA Experiment ID: 20001451 Result: Up-regulated in Transcription
  misc_feature: MA Experiment 20001451 PARAMETER Experiment Name: At_Far-red-induction_P Parameter: Age (day) Value: 7
  misc_feature: MA Experiment 20001451 PARAMETER Experiment Name: At_Far-red-induction_P Parameter: Light Value: Far-red vs. White
  misc_feature: MA Experiment 20001451 PARAMETER Experiment Name: At_Far-red-induction_P Parameter: Organism Value: A. thaliana
  misc_feature: MA Experiment 20001451 PARAMETER Experiment Name: At_Far-red-induction_P Parameter: Plant Line Value: Columbia
  misc_feature: MA Experiment 20001451 PARAMETER Experiment Name: At_Far-red-induction_P Parameter: Timepoint (hr) Value: 24
  misc_feature: MA Experiment 20001451 PARAMETER Experiment Name: At_Far-red-induction_P Parameter: Tissue Value: Whole Plant
  misc_feature: MA Experiment ID: 20001557 Result: Down-regulated in Transcription
  misc_feature: MA Experiment 20001557 PARAMETER Experiment Name: At_Drought_Soil_Dry_P Parameter: Age (day) Value: 27
  misc_feature: MA Experiment 20001557 PARAMETER Experiment Name: At_Drought_Soil_Dry_P Parameter: Organism Value: A. thaliana
  misc_feature: MA Experiment 20001557 PARAMETER Experiment Name: At_Drought_Soil_Dry_P Parameter: Plant Line Value: WS
  misc_feature: MA Experiment 20001557 PARAMETER Experiment Name: At_Drought_Soil_Dry_P Parameter: Post Timepoint (hr) Value: 3
  misc_feature: MA Experiment 20001557 PARAMETER Experiment Name: At_Drought_Soil_Dry_P Parameter: Post-Treatment Value: Re-Water vs. No Drought
  misc_feature: MA Experiment 20001557 PARAMETER Experiment Name: At_Drought_Soil_Dry_P Parameter: Timepoint (day) Value: 13
  misc_feature: MA Experiment 20001557 PARAMETER Experiment Name: At_Drought_Soil_Dry_P Parameter: Treatment Value: Drought vs. No Drought
  misc_feature: MA Experiment ID: 20001905 Result: Down-regulated in Transcription
  misc_feature: MA Experiment 20001905 PARAMETER Experiment Name: At_Drought_Reproduction_P Parameter: Age (day) Value: 40
  misc_feature: MA Experiment 20001905 PARAMETER Experiment Name: At_Drought_Reproduction_P Parameter: Organism Value: A. thaliana
  misc_feature: MA Experiment 20001905 PARAMETER Experiment Name: At_Drought_Reproduction_P Parameter: Plant Line Value: WS
  misc_feature: MA Experiment 20001905 PARAMETER Experiment Name: At_Drought_Reproduction_P Parameter: Timepoint (day) Value: 10
  misc_feature: MA Experiment 20001905 PARAMETER Experiment Name: At_Drought_Reproduction_P Parameter: Tissue Value: Rosettes
  misc_feature: MA Experiment 20001905 PARAMETER Experiment Name: At_Drought_Reproduction_P Parameter: Treatment Value: Drought vs. No Drought
ttttacgtttcttgatcatcttattgaactgggtttgatctaaagttgtattgatgggttctgaaggaccaacgggtgtgacgattcatatcacagggttcaagaagttccatggagtagctgagaatcctacagagaaaatggctaacaatttgaaagaatatttggctaagaattgtgtttcgaaagatgtgaatcttggaagttgtactgtgcttgagactgctggtcaaggagctcttgcttctctctatcagttgctacaatccgcggttaacacaaaagagtcagagtcgttgaccggaaaaaccatatgggttcactttggagttaatagtggcgctacaaaatttgcaattgagcaacaagctgtgaatgaagcgacttttcgttgtcctgatgaattgggttggaaacctcagaatttgccaattgttccctctgatggtccaatctcaactgtaagaaagactaatcttcctgttgaagagataacaaaggcgttggagaagaatggctttgaagtgataacatcagatgatgcaggtcgatttgtgtgtaactatgtctattaccattctctgagatttgcagagcagaataagaccagatcactctttgttcacgttcctcttttcgttgccgtggatgaagaaacccaaatgagattcactgtttctctgctggaggtactcgcttctatttgcaagtaatgttatcccaaatgtggctattcttattcatgaaatgtgcatcatggaccgattgtctccccacgggaaaaattcgcttatcaataaatggaatataagttcacttctctactatctcctcttcatatatgcatcattgcattcaagtttcataaactagattcattttcttcttcaaaagtggtatcaaatgaaaaatgatatatgcctacttgccagtggtgccaatgcaatgagatttggaaatatgcaatctttctgctcaaagtactaatcattttgaggaaaattcaatgtatgaatctgatttaagggtcttcttctgttt

SEQ ID NO: 73492 - protein, 219 aa, Arabidopsis thaliana; identical to SEQ ID NO: 22924
  peptide (1)..(219): Ceres Seq. ID no. 4970939
  misc_feature (11)..(201): Pfam Name: Pyroglutamyl peptidase Pfam Description: Pyroglutamyl peptidase
  misc_feature (1)..(219): Homolog of NCBI NO: 18405940 NR Description: expressed protein; protein id: At1g56700.1, by cDNA: 21415. [Arabidopsis thaliana] >gi|25345286|pir||H96608
  misc_feature (1)..(215): Homolog of NCBI NO: 38175741 NR Description: pyrrolidone carboxyl peptidase-like protein
  misc_feature (1)..(216): Homolog of NCBI NO: 12039349 NR Description: putative pyrrolidone carboxyl peptidase [Oryza
  misc_feature (1)..(218): Homolog of NCBI NO: 13430708 NR Description: unknown protein [Arabidopsis thaliana]
  misc_feature (91)..(218): Homolog of NCBI NO: 8778575 NR Description: F28C11.8 [Arabidopsis thaliana]
  misc_feature (1)..(88): Homolog of NCBI NO: 8778575 NR Description: F28C11.8 [Arabidopsis thaliana]
  misc_feature (87)..(218): Homolog of NCBI NO: 15220753 NR Description: hypothetical protein; protein id: At1g23440.1
  misc_feature (1)..(88): Homolog of NCBI NO: 9295697 NR Description: F26F24.31 [Arabidopsis thaliana]
  misc_feature (1)..(88): Homolog of NCBI NO: 15220751 NR Description: hypothetical protein; protein id: At1g23430.1
  misc_feature (13)..(193): Homolog of NCBI NO: 13787025 NR Description: Chain A, X-Ray Crystalline Structures Of

SEQ ID NO: 73493 - protein, 190 aa, Arabidopsis thaliana; identical to SEQ ID NO: 22925
  peptide (1)..(190): Ceres Seq. ID no. 4970940
  misc_feature (1)..(172): Pfam Name: Pyroglutamyl peptidase Pfam Description: Pyroglutamyl peptidase
  misc_feature (1)..(190): Homolog of NCBI NO: 18405940 NR Description: expressed protein; protein id: At1g56700.1, by cDNA: 21415. [Arabidopsis thaliana] >gi|25345286|pir||H96608
  misc_feature (1)..(186): Homolog of NCBI NO: 38175741 NR Description: pyrrolidone carboxyl peptidase-like protein
  misc_feature (1)..(187): Homolog of NCBI NO: 12039349 NR Description: putative pyrrolidone carboxyl peptidase [Oryza
  misc_feature (1)..(189): Homolog of NCBI NO: 13430708 NR Description: unknown protein [Arabidopsis thaliana]
  misc_feature (62)..(189): Homolog of NCBI NO: 8778575 NR Description: F28C11.8 [Arabidopsis thaliana]
  misc_feature (1)..(59): Homolog of NCBI NO: 8778575 NR Description: F28C11.8 [Arabidopsis thaliana]
  misc_feature (58)..(189): Homolog of NCBI NO: 15220753 NR Description: hypothetical protein; protein id: At1g23440.1
  misc_feature (1)..(59): Homolog of NCBI NO: 9295697 NR Description: F26F24.31 [Arabidopsis thaliana]
  misc_feature (1)..(59): Homolog of NCBI NO: 15220751 NR Description: hypothetical protein; protein id: At1g23430.1
  misc_feature (1)..(164): Homolog of NCBI NO: 13787025 NR Description: Chain A, X-Ray Crystalline Structures Of

SEQ ID NO: 73494 - DNA, 1651 bp, Arabidopsis thaliana
  misc_feature (1)..(1651): Ceres Seq. ID no. 4970956
  misc_feature: MA Experiment ID: 108573 Result: Up-regulated in Transcription
  misc_feature: MA Experiment 108573 PARAMETER Experiment Name: At_Drought_cDNA_P Parameter: Timepoint (hr) Value: 6
  misc_feature: MA Experiment 108573 PARAMETER Experiment Name: At_Drought_cDNA_P Parameter: Tissue Value: Aerial
  misc_feature: MA Experiment 108573 PARAMETER Experiment Name: At_Drought_cDNA_P Parameter: Treatment Value: Drought vs. No Drought
  misc_feature: MA Experiment ID: 108576 Result: Down-regulated in Transcription
  misc_feature: MA Experiment 108576 PARAMETER Experiment Name: At_42deg_Heat_cDNA_P Parameter: Temperature (deg C) Value: 42 vs. 22
  misc_feature: MA Experiment 108576 PARAMETER Experiment Name: At_42deg_Heat_cDNA_P Parameter: Timepoint (hr) Value: 1
  misc_feature: MA Experiment 108576 PARAMETER Experiment Name: At_42deg_Heat_cDNA_P Parameter: Tissue Value: Aerial
  misc_feature: MA Experiment ID: 20000111 Result: Down-regulated in Transcription
  misc_feature: MA Experiment 20000111 PARAMETER Experiment Name: At_42deg_Heat_cDNA_P Parameter: Temperature (deg C) Value: 42 vs. 22
  misc_feature: MA Experiment 20000111 PARAMETER Experiment Name: At_42deg_Heat_cDNA_P Parameter: Timepoint (hr) Value: 6
  misc_feature: MA Experiment 20000111 PARAMETER Experiment Name: At_42deg_Heat_cDNA_P Parameter: Tissue Value: Aerial
  misc_feature: MA Experiment ID: 20000113 Result: Down-regulated in Transcription
  misc_feature: MA Experiment 20000113 PARAMETER Experiment Name: At_42deg_Heat_cDNA_P Parameter: Temperature (deg C) Value: 42 vs. 22
  misc_feature: MA Experiment 20000113 PARAMETER Experiment Name: At_42deg_Heat_cDNA_P Parameter: Timepoint (hr) Value: 8
  misc_feature: MA Experiment 20000113 PARAMETER Experiment Name: At_42deg_Heat_cDNA_P Parameter: Tissue Value: Aerial
  misc_feature: MA Experiment ID: 20000173 Result: Down-regulated in Transcription
  misc_feature: MA Experiment 20000173 PARAMETER Experiment Name: At_42deg_Heat_P Parameter: Age (day) Value: 14
  misc_feature: MA Experiment 20000173 PARAMETER Experiment Name: At_42deg_Heat_P Parameter: Organism Value: A. thaliana
  misc_feature: MA Experiment 20000173 PARAMETER Experiment Name: At_42deg_Heat_P Parameter: Plant Line Value: WS
  misc_feature: MA Experiment 20000173 PARAMETER Experiment Name: At_42deg_Heat_P Parameter: Temperature (deg C) Value: 42 vs. 22
  misc_feature: MA Experiment 20000173 PARAMETER Experiment Name: At_42deg_Heat_P Parameter: Timepoint (hr) Value: 6
  misc_feature: MA Experiment 20000173 PARAMETER Experiment Name: At_42deg_Heat_P Parameter: Tissue Value: Aerial
  misc_feature: MA Experiment ID: 20001451 Result: Up-regulated in Transcription
  misc_feature: MA Experiment 20001451 PARAMETER Experiment Name: At_Far-red-induction_P Parameter: Age (day) Value: 7
  misc_feature: MA Experiment 20001451 PARAMETER Experiment Name: At_Far-red-induction_P Parameter: Light Value: Far-red vs. White
  misc_feature: MA Experiment 20001451 PARAMETER Experiment Name: At_Far-red-induction_P Parameter: Organism Value: A. thaliana
  misc_feature: MA Experiment 20001451 PARAMETER Experiment Name: At_Far-red-induction_P Parameter: Plant Line Value: Columbia
  misc_feature: MA Experiment 20001451 PARAMETER Experiment Name: At_Far-red-induction_P Parameter: Timepoint (hr) Value: 24
  misc_feature: MA Experiment 20001451 PARAMETER Experiment Name: At_Far-red-induction_P Parameter: Tissue Value: Whole Plant
aaaattgggatcattttgataggagcgactctgttccttcgccgccgatacgcactcttcttcatcggatttgttcctctggggttcgcttctggaagaaatatgggtgagactctcatcaccaccctgtctatggagaactatcacccgtcaacactgctatccatggattcaggtgcttttactcatgaagaatcagagagggatatgaatgggtctctcatacttactggaccgcctgatattaatctaccactctcttctgaagctaggccatctctgcttttgtggaacgaacactgtgacatcttagacgttggacttggacctcagctatatgagcctgaggctgttgttcatgtgcctaaggttgctaagaagtacaacaagcgtgttgatagtgcatggggtgcttggcttttcttcagtttctacttcaaacctgttttggatgagaagtctaaaagtaagttaacgagggacagcaatggcttgtctgggtatgataaatctgatttgcagctcgactcgttcttggttcagcatgacatggagaatatgtacatgtgggtgttcaaggaaaagcctgaaaatgcccttggcaagatgcagctgcggagctacatgaacggacactcacgcgagggtgagcgtcctttcccttttagtgtggacaaaggttttgtccgctctcataggatgcagaggaaacattaccgtggtctctctaacccacagtgcctccatggaatcgaagttgtttattcacccaacctttctgtactcagcgaggatgaaaagaagaagtggacagaactcacaggtcgagatgtgaactttgctattccagctgaagctagtgattacggttcatggaggaatctcccaaacaccgaatttgaggctgagagacctcttcctctggctaaagctaacgggcacacccacctgaaaaagctgaatggtacctgtctaaacctgtctacacattccccagaccatgcagttgatacagtggaagttcaactcgctggtagcaataaacgcaaaagggattgtcttgctctaggaaactgcgatgactcgagctcaagtgagaaatctctggacatgaaaatccatgcaacggagctgccttggtcaaatgattttagcggggtgatgaagaatgtgtacggtccagtcacagccgcaaaaacgatatatgaagacgacagagggttcttgatagttatgagcctgccatttgttgattccggaagggtgaaagtgacatggaggaatacaccagcacatggaatagtgaagatatcatgtgtaagtacagcatgtgagccattcatcaagagacatgatagaacatttaagctaacagatccaacaccagagcattgcccaccgggggaatttgtccgcgaagtctccctgccgaacaggattccagatgacgccaagcttgaagcttaccgggacgaaacaggaacaacactagaggttttagtgcctaaacaccgaatgggaccagaggagcatgaggttcgcgtctgtctccgtccgttcgtgctagagtgagattgtagcgcataacttcttaaaagaattttattgttcatgtatcattggattattcatatttaatcatatttactcc

SEQ ID NO: 73495 - protein, 523 aa, Arabidopsis thaliana
  peptide (1)..(523): Ceres Seq. ID no. 4970957
  misc_feature (35)..(523): Homolog of NCBI NO: 18399669 NR Description: expressed protein; protein id: At3g12570.1, by cDNA: gi_13430761 [Arabidopsis thaliana] gene_id:T16H11.6~pir||T02523~strong similarity to unknown protein
  misc_feature (35)..(522): Homolog of NCBI NO: 11611667 NR Description: SLT1 protein [Nicotiana tabacum]
  misc_feature (45)..(519): Homolog of NCBI NO: 18404463 NR Description: expressed protein; protein id: At2g37570.1, by cDNA: gi_11611668, supported by cDNA: gi_15451173, supported
  misc_feature (35)..(518): Homolog of NCBI NO: 18413934 NR Description: putative protein; protein id: At5g02480.1, by cDNA: gi_13430449, supported by cDNA: gi_15724273 [Arabidopsis >gi|13430450|gb|AAK25847.1|AF360137_1 unknown protein
  misc_feature (45)..(518): Homolog of NCBI NO: 11280862 NR Description: hypothetical protein T22P11.70 - Arabidopsis >gi|7413637|emb|CAB85985.1| putative protein [Arabidopsis
  misc_feature (97)..(519): Homolog of NCBI NO: 34895866 NR Description: P0009G03.13 [Oryza sativa (japonica
  misc_feature (79)..(519): Homolog of NCBI NO: 34908142 NR Description: putative SLT1 protein (ion homeostasis related
KIGIILIGATLFLRRRYALFFIGFVPLGFASGRNMGETLITTLSMENYHPSTLLSMDSGAFTHEESERDMNGSLILTGPPDINLPLSSEARPSLLLWNEHCDILDVGLGPQLYEPEAVVHVPKVAKKYNKRVDSAWGAWLFFSFYFKPVLDEKSKSKLTRDSNGLSGYDKSDLQLDSFLVQHDMENMYMWVFKEKPENALGKMQLRSYMNGHSREGERPFPFSVDKGFVRSHRMQRKHYRGLSNPQCLHGIEVVYSPNLSVLSEDEKKKWTELTGRDVNFAIPAEASDYGSWRNLPNTEFEAERPLPLAKANGHTHLKKLNGTCLNLSTHSPDHAVDTVEVQLAGSNKRKRDCLALGNCDDSSSSEKSLDMKIHATELPWSNDFSGVMKNVYGPVTAAKTIYEDDRGFLIVMSLPFVDSGRVKVTWRNTPAHGIVKISCVSTACEPFIKRHDRTFKLTDPTPEHCPPGEFVREVSLPNRIPDDAKLEAYRDETGTTLEVLVPKHRMGPEEHEVRVCLRPFVLE

SEQ ID NO: 73496 - protein, 489 aa, Arabidopsis thaliana; identical to SEQ ID NO: 39439
  peptide (1)..(489): Ceres Seq. ID no. 4970958
  misc_feature (1)..(489): Homolog of NCBI NO: 18399669 NR Description: expressed protein; protein id: At3g12570.1, by cDNA: gi_13430761 [Arabidopsis thaliana] gene_id:T16H11.6~pir||T02523~strong similarity to unknown protein
  misc_feature (1)..(488): Homolog of NCBI NO: 11611667 NR Description: SLT1 protein [Nicotiana tabacum]
  misc_feature (11)..(485): Homolog of NCBI NO: 18404463 NR Description: expressed protein; protein id: At2g37570.1, by cDNA: gi_11611668, supported by cDNA: gi_15451173, supported
  misc_feature (1)..(484): Homolog of NCBI NO: 18413934 NR Description: putative protein; protein id: At5g02480.1, by cDNA: gi_13430449, supported by cDNA: gi_15724273 [Arabidopsis >gi|13430450|gb|AAK25847.1|AF360137_1 unknown protein
  misc_feature (11)..(484): Homolog of NCBI NO: 11280862 NR Description: hypothetical protein T22P11.70 - Arabidopsis >gi|7413637|emb|CAB85985.1| putative protein [Arabidopsis
  misc_feature (63)..(485): Homolog of NCBI NO: 34895866 NR Description: P0009G03.13 [Oryza sativa (japonica
  misc_feature (45)..(485): Homolog of NCBI NO: 34908142 NR Description: putative SLT1 protein (ion homeostasis related

SEQ ID NO: 73497 - protein, 479 aa, Arabidopsis thaliana; identical to SEQ ID NO: 39440
  peptide (1)..(479): Ceres Seq. ID no. 4970959
  misc_feature (1)..(479): Homolog of NCBI NO: 18399669 NR Description: expressed protein; protein id: At3g12570.1, by cDNA: gi_13430761 [Arabidopsis thaliana] gene_id:T16H11.6~pir||T02523~strong similarity to unknown protein
  misc_feature (1)..(478): Homolog of NCBI NO: 11611667 NR Description: SLT1 protein [Nicotiana tabacum]
  misc_feature (1)..(475): Homolog of NCBI NO: 18404463 NR Description: expressed protein; protein id: At2g37570.1, by cDNA: gi_11611668, supported by cDNA: gi_15451173, supported
  misc_feature (1)..(474): Homolog of NCBI NO: 18413934 NR Description: putative protein; protein id: At5g02480.1, by cDNA: gi_13430449, supported by cDNA: gi_15724273 [Arabidopsis >gi|13430450|gb|AAK25847.1|AF360137_1 unknown protein
  misc_feature (1)..(474): Homolog of NCBI NO: 11280862 NR Description: hypothetical protein T22P11.70 - Arabidopsis >gi|7413637|emb|CAB85985.1| putative protein [Arabidopsis
  misc_feature (53)..(475): Homolog of NCBI NO: 34895866 NR Description: P0009G03.13 [Oryza sativa (japonica
  misc_feature (35)..(475): Homolog of NCBI NO: 34908142 NR Description: putative SLT1 protein (ion homeostasis related

SEQ ID NO: 73498 - DNA, 1199 bp, Arabidopsis thaliana
  misc_feature (1)..(1199): Ceres Seq. ID no. 4971081
  misc_feature: MA Experiment ID: 108434 Result: Down-regulated in Transcription
  misc_feature: MA Experiment 108434 PARAMETER Experiment Name: At_Root_Tips_cDNA_P Parameter: Tissue Value: Root Tips
  misc_feature: MA Experiment ID: 108488 Result: Down-regulated in Transcription
  misc_feature: MA Experiment ID: 108574 Result: Up-regulated in Transcription
  misc_feature: MA Experiment 108574 PARAMETER Experiment Name: At_Wounding__cDNA_P Parameter: Timepoint (hr) Value: 1
  misc_feature: MA Experiment 108574 PARAMETER Experiment Name: At_Wounding__cDNA_P Parameter: Tissue Value: Aerial
  misc_feature: MA Experiment 108574 PARAMETER Experiment Name: At_Wounding__cDNA_P Parameter: Treatment Value: Wounding vs. No Wounding
  misc_feature: MA Experiment ID: 108576 Result: Up-regulated in Transcription
  misc_feature: MA Experiment 108576 PARAMETER Experiment Name: At_42deg_Heat_cDNA_P Parameter: Temperature (deg C) Value: 42 vs. 22
  misc_feature: MA Experiment 108576 PARAMETER Experiment Name: At_42deg_Heat_cDNA_P Parameter: Timepoint (hr) Value: 1
  misc_feature: MA Experiment 108576 PARAMETER Experiment Name: At_42deg_Heat_cDNA_P Parameter: Tissue Value: Aerial
  misc_feature: MA Experiment ID: 108579 Result: Up-regulated in Transcription
  misc_feature: MA Experiment 108579 PARAMETER Experiment Name: At_4deg_Cold_cDNA_P Parameter: Temperature (deg C) Value: 4 vs. 22
  misc_feature: MA Experiment 108579 PARAMETER Experiment Name: At_4deg_Cold_cDNA_P Parameter: Timepoint (hr) Value: 6
  misc_feature: MA Experiment 108579 PARAMETER Experiment Name: At_4deg_Cold_cDNA_P Parameter: Tissue Value: Aerial
  misc_feature: MA Experiment ID: 108585 Result: Up-regulated in Transcription
  misc_feature: MA Experiment 108585 PARAMETER Experiment Name: At_5mM_NaNP_cDNA_P Parameter: Timepoint (hr) Value: 6
  misc_feature: MA Experiment 108585 PARAMETER Experiment Name: At_5mM_NaNP_cDNA_P Parameter: Tissue Value: Aerial
  misc_feature: MA Experiment 108585 PARAMETER Experiment Name: At_5mM_NaNP_cDNA_P Parameter: Treatment Value: null
  misc_feature: MA Experiment ID: 108595 Result: Up-regulated in Transcription
  misc_feature: MA Experiment 108595 PARAMETER Experiment Name: At_Ler-pi_Ovule_cDNA_P Parameter: Plant Line Value: null
  misc_feature: MA Experiment ID: 108667 Result: Up-regulated in Transcription
  misc_feature: MA Experiment 108667 PARAMETER Experiment Name: At_2mM_SA_cDNA_P Parameter: Plant Line Value: WS
  misc_feature: MA Experiment 108667 PARAMETER Experiment Name: At_2mM_SA_cDNA_P Parameter: Timepoint (hr) Value: 1
  misc_feature: MA Experiment 108667 PARAMETER Experiment Name: At_2mM_SA_cDNA_P Parameter: Treatment Value: 2mM SA vs. No Treatment
  misc_feature: MA Experiment ID: 108668 Result: Up-regulated in Transcription
  misc_feature: MA Experiment 108668 PARAMETER Experiment Name: At_2mM_SA_cDNA_P Parameter: Plant Line Value: WS
  misc_feature: MA Experiment 108668 PARAMETER Experiment Name: At_2mM_SA_cDNA_P Parameter: Timepoint (hr) Value: 6
  misc_feature: MA Experiment 108668 PARAMETER Experiment Name: At_2mM_SA_cDNA_P Parameter: Treatment Value: 2mM SA vs. No Treatment
  misc_feature: MA Experiment ID: 20000093 Result: Up-regulated in Transcription
  misc_feature: MA Experiment 20000093 PARAMETER Experiment Name: At_42deg_Heat_cDNA_P Parameter: Temperature (deg C) Value: 42 vs. 22
  misc_feature: MA Experiment 20000093 PARAMETER Experiment Name: At_42deg_Heat_cDNA_P Parameter: Timepoint (hr) Value: 0.5
  misc_feature: MA Experiment 20000093 PARAMETER Experiment Name: At_42deg_Heat_cDNA_P Parameter: Tissue Value: Aerial
  misc_feature: MA Experiment ID: 20000171 Result: Up-regulated in Transcription
  misc_feature: MA Experiment 20000171 PARAMETER Experiment Name: At_42deg_Heat_P Parameter: Age (day) Value: 14
  misc_feature: MA Experiment 20000171 PARAMETER Experiment Name: At_42deg_Heat_P Parameter: Organism Value: A. thaliana
  misc_feature: MA Experiment 20000171 PARAMETER Experiment Name: At_42deg_Heat_P Parameter: Plant Line Value: WS
  misc_feature: MA Experiment 20000171 PARAMETER Experiment Name: At_42deg_Heat_P Parameter: Temperature (deg C) Value: 42 vs. 22
  misc_feature: MA Experiment 20000171 PARAMETER Experiment Name: At_42deg_Heat_P Parameter: Timepoint (hr) Value: 1
  misc_feature: MA Experiment 20000171 PARAMETER Experiment Name: At_42deg_Heat_P Parameter: Tissue Value: Aerial
  misc_feature: MA Experiment ID: 20000182 Result: Up-regulated in Transcription
  misc_feature: MA Experiment 20000182 PARAMETER Experiment Name: At_2mM_SA_P Parameter: Age (day) Value: 14
  misc_feature: MA Experiment 20000182 PARAMETER Experiment Name: At_2mM_SA_P Parameter: Organism Value: A. thaliana
  misc_feature: MA Experiment 20000182 PARAMETER Experiment Name: At_2mM_SA_P Parameter: Plant Line Value: WS
  misc_feature: MA Experiment 20000182 PARAMETER Experiment Name: At_2mM_SA_P Parameter: Timepoint (hr) Value: 6
  misc_feature: MA Experiment 20000182 PARAMETER Experiment Name: At_2mM_SA_P Parameter: Tissue Value: Aerial
  misc_feature: MA Experiment 20000182 PARAMETER Experiment Name: At_2mM_SA_P Parameter: Treatment Value: 2mM SA vs. No Treatment
  misc_feature: MA Experiment ID: 20000184 Result: Down-regulated in Transcription
  misc_feature: MA Experiment 20000184 PARAMETER Experiment Name: At_Shoots__P Parameter: Age (day) Value: 7
  misc_feature: MA Experiment 20000184 PARAMETER Experiment Name: At_Shoots__P Parameter: Tissue Value: Shoots vs. Whole Plant
  misc_feature: MA Experiment ID: 20000234 Result: Down-regulated in Transcription
  misc_feature: MA Experiment 20000234 PARAMETER Experiment Name: At_Siliques_P Parameter: Age (day) Value: 21
  misc_feature: MA Experiment 20000234 PARAMETER Experiment Name: At_Siliques_P Parameter: Organism Value: A. thaliana
  misc_feature: MA Experiment 20000234 PARAMETER Experiment Name: At_Siliques_P Parameter: Plant Line Value: WS
  misc_feature: MA Experiment 20000234 PARAMETER Experiment Name: At_Siliques_P Parameter: Tissue Value: Less Than 5mm Siliques vs. Whole Plant
  misc_feature: MA Experiment ID: 20000235 Result: Down-regulated in Transcription
  misc_feature: MA Experiment 20000235 PARAMETER Experiment Name: At_Siliques_P Parameter: Age (day) Value: 21
  misc_feature: MA Experiment 20000235 PARAMETER Experiment Name: At_Siliques_P Parameter: Organism Value: A. thaliana
  misc_feature: MA Experiment 20000235 PARAMETER Experiment Name: At_Siliques_P Parameter: Plant Line Value: WS
  misc_feature: MA Experiment 20000235 PARAMETER Experiment Name: At_Siliques_P Parameter: Tissue Value: 5-10mm Siliques vs. Whole Plant
  misc_feature: MA Experiment ID: 20000438 Result: Down-regulated in Transcription
  misc_feature: MA Experiment 20000438 PARAMETER Experiment Name: At_Shoots__P Parameter: Age (day) Value: 14
  misc_feature: MA Experiment 20000438 PARAMETER Experiment Name: At_Shoots__P Parameter: Tissue Value: Shoots vs. Whole Plant
  misc_feature: MA Experiment ID: 20000495 Result: Down-regulated in Transcription
  misc_feature: MA Experiment 20000495 PARAMETER Experiment Name: At_Guard_Cells_P Parameter: Harvest Date Value: 8/2/2002
  misc_feature: MA Experiment 20000495 PARAMETER Experiment Name: At_Guard_Cells_P Parameter: Organism Value: A. thaliana
  misc_feature: MA Experiment 20000495 PARAMETER Experiment Name: At_Guard_Cells_P Parameter: Tissue Value: Guard Cells vs. Leaves
  misc_feature: MA Experiment ID: 20000527 Result: Down-regulated in Transcription
  misc_feature: MA Experiment 20000527 PARAMETER Experiment Name: At_10percent_PEG_P Parameter: Age (day) Value: 20
  misc_feature: MA Experiment 20000527 PARAMETER Experiment Name: At_10percent_PEG_P Parameter: Organism Value: A. thaliana
  misc_feature: MA Experiment 20000527 PARAMETER Experiment Name: At_10percent_PEG_P Parameter: Plant Line Value: WS
  misc_feature: MA Experiment 20000527 PARAMETER Experiment Name: At_10percent_PEG_P Parameter: Timepoint (day) Value: 20
  misc_feature: MA Experiment 20000527 PARAMETER Experiment Name: At_10percent_PEG_P Parameter: Tissue Value: Whole Plant
  misc_feature: MA Experiment 20000527 PARAMETER Experiment Name: At_10percent_PEG_P Parameter: Treatment Value: 10percent PEG vs. No Treatment
  misc_feature: MA Experiment ID: 20000573 Result: Down-regulated in Transcription
  misc_feature: MA Experiment 20000573 PARAMETER Experiment Name: At_100uM_ABA_Mutants__P Parameter: Organism Value: A. thaliana
  misc_feature: MA Experiment 20000573 PARAMETER Experiment Name: At_100uM_ABA_Mutants__P Parameter: Plant Line Value: CS22 vs. Ler wt
  misc_feature: MA Experiment 20000573 PARAMETER Experiment Name: At_100uM_ABA_Mutants__P Parameter: Timepoint (hr) Value: N/A
  misc_feature: MA Experiment 20000573 PARAMETER Experiment Name: At_100uM_ABA_Mutants__P Parameter: Tissue Value: Whole Plant
  misc_feature: MA Experiment 20000573 PARAMETER Experiment Name: At_100uM_ABA_Mutants__P Parameter: Treatment Value: None
  misc_feature: MA Experiment ID: 20001905 Result: Up-regulated in Transcription
  misc_feature: MA Experiment 20001905 PARAMETER Experiment Name: At_Drought_Reproduction_P Parameter: Age (day) Value: 40
  misc_feature: MA Experiment 20001905 PARAMETER Experiment Name: At_Drought_Reproduction_P Parameter: Organism Value: A. thaliana
  misc_feature: MA Experiment 20001905 PARAMETER Experiment Name: At_Drought_Reproduction_P Parameter: Plant Line Value: WS
  misc_feature: MA Experiment 20001905 PARAMETER Experiment Name: At_Drought_Reproduction_P Parameter: Timepoint (day) Value: 10
  misc_feature: MA Experiment 20001905 PARAMETER Experiment Name: At_Drought_Reproduction_P Parameter: Tissue Value: Rosettes
  misc_feature: MA Experiment 20001905 PARAMETER Experiment Name: At_Drought_Reproduction_P Parameter: Treatment Value: Drought vs. No Drought
aaaggaaaaagaaaaataaataatcgatctcaaccgtccgatcatccatcttgccatcaccgttcaccaatcttcttcgtctcctctctctttctctctttttgctgtttctagctcctctctctctggatctcgccggcgaaccgtttctcttgggtgtaaacagtagcaatcaagctatagaatctcagatatcgctgaattagctgttggattttatccgccttttcttcgttatccggggctcgggtataaggtttcatcgtcttatttcatctgtaaatgggctgcttccactcaaaggcagcaaaagaatttcgaggacacgaagaccctgttaagcttgcctctgagacagcttttagtgtgagtgaggttgaagcattatttgagctattcaagagcataagcagttcggttgttgatgatggtctgattaacaaggaggagtttcaacttgctttgttcaaaagccggaagagggagaatatatttgctaatagggtaaaatcttaattcttcaggcttttacaagattcatcttctggaagagtgatctaaaccaagataatatgtccattatcctaaacaatattgcttttccgcagatatttgatatgtttgatgttaaacgaaaaggagtcatcgatttcggggactttgtaagatcactcaatgttttccaccccaatgcttctctagaagacaaaatagattttacgtttaggctttacgacatggactgcacgggttacattgaacgacaagaggtcaagcaaatgttgatcgcgcttctctgcgaatctgaaatgaaactggctgatgaaaccatagagataatactcgataagacatttgaagatgcagacgtgaatcaagatggaaaaattgataaattagagtggagtgatttcgtaaacaaaaatccatcattgcttaagatcatgactcttccatatctcagggatattacgacaacgtttccgagttttgtcttccattcggaggtcgatgagattgccacatgaagaaacaaactggtttaagaccgagtagattgccacgagttggaagaacaagtctgagctaatcggtgtaatcaacatctgtttgtaaacagtagtagagcatattctcttgaaattgtttgggttacttttttcttctcacaacagtttaaaattttgggtttttagctt

SEQ ID NO: 73499 - protein, 151 aa, Arabidopsis thaliana; identical to SEQ ID NO: 35420
  peptide (1)..(151): Ceres Seq. ID no. 4971082
  misc_feature (90)..(118): Pfam Name: EF hand Pfam Description: EF hand
  misc_feature (7)..(151): Homolog of NCBI NO: 18414931 NR Description: calcineurin B-like protein 1; protein id: supported by cDNA: gi_3309081 [Arabidopsis thaliana]
  misc_feature (7)..(151): Homolog of NCBI NO: 15238015 NR Description: calcineurin B 1; protein id: At5g47100.1, by cDNA: gi_15866278, supported by cDNA: gi_16151824 [Arabidopsis
  misc_feature (12)..(148): Homolog of NCBI NO: 30687272 NR Description: calcineurin B-like protein 3 (CBL3) [Arabidopsis
  misc_feature (12)..(148): Homolog of NCBI NO: 16924116 NR Description: putative calcineurin B-like protein [Oryza sativa]
  misc_feature (12)..(148): Homolog of NCBI NO: 22137326 NR Description: calcineurin B [Pisum sativum]
  misc_feature (12)..(148): Homolog of NCBI NO: 15236778 NR Description: calcineurin B-like protein 3; protein id: supported by cDNA: gi_18253012, supported by cDNA: gi_3309085
  misc_feature (12)..(148): Homolog of NCBI NO: 15241101 NR Description: calcineurin B-like protein 2 (gb|AAC26009.1); id: At5g55990.2, supported by cDNA: 37280., supported by cDNA: supported by cDNA: gi_3309083 [Arabidopsis thaliana] protein 2
  misc_feature (12)..(148): Homolog of NCBI NO: 21593228 NR Description: calcineurin B-like protein 2 [Arabidopsis
  misc_feature (7)..(149): Homolog of NCBI NO: 15237928 NR Description: calcium sensor homolog (gb|AAC26110.1); protein At5g24270.1, supported by cDNA: gi_11065946, supported by cDNA: supported by cDNA: gi_20465716 [Arabidopsis thaliana]
  misc_feature (7)..(151): Homolog of NCBI NO: 37536918 NR Description: putative calcineurin [Oryza sativa (japonica group)] >gi|12597890|gb|AAG60198.1| putative calcineurin [Oryza >gi|31433550|gb|AAP55048.1| putative calcineurin [Oryza sativa

SEQ ID NO: 73500 - protein, 136 aa, Arabidopsis thaliana; identical to SEQ ID NO: 35421
  peptide (1)..(136): Ceres Seq. ID no. 4971083
  misc_feature (75)..(103): Pfam Name: EF hand Pfam Description: EF hand
  misc_feature (1)..(136): Homolog of NCBI NO: 18414931 NR Description: calcineurin B-like protein 1; protein id: supported by cDNA: gi_3309081 [Arabidopsis thaliana]
  misc_feature (1)..(136): Homolog of NCBI NO: 15238015 NR Description: calcineurin B 1; protein id: At5g47100.1, by cDNA: gi_15866278, supported by cDNA: gi_16151824 [Arabidopsis
  misc_feature (1)..(133): Homolog of NCBI NO: 30687272 NR Description: calcineurin B-like protein 3 (CBL3) [Arabidopsis
  misc_feature (1)..(133): Homolog of NCBI NO: 16924116 NR Description: putative calcineurin B-like protein [Oryza sativa]
  misc_feature (1)..(133): Homolog of NCBI NO: 22137326 NR Description: calcineurin B [Pisum sativum]
  misc_feature (1)..(133): Homolog of NCBI NO: 15236778 NR Description: calcineurin B-like protein 3; protein id: supported by cDNA: gi_18253012, supported by cDNA: gi_3309085
  misc_feature (1)..(133): Homolog of NCBI NO: 15241101 NR Description: calcineurin B-like protein 2 (gb|AAC26009.1); id: At5g55990.2, supported by cDNA: 37280., supported by cDNA: supported by cDNA: gi_3309083 [Arabidopsis thaliana] protein 2
  misc_feature (1)..(133): Homolog of NCBI NO: 21593228 NR Description: calcineurin B-like protein 2 [Arabidopsis
  misc_feature (1)..(134): Homolog of NCBI NO: 15237928 NR Description: calcium sensor homolog (gb|AAC26110.1); protein At5g24270.1, supported by cDNA: gi_11065946, supported by cDNA: supported by cDNA: gi_20465716 [Arabidopsis thaliana]
  misc_feature (1)..(136): Homolog of NCBI NO: 37536918 NR Description: putative calcineurin [Oryza sativa (japonica group)] >gi|12597890|gb|AAG60198.1| putative calcineurin [Oryza >gi|31433550|gb|AAP55048.1| putative calcineurin [Oryza sativa

SEQ ID NO: 73501 - protein, 96 aa, Arabidopsis thaliana; identical to SEQ ID NO: 35422
  peptide (1)..(96): Ceres Seq. ID no. 4971084
  misc_feature (35)..(63): Pfam Name: EF hand Pfam Description: EF hand
  misc_feature (1)..(96): Homolog of NCBI NO: 18414931 NR Description: calcineurin B-like protein 1; protein id: supported by cDNA: gi_3309081 [Arabidopsis thaliana]
  misc_feature (1)..(96): Homolog of NCBI NO: 15238015 NR Description: calcineurin B 1; protein id: At5g47100.1, by cDNA: gi_15866278, supported by cDNA: gi_16151824 [Arabidopsis
  misc_feature (1)..(93): Homolog of NCBI NO: 30687272 NR Description: calcineurin B-like protein 3 (CBL3) [Arabidopsis
  misc_feature (1)..(93): Homolog of NCBI NO: 16924116 NR Description: putative calcineurin B-like protein [Oryza sativa]
  misc_feature (1)..(93): Homolog of NCBI NO: 22137326 NR Description: calcineurin B [Pisum sativum]
  misc_feature (1)..(93): Homolog of NCBI NO: 15236778 NR Description: calcineurin B-like protein 3; protein id: supported by cDNA: gi_18253012, supported by cDNA: gi_3309085
  misc_feature (1)..(93): Homolog of NCBI NO: 15241101 NR Description: calcineurin B-like protein 2 (gb|AAC26009.1); id: At5g55990.2, supported by cDNA: 37280., supported by cDNA: supported by cDNA: gi_3309083 [Arabidopsis thaliana] protein 2
  misc_feature (1)..(93): Homolog of NCBI NO: 21593228 NR Description: calcineurin B-like protein 2 [Arabidopsis
  misc_feature (1)..(94): Homolog of NCBI NO: 15237928 NR Description: calcium sensor homolog (gb|AAC26110.1); protein At5g24270.1, supported by cDNA: gi_11065946, supported by cDNA: supported by cDNA: gi_20465716 [Arabidopsis thaliana]
  misc_feature (1)..(96): Homolog of NCBI NO: 37536918 NR Description: putative calcineurin [Oryza sativa (japonica group)] >gi|12597890|gb|AAG60198.1| putative calcineurin [Oryza >gi|31433550|gb|AAP55048.1| putative calcineurin [Oryza sativa

SEQ ID NO: 73502 - DNA, 1215 bp, Arabidopsis thaliana
  misc_feature (1)..(1215): Ceres Seq. ID no. 4971093
  misc_feature: MA Experiment ID: 108433 Result: Down-regulated in Transcription
  misc_feature: MA Experiment 108433 PARAMETER Experiment Name: At_rhl_Mutant2_cDNA_P Parameter: Age (day) Value: 7
  misc_feature: MA Experiment 108433 PARAMETER Experiment Name: At_rhl_Mutant2_cDNA_P Parameter: Organism Value: A. thaliana
  misc_feature: MA Experiment 108433 PARAMETER Experiment Name: At_rhl_Mutant2_cDNA_P Parameter: Plant Line Value: rhl Mutant vs. wt landsburg
  misc_feature: MA Experiment 108433 PARAMETER Experiment Name: At_rhl_Mutant2_cDNA_P Parameter: Tissue Value: Roots
  misc_feature: MA Experiment ID: 108434 Result: Down-regulated in Transcription
  misc_feature: MA Experiment 108434 PARAMETER Experiment Name: At_Root_Tips_cDNA_P Parameter: Tissue Value: Root Tips
  misc_feature: MA Experiment ID: 108595 Result: Up-regulated in Transcription
  misc_feature: MA Experiment 108595 PARAMETER Experiment Name: At_Ler-pi_Ovule_cDNA_P Parameter: Plant Line Value: null
  misc_feature: MA Experiment ID: 20000179 Result: Down-regulated in Transcription
  misc_feature: MA Experiment 20000179 PARAMETER Experiment Name: At_Germinating_Seeds_P Parameter: Age (hr) Value: 6 vs. 0
  misc_feature: MA Experiment 20000179 PARAMETER Experiment Name: At_Germinating_Seeds_P Parameter: Tissue Value: Germinating Seeds
  misc_feature: MA Experiment ID: 20000180 Result: Down-regulated in Transcription
  misc_feature: MA Experiment 20000180 PARAMETER Experiment Name: At_Germinating_Seeds_P Parameter: Age (hr) Value: 24 vs. 0
  misc_feature: MA Experiment 20000180 PARAMETER Experiment Name: At_Germinating_Seeds_P Parameter: Tissue Value: Germinating Seeds
  misc_feature: MA Experiment ID: 20000184 Result: Down-regulated in Transcription
  misc_feature: MA Experiment 20000184 PARAMETER Experiment Name: At_Shoots__P Parameter: Age (day) Value: 7
  misc_feature: MA Experiment 20000184 PARAMETER Experiment Name: At_Shoots__P Parameter: Tissue Value: Shoots vs. Whole Plant
  misc_feature: MA Experiment ID: 20000264 Result: Down-regulated in Transcription
  misc_feature: MA Experiment 20000264 PARAMETER Experiment Name: At_Open_Flower_P Parameter: Age (day) Value: 21
  misc_feature: MA Experiment 20000264 PARAMETER Experiment Name: At_Open_Flower_P Parameter: Plant Line Value: WS
  misc_feature: MA Experiment 20000264 PARAMETER Experiment Name: At_Open_Flower_P Parameter: Tissue Value: Open Flower vs. Whole Plant
  misc_feature: MA Experiment ID: 20000451 Result: Up-regulated in Transcription
  misc_feature: MA Experiment 20000451 PARAMETER Experiment Name: At_CS6879_Shoots-Roots_P Parameter: Age (day) Value: 14
  misc_feature: MA Experiment 20000451 PARAMETER Experiment Name: At_CS6879_Shoots-Roots_P Parameter: Organism Value: A. thaliana
  misc_feature: MA Experiment 20000451 PARAMETER Experiment Name: At_CS6879_Shoots-Roots_P Parameter: Plant Line Value: CS6879 vs. WS
  misc_feature: MA Experiment 20000451 PARAMETER Experiment Name: At_CS6879_Shoots-Roots_P Parameter: Tissue Value: Roots
  misc_feature: MA Experiment ID: 20001557 Result: Up-regulated in Transcription
  misc_feature: MA Experiment 20001557 PARAMETER Experiment Name: At_Drought_Soil_Dry_P Parameter: Age (day) Value: 27
  misc_feature: MA Experiment 20001557 PARAMETER Experiment Name: At_Drought_Soil_Dry_P Parameter: Organism Value: A. thaliana
  misc_feature: MA Experiment 20001557 PARAMETER Experiment Name: At_Drought_Soil_Dry_P Parameter: Plant Line Value: WS
  misc_feature: MA Experiment 20001557 PARAMETER Experiment Name: At_Drought_Soil_Dry_P Parameter: Post Timepoint (hr) Value: 3
  misc_feature: MA Experiment 20001557 PARAMETER Experiment Name: At_Drought_Soil_Dry_P Parameter: Post-Treatment Value: Re-Water vs. No Drought
  misc_feature: MA Experiment 20001557 PARAMETER Experiment Name: At_Drought_Soil_Dry_P Parameter: Timepoint (day) Value: 13
  misc_feature: MA Experiment 20001557 PARAMETER Experiment Name: At_Drought_Soil_Dry_P Parameter: Treatment Value: Drought vs. No Drought
aaaaaggaacaaaacaaaaataaagcgcgaaattagttttcaccggcgagattttttatcctctctacgagataacacttagaagaagaggcagttaaaacagagagacgacgtcgtgttatttttccaaattccggtgatctgagaatgacgtcggggactagaacgccgacttggaaagagagagagaacaacaaacggcgagagcggcgaagacgagcgattgcggctaagatcttcgcaggactaaggattcatggaaacttcaagctccctaaacactgcgacaacaatgaagtcctcaaagctttatgcaatgaagctggttggactgtagaagacgacggaactacttaccgcaagggatgcaaaccaatggatcgaatggacctcatgaatggttctacttcagctagtccatgctcatcgtatcaacatagccctcgtgcttcctacaatccaagcccttcgtcttcatcattcccgagtcctacaaacccatttggtgatgctaactcactaatcccatggctcaagaacctctcttcaaactcaccttccaagcttcccttcttccatggaaattcaataagcgctcccgtgactccgccattggctcgaagccctactcgtgatcaagtaaccatccctgactctggatggctctcaggaatgcaaactccgcagagcggaccgtcttctcctactttcagtttagtttcaagaaacccgtttttcgacaaagaggcttttaaaatgggagattgtaattcaccaatgtggactcctggacaaagtggaaactgctctccagctattcctgctggtgttgatcagaactctgatgtgccaatggctgatggaatgacggctgagtttgcgtttggttgtaacgcaatggctgcgaatggaatggtgaagccttgggaaggagaaaggatacatggagaatgtgtttcagatgatttagaacttacacttggaaactcaagaaccagatgatcatttcagagaagaatcaaagtcgtttgctatcattaagtcttcttttttgtctgtcttttttttccagtgtgatgtttaaaggtgactcagaggaaaaaaaggagaatagaaagagaaacaaaaaaagaacattttgagctctgttttcttttttttttttctttttttttttgttggcttttgactaaagttgtagttagaatctatttt

SEQ ID NO: 73503 - protein, 284 aa, Arabidopsis thaliana; identical to SEQ ID NO: 27357
  peptide (1)..(284): Ceres Seq. ID no. 4971094
  misc_feature (2)..(141): Pfam Name: Plant protein of unknown function (DUF822) Pfam Description: Plant protein of unknown function (DUF822)
  misc_feature (1)..(284): Homolog of NCBI NO: 15234055 NR Description: putative protein; protein id: At4g18890.1, by cDNA: 6321. [Arabidopsis thaliana] >gi|7485425|pir||T05026
  misc_feature (1)..(197): Homolog of NCBI NO: 18412073 NR Description: expressed protein; protein id: At1g78700.1, by cDNA: gi_15215801, supported by cDNA: gi_19699251 [Arabidopsis
  misc_feature (1)..(279): Homolog of NCBI NO: 33146833 NR Description: putative mature anther-specific protein LAT61
  misc_feature (4)..(225): Homolog of NCBI NO: 34903720 NR Description: P0489A05.26 [Oryza sativa (japonica
  misc_feature (4)..(284): Homolog of NCBI NO: 14626761 NR Description: mature anther-specific protein LAT61
  misc_feature (2)..(225): Homolog of NCBI NO: 15230298 NR Description: putative protein; protein id: At3g50750.1
  misc_feature (2)..(187): Homolog of NCBI NO: 15215731 NR Description: AT4g36780/C7A10_580 [Arabidopsis thaliana]
  misc_feature (6)..(229): Homolog of NCBI NO: 21592457 NR Description: unknown [Arabidopsis thaliana]
  misc_feature (6)..(229): Homolog of NCBI NO: 6651069 NR Description: 107 protein [Arabidopsis thaliana]
  misc_feature (6)..(229): Homolog of NCBI NO: 18394728 NR Description: expressed protein; protein id: At1g19350.1, by cDNA: 24157., supported by cDNA: gi_18086445, supported by

SEQ ID NO: 73504 - protein, 208 aa, Arabidopsis thaliana; identical to SEQ ID NO: 27358
  peptide (1)..(208): Ceres Seq. ID no. 4971095
  misc_feature (1)..(65): Pfam Name: Plant protein of unknown function (DUF822) Pfam Description: Plant protein of unknown function (DUF822)
  misc_feature (1)..(208): Homolog of NCBI NO: 15234055 NR Description: putative protein; protein id: At4g18890.1, by cDNA: 6321. [Arabidopsis thaliana] >gi|7485425|pir||T05026
  misc_feature (1)..(121): Homolog of NCBI NO: 18412073 NR Description: expressed protein; protein id: At1g78700.1, by cDNA: gi_15215801, supported by cDNA: gi_19699251 [Arabidopsis
  misc_feature (1)..(203): Homolog of NCBI NO: 33146833 NR Description: putative mature anther-specific protein LAT61
  misc_feature (1)..(149): Homolog of NCBI NO: 34903720 NR Description: P0489A05.26 [Oryza sativa (japonica
  misc_feature (1)..(208): Homolog of NCBI NO: 14626761 NR Description: mature anther-specific protein LAT61
  misc_feature (1)..(149): Homolog of NCBI NO: 15230298 NR Description: putative protein; protein id: At3g50750.1
  misc_feature (1)..(111): Homolog of NCBI NO: 15215731 NR Description: AT4g36780/C7A10_580 [Arabidopsis thaliana]
  misc_feature (1)..(153): Homolog of NCBI NO: 21592457 NR Description: unknown [Arabidopsis thaliana]
  misc_feature (1)..(153): Homolog of NCBI NO: 6651069 NR Description: 107 protein [Arabidopsis thaliana]
  misc_feature (1)..(153): Homolog of NCBI NO: 18394728 NR Description: expressed protein; protein id: At1g19350.1, by cDNA: 24157., supported by cDNA: gi_18086445, supported by

SEQ ID NO: 73505 - protein, 205 aa, Arabidopsis thaliana; identical to SEQ ID NO: 27359
  peptide (1)..(205): Ceres Seq. ID no. 4971096
  misc_feature (1)..(62): Pfam Name: Plant protein of unknown function (DUF822) Pfam Description: Plant protein of unknown function (DUF822)
  misc_feature (1)..(205): Homolog of NCBI NO: 15234055 NR Description: putative protein; protein id: At4g18890.1, by cDNA: 6321. [Arabidopsis thaliana] >gi|7485425|pir||T05026
  misc_feature (1)..(118): Homolog of NCBI NO: 18412073 NR Description: expressed protein; protein id: At1g78700.1, by cDNA: gi_15215801, supported by cDNA: gi_19699251 [Arabidopsis
  misc_feature (1)..(200): Homolog of NCBI NO: 33146833 NR Description: putative mature anther-specific protein LAT61
  misc_feature (1)..(146): Homolog of NCBI NO: 34903720 NR Description: P0489A05.26 [Oryza sativa (japonica
  misc_feature (1)..(205): Homolog of NCBI NO: 14626761 NR Description: mature anther-specific protein LAT61
  misc_feature (1)..(146): Homolog of NCBI NO: 15230298 NR Description: putative protein; protein id: At3g50750.1
  misc_feature (1)..(108): Homolog of NCBI NO: 15215731 NR Description: AT4g36780/C7A10_580 [Arabidopsis thaliana]
  misc_feature (1)..(150): Homolog of NCBI NO: 21592457 NR Description: unknown [Arabidopsis thaliana]
  misc_feature (1)..(150): Homolog of NCBI NO: 6651069 NR Description: 107 protein [Arabidopsis thaliana]
  misc_feature (1)..(150): Homolog of NCBI NO: 18394728 NR Description: expressed protein; protein id: At1g19350.1, by cDNA: 24157., supported by cDNA: gi_18086445, supported by

SEQ ID NO: 73506 - DNA, 1104 bp, Arabidopsis thaliana
  misc_feature (1)..(1104): Ceres Seq. ID no. 4971166
  misc_feature: MA Experiment ID: 108576 Result: Up-regulated in Transcription
  misc_feature: MA Experiment 108576 PARAMETER Experiment Name: At_42deg_Heat_cDNA_P Parameter: Temperature (deg C) Value: 42 vs. 22
  misc_feature: MA Experiment 108576 PARAMETER Experiment Name: At_42deg_Heat_cDNA_P Parameter: Timepoint (hr) Value: 1
  misc_feature: MA Experiment 108576 PARAMETER Experiment Name: At_42deg_Heat_cDNA_P Parameter: Tissue Value: Aerial
aacaaaagacaaaaactttcaattatgtgaagaatcgtacacctttcttatcgtcttctccatcgtttctccctgaagatttgttctactactctttttgggttcagtttcataatttaaacaagatgcagctcaaagtccctgaacatcaggttgcaggacacattgctaaagacgggaagcctggtcctctcgtagatgacaagggtcggttcttcaagccacttcagggcgattctcgtggtgaaatcgaggtaaagttctacgaatctttctcctcaaacacagaggttccagaacacatccatagatatttcccggtgtatcacggcactcaagcagttgaaggttctgatggagcagccatgatggtgttggaaaatcttcttgcagaatacacaaaaccatcagtaatggatgttaagatgggttcgagaacatggtatcctgatgcatctgaagaatacatccaaaaatgtttgaagaaagacacgggtaccacaaccgtgtcatcgggtttcaggatctctggtttcgaagtgtatgatcacaaagaatcgagtttctggaagcccgagaggaagcttcttcgcgggctcgatgtagatggagcgagattgactctgaggaagtttgtatcatctaactcactttcggacactggctcgaaacctgactctgcttttgcctcgagtgtttacggcggttcccacgggatcttaacgcagttgctggaactcaagacctggttcgagaaccaaacgctctaccatttcaactcttgttcgattttaatggtctatgagaatgaatccatcttaaagggaaatgatgatgatgctagaccacaagtcaagctggtggattttgctcatgttcttgatggtaatggtgtcattgaccataacttcttgggtggtctttgctctttcataaacttcattcgtgagattcttcagagcccagatgagtctgcagattcttagatttaagttaatttgtttgttatggctttggctgattccaatttttggatataaacttatgtttccttcacatatgtacttgattacctaaagagcagaatacattcgtactcttttc

SEQ ID NO: 73507 - protein, 327 aa, Arabidopsis thaliana
  peptide (1)..(327): Ceres Seq. ID no. 4971167
  misc_feature (58)..(315): Pfam Name: Inositol polyphosphate kinase Pfam Description: Inositol polyphosphate kinase
  misc_feature (42)..(327): Homolog of NCBI NO: 15240776 NR Description: putative protein; protein id: At5g07370.1, by cDNA: 32892. [Arabidopsis thaliana] >gi|11358275|pir||T49876
  misc_feature (42)..(327): Homolog of NCBI NO: 21592823 NR Description: putative inositol hexaphosphate kinase
  misc_feature (42)..(327): Homolog of NCBI NO: 8919088 NR Description: putative inositol hexaphosphate kinase
  misc_feature (44)..(323): Homolog of NCBI NO: 15240350 NR Description: putative protein; protein id: At5g61760.1, by cDNA: 19114., supported by cDNA: gi_15724265, supported by gi_18252262 [Arabidopsis thaliana] >gi|10176869|dbj|BAB10076.1|
  misc_feature (44)..(323): Homolog of NCBI NO: 21553994 NR Description: putative inositol hexaphosphate kinase
  misc_feature (45)..(325): Homolog of NCBI NO: 13509208 NR Description: hypothetical protein [Linum usitatissimum]
  misc_feature (44)..(316): Homolog of NCBI NO: 13509210 NR Description: hypothetical protein [Linum usitatissimum]
  misc_feature (43)..(318): Homolog of NCBI NO: 21430778 NR Description: SD14726p [Drosophila melanogaster]
  misc_feature (43)..(318): Homolog of NCBI NO: 24580674 NR Description: CG13688-PA [Drosophila melanogaster]
  misc_feature (46)..(277): Homolog of NCBI NO: 26331140 NR Description: unnamed protein product [Mus musculus]
QKTKTFNYVKNRTPFLSSSPSFLPEDLFYYSFWVQFHNLNKMQLKVPEHQVAGHIAKDGKPGPLVDDKGRFFKPLQGDSRGEIEVKFYESFSSNTEVPEHIHRYFPVYHGTQAVEGSDGAAMMVLENLLAEYTKPSVMDVKMGSRTWYPDASEEYIQKCLKKDTGTTTVSSGFRISGFEVYDHKESSFWKPERKLLRGLDVDGARLTLRKFVSSNSLSDTGSKPDSAFASSVYGGSHGILTQLLELKTWFENQTLYHFNSCSILMVYENESILKGNDDDARPQVKLVDFAHVLDGNGVIDHNFLGGLCSFINFIREILQSPDESADS

SEQ ID NO: 73508 - protein, 286 aa, Arabidopsis thaliana; identical to SEQ ID NO: 41829
  peptide (1)..(286): Ceres Seq. ID no. 4971168
  misc_feature (17)..(274): Pfam Name: Inositol polyphosphate kinase Pfam Description: Inositol polyphosphate kinase
  misc_feature (1)..(286): Homolog of NCBI NO: 15240776 NR Description: putative protein; protein id: At5g07370.1, by cDNA: 32892. [Arabidopsis thaliana] >gi|11358275|pir||T49876
  misc_feature (1)..(286): Homolog of NCBI NO: 21592823 NR Description: putative inositol hexaphosphate kinase
  misc_feature (1)..(286): Homolog of NCBI NO: 8919088 NR Description: putative inositol hexaphosphate kinase
  misc_feature (3)..(282): Homolog of NCBI NO: 15240350 NR Description: putative protein; protein id: At5g61760.1, by cDNA: 19114., supported by cDNA: gi_15724265, supported by gi_18252262 [Arabidopsis thaliana] >gi|10176869|dbj|BAB10076.1|
  misc_feature (3)..(282): Homolog of NCBI NO: 21553994 NR Description: putative inositol hexaphosphate kinase
  misc_feature (4)..(284): Homolog of NCBI NO: 13509208 NR Description: hypothetical protein [Linum usitatissimum]
  misc_feature (3)..(275): Homolog of NCBI NO: 13509210 NR Description: hypothetical protein [Linum usitatissimum]
  misc_feature (2)..(277): Homolog of NCBI NO: 21430778 NR Description: SD14726p [Drosophila melanogaster]
  misc_feature (2)..(277): Homolog of NCBI NO: 24580674 NR Description: CG13688-PA [Drosophila melanogaster]
  misc_feature (5)..(236): Homolog of NCBI NO: 26331140 NR Description: unnamed protein product [Mus musculus]

SEQ ID NO: 73509 - protein, 206 aa, Arabidopsis thaliana; identical to SEQ ID NO: 41830
  peptide (1)..(206): Ceres Seq. ID no. 4971169
  misc_feature (1)..(194): Pfam Name: Inositol polyphosphate kinase Pfam Description: Inositol polyphosphate kinase
  misc_feature (1)..(206): Homolog of NCBI NO: 15240776 NR Description: putative protein; protein id: At5g07370.1, by cDNA: 32892. [Arabidopsis thaliana] >gi|11358275|pir||T49876
  misc_feature (1)..(206): Homolog of NCBI NO: 21592823 NR Description: putative inositol hexaphosphate kinase
  misc_feature (1)..(206): Homolog of NCBI NO: 8919088 NR Description: putative inositol hexaphosphate kinase
  misc_feature (1)..(202): Homolog of NCBI NO: 15240350 NR Description: putative protein; protein id: At5g61760.1, by cDNA: 19114., supported by cDNA: gi_15724265, supported by gi_18252262 [Arabidopsis thaliana] >gi|10176869|dbj|BAB10076.1|
  misc_feature (1)..(202): Homolog of NCBI NO: 21553994 NR Description: putative inositol hexaphosphate kinase
  misc_feature (1)..(204): Homolog of NCBI NO: 13509208 NR Description: hypothetical protein [Linum usitatissimum]
  misc_feature (1)..(195): Homolog of NCBI NO: 13509210 NR Description: hypothetical protein [Linum usitatissimum]
  misc_feature (1)..(197): Homolog of NCBI NO: 21430778 NR Description: SD14726p [Drosophila melanogaster]
  misc_feature (1)..(197): Homolog of NCBI NO: 24580674 NR Description: CG13688-PA [Drosophila melanogaster]
  misc_feature (1)..(156): Homolog of NCBI NO: 26331140 NR Description: unnamed protein product [Mus musculus]

SEQ ID NO: 73510 - DNA, 1192 bp, Arabidopsis thaliana
  misc_feature (1)..(1192): Ceres Seq. ID no. 4971184
  misc_feature: MA Experiment ID: 108462 Result: Down-regulated in Transcription
  misc_feature: MA Experiment 108462 PARAMETER Experiment Name: At_Germinating_Seeds_cDNA_P Parameter: Age (day) Value: 2 vs. 0
  misc_feature: MA Experiment 108462 PARAMETER Experiment Name: At_Germinating_Seeds_cDNA_P Parameter: Tissue Value: Germinating Seeds
  misc_feature: MA Experiment ID: 108463 Result: Down-regulated in Transcription
  misc_feature: MA Experiment 108463 PARAMETER Experiment Name: At_Germinating_Seeds_cDNA_P Parameter: Age (day) Value: 3 vs. 0
  misc_feature: MA Experiment 108463 PARAMETER Experiment Name: At_Germinating_Seeds_cDNA_P Parameter: Tissue Value: Germinating Seeds
  misc_feature: MA Experiment ID: 108561 Result: Up-regulated in Transcription
  misc_feature: MA Experiment 108561 PARAMETER Experiment Name: At_100uM_ABA_cDNA_P Parameter: Timepoint (hr) Value: 6
  misc_feature: MA Experiment 108561 PARAMETER Experiment Name: At_100uM_ABA_cDNA_P Parameter: Tissue Value: Aerial
  misc_feature: MA Experiment 108561 PARAMETER Experiment Name: At_100uM_ABA_cDNA_P Parameter: Treatment Value: 100uM ABA vs. No Treatment
  misc_feature: MA Experiment ID: 108594 Result: Down-regulated in Transcription
  misc_feature: MA Experiment 108594 PARAMETER Experiment Name: At_Ler-rhl_Root_cDNA_P Parameter: Plant Line Value: null
  misc_feature: MA Experiment ID: 108608 Result: Up-regulated in Transcription
  misc_feature: MA Experiment 108608 PARAMETER Experiment Name: At_100uM_ABA_cDNA_P Parameter: Timepoint (hr) Value: 1
  misc_feature: MA Experiment 108608 PARAMETER Experiment Name: At_100uM_ABA_cDNA_P Parameter: Tissue Value: Aerial
  misc_feature: MA Experiment 108608 PARAMETER Experiment Name: At_100uM_ABA_cDNA_P Parameter: Treatment Value: 100uM ABA vs. No Treatment
  misc_feature: MA Experiment ID: 20000069 Result: Up-regulated in Transcription
  misc_feature: MA Experiment 20000069 PARAMETER Experiment Name: At_100uM_ABA_Mutants_cDNA_P Parameter: Plant Line Value: CS23
  misc_feature: MA Experiment 20000069 PARAMETER Experiment Name: At_100uM_ABA_Mutants_cDNA_P Parameter: Timepoint (hr) Value: 6
  misc_feature: MA Experiment 20000069 PARAMETER Experiment Name: At_100uM_ABA_Mutants_cDNA_P Parameter: Tissue Value: Aerial
  misc_feature: MA Experiment 20000069 PARAMETER Experiment Name: At_100uM_ABA_Mutants_cDNA_P Parameter: Treatment Value: 100uM ABA vs. No Treatment
  misc_feature: MA Experiment ID: 20000070 Result: Up-regulated in Transcription
  misc_feature: MA Experiment 20000070 PARAMETER Experiment Name: At_100uM_ABA_Mutants_cDNA_P Parameter: Plant Line Value: CS24
  misc_feature: MA Experiment 20000070 PARAMETER Experiment Name: At_100uM_ABA_Mutants_cDNA_P Parameter: Timepoint (hr) Value: 6
  misc_feature: MA Experiment 20000070 PARAMETER Experiment Name: At_100uM_ABA_Mutants_cDNA_P Parameter: Tissue Value: Aerial
  misc_feature: MA Experiment 20000070 PARAMETER Experiment Name: At_100uM_ABA_Mutants_cDNA_P Parameter: Treatment Value: 100uM ABA vs. No Treatment
  misc_feature: MA Experiment ID: 20000166 Result: Up-regulated in Transcription
  misc_feature: MA Experiment 20000166 PARAMETER Experiment Name: At_100uM_ABA_P Parameter: Age (day) Value: 14
  misc_feature: MA Experiment 20000166 PARAMETER Experiment Name: At_100uM_ABA_P Parameter: Organism Value: A. thaliana
  misc_feature: MA Experiment 20000166 PARAMETER Experiment Name: At_100uM_ABA_P Parameter: Plant Line Value: WS
  misc_feature: MA Experiment 20000166 PARAMETER Experiment Name: At_100uM_ABA_P Parameter: Timepoint (hr) Value: 1
  misc_feature: MA Experiment 20000166 PARAMETER Experiment Name: At_100uM_ABA_P Parameter: Tissue Value: Aerial
  misc_feature: MA Experiment 20000166 PARAMETER Experiment Name: At_100uM_ABA_P Parameter: Treatment Value: 100uM ABA vs. No Treatment
  misc_feature: MA Experiment ID: 20000182 Result: Up-regulated in Transcription
  misc_feature: MA Experiment 20000182 PARAMETER Experiment Name: At_2mM_SA_P Parameter: Age (day) Value: 14
  misc_feature: MA Experiment 20000182 PARAMETER Experiment Name: At_2mM_SA_P Parameter: Organism Value: A. thaliana
  misc_feature: MA Experiment 20000182 PARAMETER Experiment Name: At_2mM_SA_P Parameter: Plant Line Value: WS
  misc_feature: MA Experiment 20000182 PARAMETER Experiment Name: At_2mM_SA_P Parameter: Timepoint (hr) Value: 6
  misc_feature: MA Experiment 20000182 PARAMETER Experiment Name: At_2mM_SA_P Parameter: Tissue Value: Aerial
  misc_feature: MA Experiment 20000182 PARAMETER Experiment Name: At_2mM_SA_P Parameter: Treatment Value: 2mM SA vs. No Treatment
  misc_feature: MA Experiment ID: 20000185 Result: Up-regulated in Transcription
  misc_feature: MA Experiment 20000185 PARAMETER Experiment Name: At_Roots__P Parameter: Age (day) Value: 7 vs. 21
  misc_feature: MA Experiment 20000185 PARAMETER Experiment Name: At_Roots__P Parameter: Organism Value: A. thaliana
  misc_feature: MA Experiment 20000185 PARAMETER Experiment Name: At_Roots__P Parameter: Tissue Value: Roots vs. Whole Plant
  misc_feature: MA Experiment ID: 20000227 Result: Down-regulated in Transcription
  misc_feature: MA Experiment 20000227 PARAMETER Experiment Name: At_Root-Tips-vs-Tops_P Parameter: Tissue Value: Root Tips vs. Root Tops
  misc_feature: MA Experiment ID: 20000234 Result: Down-regulated in Transcription
  misc_feature: MA Experiment 20000234 PARAMETER Experiment Name: At_Siliques_P Parameter: Age (day) Value: 21
  misc_feature: MA Experiment 20000234 PARAMETER Experiment Name: At_Siliques_P Parameter: Organism Value: A. thaliana
  misc_feature: MA Experiment 20000234 PARAMETER Experiment Name: At_Siliques_P Parameter: Plant Line Value: WS
  misc_feature: MA Experiment 20000234 PARAMETER Experiment Name: At_Siliques_P Parameter: Tissue Value: Less Than 5mm Siliques vs. Whole Plant
  misc_feature: MA Experiment ID: 20000235 Result: Down-regulated in Transcription
  misc_feature: MA Experiment 20000235 PARAMETER Experiment Name: At_Siliques_P Parameter: Age (day) Value: 21
  misc_feature: MA Experiment 20000235 PARAMETER Experiment Name: At_Siliques_P Parameter: Organism Value: A. thaliana
  misc_feature: MA Experiment 20000235 PARAMETER Experiment Name: At_Siliques_P Parameter: Plant Line Value: WS
  misc_feature: MA Experiment 20000235 PARAMETER Experiment Name: At_Siliques_P Parameter: Tissue Value: 5-10mm Siliques vs. Whole Plant
  misc_feature: MA Experiment ID: 20000264 Result: Up-regulated in Transcription
  misc_feature: MA Experiment 20000264 PARAMETER Experiment Name: At_Open_Flower_P Parameter: Age (day) Value: 21
  misc_feature: MA Experiment 20000264 PARAMETER Experiment Name: At_Open_Flower_P Parameter: Plant Line Value: WS
  misc_feature: MA Experiment 20000264 PARAMETER Experiment Name: At_Open_Flower_P Parameter: Tissue Value: Open Flower vs. Whole Plant
  misc_feature: MA Experiment ID: 20000265 Result: Up-regulated in Transcription
  misc_feature: MA Experiment 20000265 PARAMETER Experiment Name: At_Open_Flower_P Parameter: Age (day) Value: 21
  misc_feature: MA Experiment 20000265 PARAMETER Experiment Name: At_Open_Flower_P Parameter: Plant Line Value: WS
  misc_feature: MA Experiment 20000265 PARAMETER Experiment Name: At_Open_Flower_P Parameter: Tissue Value: Closed Flower vs. Whole Plant
  misc_feature: MA Experiment ID: 20000286 Result: Up-regulated in Transcription
  misc_feature: MA Experiment 20000286 PARAMETER Experiment Name: At_Open_Flower_P Parameter: Age (day) Value: 21
  misc_feature: MA Experiment 20000286 PARAMETER Experiment Name: At_Open_Flower_P Parameter: Plant Line Value: WS
  misc_feature: MA Experiment 20000286 PARAMETER Experiment Name: At_Open_Flower_P Parameter: Tissue Value: Half Open vs. Whole Plant
  misc_feature: MA Experiment ID: 20000439 Result: Up-regulated in Transcription
  misc_feature: MA Experiment 20000439 PARAMETER Experiment Name: At_Roots__P Parameter: Age (day) Value: 14 vs. 21
  misc_feature: MA Experiment 20000439 PARAMETER Experiment Name: At_Roots__P Parameter: Organism Value: A. thaliana
  misc_feature: MA Experiment 20000439 PARAMETER Experiment Name: At_Roots__P Parameter: Tissue Value: Roots vs. Whole Plant
  misc_feature: MA Experiment ID: 20000453 Result: Up-regulated in Transcription
  misc_feature: MA Experiment 20000453 PARAMETER Experiment Name: At_100uM_ABA_P Parameter: Age (day) Value: 15
  misc_feature: MA Experiment 20000453 PARAMETER Experiment Name: At_100uM_ABA_P Parameter: Organism Value: A. thaliana
  misc_feature: MA Experiment 20000453 PARAMETER Experiment Name: At_100uM_ABA_P Parameter: Plant Line Value: WS
  misc_feature: MA Experiment 20000453 PARAMETER Experiment Name: At_100uM_ABA_P Parameter: Timepoint (hr) Value: 24
  misc_feature: MA Experiment 20000453 PARAMETER Experiment Name: At_100uM_ABA_P Parameter: Tissue Value: Aerial
  misc_feature: MA Experiment 20000453 PARAMETER Experiment Name: At_100uM_ABA_P Parameter: Treatment Value: 100uM ABA vs. No Treatment
  misc_feature: MA Experiment ID: 20000574 Result: Up-regulated in Transcription
  misc_feature: MA Experiment 20000574 PARAMETER Experiment Name: At_100uM_ABA_Mutants__P Parameter: Organism Value: A. thaliana
  misc_feature: MA Experiment 20000574 PARAMETER Experiment Name: At_100uM_ABA_Mutants__P Parameter: Plant Line Value: CS23 vs. Ler wt
  misc_feature: MA Experiment 20000574 PARAMETER Experiment Name: At_100uM_ABA_Mutants__P Parameter: Timepoint (hr) Value: N/A
  misc_feature: MA Experiment 20000574 PARAMETER Experiment Name: At_100uM_ABA_Mutants__P Parameter: Tissue Value: Whole Plant
  misc_feature: MA Experiment 20000574 PARAMETER Experiment Name: At_100uM_ABA_Mutants__P Parameter: Treatment Value: None
  misc_feature: MA Experiment ID: 20000794 Result: Up-regulated in Transcription
  misc_feature: MA Experiment 20000794 PARAMETER Experiment Name: At_Petals_P Parameter: Age (day) Value: 23-25 days
  misc_feature: MA Experiment 20000794 PARAMETER Experiment Name: At_Petals_P Parameter: Plant Line Value: WS
  misc_feature: MA Experiment 20000794 PARAMETER Experiment Name: At_Petals_P Parameter: Tissue Value: Petals vs. Whole plant
  misc_feature: MA Experiment ID: 20001904 Result: Up-regulated in Transcription
  misc_feature: MA Experiment 20001904 PARAMETER Experiment Name: At_Drought_Reproduction_P Parameter: Age (day) Value: 37
  misc_feature: MA Experiment 20001904 PARAMETER Experiment Name: At_Drought_Reproduction_P Parameter: Organism Value: A. thaliana
  misc_feature: MA Experiment 20001904 PARAMETER Experiment Name: At_Drought_Reproduction_P Parameter: Plant Line Value: WS
  misc_feature: MA Experiment 20001904 PARAMETER Experiment Name: At_Drought_Reproduction_P Parameter: Timepoint (day) Value: 7
  misc_feature: MA Experiment 20001904 PARAMETER Experiment Name: At_Drought_Reproduction_P Parameter: Tissue Value: Rosettes
  misc_feature: MA Experiment 20001904 PARAMETER Experiment Name: At_Drought_Reproduction_P Parameter: Treatment Value: Drought vs. No Drought
  misc_feature: MA Experiment ID: 20001905 Result: Up-regulated in Transcription
  misc_feature: MA Experiment 20001905 PARAMETER Experiment Name: At_Drought_Reproduction_P Parameter: Age (day) Value: 40
  misc_feature: MA Experiment 20001905 PARAMETER Experiment Name: At_Drought_Reproduction_P Parameter: Organism Value: A. thaliana
  misc_feature: MA Experiment 20001905 PARAMETER Experiment Name: At_Drought_Reproduction_P Parameter: Plant Line Value: WS
  misc_feature: MA Experiment 20001905 PARAMETER Experiment Name: At_Drought_Reproduction_P Parameter: Timepoint (day) Value: 10
  misc_feature: MA Experiment 20001905 PARAMETER Experiment Name: At_Drought_Reproduction_P Parameter: Tissue Value: Rosettes
  misc_feature: MA Experiment 20001905 PARAMETER Experiment Name: At_Drought_Reproduction_P Parameter: Treatment Value: Drought vs. No Drought
  misc_feature: MA Experiment ID: 20001906 Result: Up-regulated in Transcription
  misc_feature: MA Experiment 20001906 PARAMETER Experiment Name: At_Drought_Reproduction_P Parameter: Age (day) Value: 35
  misc_feature: MA Experiment 20001906 PARAMETER Experiment Name: At_Drought_Reproduction_P Parameter: Organism Value: A. thaliana
  misc_feature: MA Experiment 20001906 PARAMETER Experiment Name: At_Drought_Reproduction_P Parameter: Plant Line Value: WS
  misc_feature: MA Experiment 20001906 PARAMETER Experiment Name: At_Drought_Reproduction_P Parameter: Timepoint (day) Value: 5
  misc_feature: MA Experiment 20001906 PARAMETER Experiment Name: At_Drought_Reproduction_P Parameter: Tissue Value: Siliques
  misc_feature: MA Experiment 20001906 PARAMETER Experiment Name: At_Drought_Reproduction_P Parameter: Treatment Value: Drought vs. No Drought
  misc_feature: MA Experiment ID: 20001908 Result: Up-regulated in Transcription
  misc_feature: MA Experiment 20001908 PARAMETER Experiment Name: At_Drought_Reproduction_P Parameter: Age (day) Value: 40
  misc_feature: MA Experiment 20001908 PARAMETER Experiment Name: At_Drought_Reproduction_P Parameter: Organism Value: A. thaliana
  misc_feature: MA Experiment 20001908 PARAMETER Experiment Name: At_Drought_Reproduction_P Parameter: Plant Line Value: WS
  misc_feature: MA Experiment 20001908 PARAMETER Experiment Name: At_Drought_Reproduction_P Parameter: Timepoint (day) Value: 10
  misc_feature: MA Experiment 20001908 PARAMETER Experiment Name: At_Drought_Reproduction_P Parameter: Tissue Value: Siliques
  misc_feature: MA Experiment 20001908 PARAMETER Experiment Name: At_Drought_Reproduction_P Parameter: Treatment Value: Drought vs. No Drought
aaagaaaaactatttaagaaacatatgttttggatcaagtaagggtttgatcttgtaccggaatcagatggatttgcctcctggttttaggtttcatccaacagacgaagaactcataacccactatctccacaagaaggttcttgaccttggtttctcggctaaagctattggtgaggttgatttgaacaaagctgagccatgggagttgccatataaagcaaaaattggtgagaaagaatggtactttttctgtgtgagggatagaaagtatccgactggtctgaggactaaccgagcaactcaagccggttattggaaggcgacagggaaggataaagagatcttccgaggcaaatcgcttgttggtatgaagaaaacacttgttttctacagaggaagagctcctaaaggccagaaaacaaattgggtgatgcatgagtataggctagatggaaaactctctgctcacaacttgcctaaaaccgctaagaatgaatgggtgatctgcagggtatttcataaaactgctggaggtaagaagatcccgatttcgacgttaatccgaatcggttcttacggaaccgggtctagtttaccacctttaactgattcttcaccatacaacgacaaaaccaagaccgaaccagtttacgtgccctgcttctccaaccaagctgaaactagaggaacaatactcaattgcttcagcaacccttcccttagctccatccaaccagattttctccagatgattccactctaccaacctcaatctctcaacatttccgagagttccaatccggttcttacgcaagaacaatcagttttacaagcgatgatggaaaacaacagaaggcagaacttcaaaacattgagcatctcgcaagaaaccggggtttcgaacaccgataactcatcggtttttgaatttgggaggaagcgatttgatcatcaagaagttccatctccctcttccggtccggttgatcttgaacctttctggaattactgaagattcagaacctgaaaagtctattaatttaggtcacaagtaagaaaatctttgcaaagttttatccttttagcgtggtgtgctaagcttgtatagattattgacactacttcctgtattagtgttttatattattatattcaactaaagttaatattagagaggataaaatgaagc

SEQ ID NO: 73511 - protein, 337 aa, Arabidopsis thaliana; identical to SEQ ID NO: 24166
  peptide (1)..(337): Ceres Seq. ID no. 4971185
  misc_feature (25)..(151): Pfam Name: No apical meristem (NAM) protein Pfam Description: No apical meristem (NAM) protein
  misc_feature (22)..(337): Homolog of NCBI NO: 30682048 NR Description: NAM (no apical meristem)-related protein
  misc_feature (23)..(337): Homolog of NCBI NO: 30682054 NR Description: NAM (no apical meristem)-related protein
  misc_feature (22)..(337): Homolog of NCBI NO: 15240252 NR Description: NAM, no apical meristem, - like protein; protein At5g61430.1, supported by cDNA: 12970., supported by cDNA:
  misc_feature (23)..(337): Homolog of NCBI NO: 21537315 NR Description: NAM, no apical meristem,-like protein

SEQ ID NO: 73512 - protein, 315 aa, Arabidopsis thaliana; identical to SEQ ID NO: 23928
  peptide (1)..(315): Ceres Seq. ID no. 4971186
  misc_feature (3)..(129): Pfam Name: No apical meristem (NAM) protein Pfam Description: No apical meristem (NAM) protein
  misc_feature (1)..(315): Homolog of NCBI NO: 30682048 NR Description: NAM (no apical meristem)-related protein
  misc_feature (1)..(315): Homolog of NCBI NO: 30682054 NR Description: NAM (no apical meristem)-related protein
  misc_feature (1)..(315): Homolog of NCBI NO: 15240252 NR Description: NAM, no apical meristem, - like protein; protein At5g61430.1, supported by cDNA: 12970., supported by cDNA:
  misc_feature (1)..(315): Homolog of NCBI NO: 21537315 NR Description: NAM, no apical meristem,-like protein

SEQ ID NO: 73513 - protein, 214 aa, Arabidopsis thaliana; identical to SEQ ID NO: 23929
  peptide (1)..(214): Ceres Seq. ID no. 4971187
  misc_feature (1)..(214): Homolog of NCBI NO: 30682048 NR Description: NAM (no apical meristem)-related protein
  misc_feature (1)..(214): Homolog of NCBI NO: 30682054 NR Description: NAM (no apical meristem)-related protein
  misc_feature (1)..(214): Homolog of NCBI NO: 15240252 NR Description: NAM, no apical meristem, - like protein; protein At5g61430.1, supported by cDNA: 12970., supported by cDNA:
  misc_feature (1)..(214): Homolog of NCBI NO: 21537315 NR Description: NAM, no apical meristem,-like protein

SEQ ID NO: 73514 - DNA, 1132 bp, Arabidopsis thaliana
  misc_feature (1)..(1132): Ceres Seq. ID no. 4971311
  misc_feature: MA Experiment ID: 108501 Result: Up-regulated in Transcription
  misc_feature: MA Experiment 108501 PARAMETER Experiment Name: At_ap2_floral_buds_cDNA_P Parameter: Plant Line Value: ap2 (Ler.)
  misc_feature: MA Experiment 108501 PARAMETER Experiment Name: At_ap2_floral_buds_cDNA_P Parameter: Tissue Value: Closed Flower
  misc_feature: MA Experiment ID: 108569 Result: Up-regulated in Transcription
  misc_feature: MA Experiment 108569 PARAMETER Experiment Name: At_0.001%_MeJA__cDNA_P Parameter: Timepoint (hr) Value: 6
  misc_feature: MA Experiment 108569 PARAMETER Experiment Name: At_0.001%_MeJA__cDNA_P Parameter: Tissue Value: Aerial
  misc_feature: MA Experiment 108569 PARAMETER Experiment Name: At_0.001%_MeJA__cDNA_P Parameter: Treatment Value: 0.001% MeJA vs. No Treatment
  misc_feature: MA Experiment ID: 108585 Result: Up-regulated in Transcription
  misc_feature: MA Experiment 108585 PARAMETER Experiment Name: At_5mM_NaNP_cDNA_P Parameter: Timepoint (hr) Value: 6
  misc_feature: MA Experiment 108585 PARAMETER Experiment Name: At_5mM_NaNP_cDNA_P Parameter: Tissue Value: Aerial
  misc_feature: MA Experiment 108585 PARAMETER Experiment Name: At_5mM_NaNP_cDNA_P Parameter: Treatment Value: null
  misc_feature: MA Experiment ID: 108595 Result: Down-regulated in Transcription
  misc_feature: MA Experiment 108595 PARAMETER Experiment Name: At_Ler-pi_Ovule_cDNA_P Parameter: Plant Line Value: null
  misc_feature: MA Experiment ID: 20000087 Result: Down-regulated in Transcription
  misc_feature: MA Experiment 20000087 PARAMETER Experiment Name: At_100uM_ABA_Mutants_cDNA_P Parameter: Plant Line Value: WS
  misc_feature: MA Experiment 20000087 PARAMETER Experiment Name: At_100uM_ABA_Mutants_cDNA_P Parameter: Timepoint (hr) Value: 6
  misc_feature: MA Experiment 20000087 PARAMETER Experiment Name: At_100uM_ABA_Mutants_cDNA_P Parameter: Tissue Value: Aerial
  misc_feature: MA Experiment 20000087 PARAMETER Experiment Name: At_100uM_ABA_Mutants_cDNA_P Parameter: Treatment Value: 100uM ABA vs. No Treatment
  misc_feature: MA Experiment ID: 20000113 Result: Down-regulated in Transcription
  misc_feature: MA Experiment 20000113 PARAMETER Experiment Name: At_42deg_Heat_cDNA_P Parameter: Temperature (deg C) Value: 42 vs. 22
  misc_feature: MA Experiment 20000113 PARAMETER Experiment Name: At_42deg_Heat_cDNA_P Parameter: Timepoint (hr) Value: 8
  misc_feature: MA Experiment 20000113 PARAMETER Experiment Name: At_42deg_Heat_cDNA_P Parameter: Tissue Value: Aerial
  misc_feature: MA Experiment ID: 20000173 Result: Down-regulated in Transcription
  misc_feature: MA Experiment 20000173 PARAMETER Experiment Name: At_42deg_Heat_P Parameter: Age (day) Value: 14
  misc_feature: MA Experiment 20000173 PARAMETER Experiment Name: At_42deg_Heat_P Parameter: Organism Value: A. thaliana
  misc_feature: MA Experiment 20000173 PARAMETER Experiment Name: At_42deg_Heat_P Parameter: Plant Line Value: WS
  misc_feature: MA Experiment 20000173 PARAMETER Experiment Name: At_42deg_Heat_P Parameter: Temperature (deg C) Value: 42 vs. 22
  misc_feature: MA Experiment 20000173 PARAMETER Experiment Name: At_42deg_Heat_P Parameter: Timepoint (hr) Value: 6
  misc_feature: MA Experiment 20000173 PARAMETER Experiment Name: At_42deg_Heat_P Parameter: Tissue Value: Aerial
  misc_feature: MA Experiment ID: 20001247 Result: Down-regulated in Transcription
  misc_feature: MA Experiment 20001247 PARAMETER Experiment Name: At_Far-red-induction_P Parameter: Age (day) Value: 7
  misc_feature: MA Experiment 20001247 PARAMETER Experiment Name: At_Far-red-induction_P Parameter: Light Value: Far-red vs. White
  misc_feature: MA Experiment 20001247 PARAMETER Experiment Name: At_Far-red-induction_P Parameter: Organism Value: A. thaliana
  misc_feature: MA Experiment 20001247 PARAMETER Experiment Name: At_Far-red-induction_P Parameter: Plant Line Value: Columbia
  misc_feature: MA Experiment 20001247 PARAMETER Experiment Name: At_Far-red-induction_P Parameter: Timepoint (hr) Value: 1
  misc_feature: MA Experiment 20001247 PARAMETER Experiment Name: At_Far-red-induction_P Parameter: Tissue Value: Whole Plant
  misc_feature: MA Experiment ID: 20001554 Result: Down-regulated in Transcription
  misc_feature: MA Experiment 20001554 PARAMETER Experiment Name: At_Drought_Soil_Dry_P Parameter: Age (day) Value: 21
  misc_feature: MA Experiment 20001554 PARAMETER Experiment Name: At_Drought_Soil_Dry_P Parameter: Organism Value: A. thaliana
  misc_feature: MA Experiment 20001554 PARAMETER Experiment Name: At_Drought_Soil_Dry_P Parameter: Plant Line Value: WS
  misc_feature: MA Experiment 20001554 PARAMETER Experiment Name: At_Drought_Soil_Dry_P Parameter: Post Timepoint (hr) Value: None
  misc_feature: MA Experiment 20001554 PARAMETER Experiment Name: At_Drought_Soil_Dry_P Parameter: Post-Treatment Value: None
  misc_feature: MA Experiment 20001554 PARAMETER Experiment Name: At_Drought_Soil_Dry_P Parameter: Timepoint (day) Value: 7
  misc_feature: MA Experiment 20001554 PARAMETER Experiment Name: At_Drought_Soil_Dry_P Parameter: Treatment Value: Drought vs. No Drought
  misc_feature: MA Experiment ID: 20001560 Result: Up-regulated in Transcription
  misc_feature: MA Experiment 20001560 PARAMETER Experiment Name: At_Drought_Soil_Dry_P Parameter: Age (day) Value: 28
  misc_feature: MA Experiment 20001560 PARAMETER Experiment Name: At_Drought_Soil_Dry_P Parameter: Organism Value: A. thaliana
  misc_feature: MA Experiment 20001560 PARAMETER Experiment Name: At_Drought_Soil_Dry_P Parameter: Plant Line Value: WS
  misc_feature: MA Experiment 20001560 PARAMETER Experiment Name: At_Drought_Soil_Dry_P Parameter: Post Timepoint (hr) Value: None
  misc_feature: MA Experiment 20001560 PARAMETER Experiment Name: At_Drought_Soil_Dry_P Parameter: Post-Treatment Value: None
  misc_feature: MA Experiment 20001560 PARAMETER Experiment Name: At_Drought_Soil_Dry_P Parameter: Timepoint (day) Value: 14
  misc_feature: MA Experiment 20001560 PARAMETER Experiment Name: At_Drought_Soil_Dry_P Parameter: Treatment Value: Drought vs. No Drought
acaacaataaacactcatcgattaaatcttcttcaccggaaaaaatgccttcgatgccagaggaaccaatcctaacaccaacaccagatcgattctgtatgttcccaatccaatacccacagatttgggagatgtacaagaaagccgaagcatccttctggacagccgaagaagtcgatctctctcaagacaatcgcgactgggaaaactcactaaccaacgacgaacgtcacttcattaaacacgtcctcgccttcttcgccgcatcagacggaatcgttctcgagaatctctcaactagattcatgtccgatgttcagatctcagaagctcgtgccttctacggattccaaatcgcgattgagaatattcactccgagatgtatagtctccttctcgacacgtatatcaaagacaacaaagagagagatcatctttttcgtgcaatcgaaaccattccttgtgacgaaaaaagcagaatgggctatgaaatggatcaacggatctcaaagcttcgctgagagaatcgtagcgtttgcttgcgttgaaggtatattcttctccggtagcttttgttcgatattctggttgaagaaacgaggtttaatgcctggactcactttttcaaacgaattgatttcgagagacgaaggtcttcactgtgatttcgcttgtttgatatatagtcttcttagaactaagtttgatgaagatcgtttgaaagcgattgtttgtgatgctgttgagattgagagagagtttgtttgtgacgcgctttcttgtgccttggttgggatgaatcgtgagttgatgagtcagtacattgagttcgttgctgataggttgttggctgcgcttgggtgtggtaaggtgtatggtgtgactaatccttttgattggatggaattgatttcgcttcagggtaagaccaacttttttgagaagagagttggtgagtatcagaaagcttctgttatgtctagtgttcatggaaacgctgcgtttaatgatgatcatgtcttcaagcttgacgaggatttttagattttgcttacttgctttatttttagttttgtaattttcagtataatgaaaaacagatgaagtttaatttgataatggacatttaatt

SEQ ID NO: 73515 - protein, 243 aa, Arabidopsis thaliana; identical to SEQ ID NO: 41883
  peptide (1)..(243): Ceres Seq. ID no. 4971312
  misc_feature (30)..(198): Pfam Name: Ribonucleotide reductase, small chain Pfam Description: Ribonucleotide reductase, small chain
  misc_feature (30)..(243): Homolog of NCBI NO: 15232077 NR Description: ribonucleotide reductase small subunit, putative; id: At3g27060.1, supported by cDNA: gi_17380725 [Arabidopsis >gi|9279629|dbj|BAB01087.1| ribonucleotide reductase [Arabidopsis
  misc_feature (37)..(243): Homolog of NCBI NO: 1710401 NR Description: RIBONUCLEOSIDE-DIPHOSPHATE REDUCTASE SMALL CHAIN
  misc_feature (30)..(243): Homolog of NCBI NO: 34898038 NR Description: putative ribonucleoside-diphosphate reductase
  misc_feature (1)..(243): Homolog of NCBI NO: 28393533 NR Description: putative ribonucleoside-diphosphate reductase

SEQ ID NO: 73516 - protein, 185 aa, Arabidopsis thaliana; identical to SEQ ID NO: 41884
  peptide (1)..(185): Ceres Seq. ID no. 4971313
  misc_feature (1)..(140): Pfam Name: Ribonucleotide reductase, small chain Pfam Description: Ribonucleotide reductase, small chain
  misc_feature (1)..(185): Homolog of NCBI NO: 15232077 NR Description: ribonucleotide reductase small subunit, putative; id: At3g27060.1, supported by cDNA: gi_17380725 [Arabidopsis >gi|9279629|dbj|BAB01087.1| ribonucleotide reductase [Arabidopsis
  misc_feature (1)..(185): Homolog of NCBI NO: 1710401 NR Description: RIBONUCLEOSIDE-DIPHOSPHATE REDUCTASE SMALL CHAIN
  misc_feature (1)..(185): Homolog of NCBI NO: 34898038 NR Description: putative ribonucleoside-diphosphate reductase
  misc_feature (1)..(185): Homolog of NCBI NO: 28393533 NR Description: putative ribonucleoside-diphosphate reductase

SEQ ID NO: 73517 - protein, 172 aa, Arabidopsis thaliana; identical to SEQ ID NO: 41885
  peptide (1)..(172): Ceres Seq. ID no. 4971314
  misc_feature (21)..(157): Pfam Name: Ribonucleotide reductase, small chain Pfam Description: Ribonucleotide reductase, small chain
  misc_feature (15)..(157): Homolog of NCBI NO: 15232077 NR Description: ribonucleotide reductase small subunit, putative; id: At3g27060.1, supported by cDNA: gi_17380725 [Arabidopsis >gi|9279629|dbj|BAB01087.1| ribonucleotide reductase [Arabidopsis
  misc_feature (15)..(157): Homolog of NCBI NO: 1710401 NR Description: RIBONUCLEOSIDE-DIPHOSPHATE REDUCTASE SMALL CHAIN
  misc_feature (20)..(153): Homolog of NCBI NO: 34898038 NR Description: putative ribonucleoside-diphosphate reductase

SEQ ID NO: 73518 - DNA, 684 bp, Arabidopsis thaliana
  misc_feature (1)..(684): Ceres Seq. ID no. 4971396
  misc_feature: MA Experiment ID: 20000173 Result: Up-regulated in Transcription
  misc_feature: MA Experiment 20000173 PARAMETER Experiment Name: At_42deg_Heat_P Parameter: Age (day) Value: 14
  misc_feature: MA Experiment 20000173 PARAMETER Experiment Name: At_42deg_Heat_P Parameter: Organism Value: A. thaliana
  misc_feature: MA Experiment 20000173 PARAMETER Experiment Name: At_42deg_Heat_P Parameter: Plant Line Value: WS
  misc_feature: MA Experiment 20000173 PARAMETER Experiment Name: At_42deg_Heat_P Parameter: Temperature (deg C) Value: 42 vs. 22
  misc_feature: MA Experiment 20000173 PARAMETER Experiment Name: At_42deg_Heat_P Parameter: Timepoint (hr) Value: 6
  misc_feature: MA Experiment 20000173 PARAMETER Experiment Name: At_42deg_Heat_P Parameter: Tissue Value: Aerial
  misc_feature: MA Experiment ID: 20000180 Result: Down-regulated in Transcription
  misc_feature: MA Experiment 20000180 PARAMETER Experiment Name: At_Germinating_Seeds_P Parameter: Age (hr) Value: 24 vs. 0
  misc_feature: MA Experiment 20000180 PARAMETER Experiment Name: At_Germinating_Seeds_P Parameter: Tissue Value: Germinating Seeds
  misc_feature: MA Experiment ID: 20000184 Result: Down-regulated in Transcription
  misc_feature: MA Experiment 20000184 PARAMETER Experiment Name: At_Shoots__P Parameter: Age (day) Value: 7
  misc_feature: MA Experiment 20000184 PARAMETER Experiment Name: At_Shoots__P Parameter: Tissue Value: Shoots vs. Whole Plant
  misc_feature: MA Experiment ID: 20000234 Result: Up-regulated in Transcription
  misc_feature: MA Experiment 20000234 PARAMETER Experiment Name: At_Siliques_P Parameter: Age (day) Value: 21
  misc_feature: MA Experiment 20000234 PARAMETER Experiment Name: At_Siliques_P Parameter: Organism Value: A. thaliana
  misc_feature: MA Experiment 20000234 PARAMETER Experiment Name: At_Siliques_P Parameter: Plant Line Value: WS
  misc_feature: MA Experiment 20000234 PARAMETER Experiment Name: At_Siliques_P Parameter: Tissue Value: Less Than 5mm Siliques vs. Whole Plant
  misc_feature: MA Experiment ID: 20000264 Result: Up-regulated in Transcription
  misc_feature: MA Experiment 20000264 PARAMETER Experiment Name: At_Open_Flower_P Parameter: Age (day) Value: 21
  misc_feature: MA Experiment 20000264 PARAMETER Experiment Name: At_Open_Flower_P Parameter: Plant Line Value: WS
  misc_feature: MA Experiment 20000264 PARAMETER Experiment Name: At_Open_Flower_P Parameter: Tissue Value: Open Flower vs. Whole Plant
  misc_feature: MA Experiment ID: 20000265 Result: Up-regulated in Transcription
  misc_feature: MA Experiment 20000265 PARAMETER Experiment Name: At_Open_Flower_P Parameter: Age (day) Value: 21
  misc_feature: MA Experiment 20000265 PARAMETER Experiment Name: At_Open_Flower_P Parameter: Plant Line Value: WS
  misc_feature: MA Experiment 20000265 PARAMETER Experiment Name: At_Open_Flower_P Parameter: Tissue Value: Closed Flower vs. Whole Plant
  misc_feature: MA Experiment ID: 20000495 Result: Up-regulated in Transcription
  misc_feature: MA Experiment 20000495 PARAMETER Experiment Name: At_Guard_Cells_P Parameter: Harvest Date Value: 8/2/2002
  misc_feature: MA Experiment 20000495 PARAMETER Experiment Name: At_Guard_Cells_P Parameter: Organism Value: A. thaliana
  misc_feature: MA Experiment 20000495 PARAMETER Experiment Name: At_Guard_Cells_P Parameter: Tissue Value: Guard Cells vs. Leaves
  misc_feature: MA Experiment ID: 20001555 Result: Up-regulated in Transcription
  misc_feature: MA Experiment 20001555 PARAMETER Experiment Name: At_Drought_Soil_Dry_P Parameter: Age (day) Value: 24
  misc_feature: MA Experiment 20001555 PARAMETER Experiment Name: At_Drought_Soil_Dry_P Parameter: Organism Value: A. thaliana
  misc_feature: MA Experiment 20001555 PARAMETER Experiment Name: At_Drought_Soil_Dry_P Parameter: Plant Line Value: WS
  misc_feature: MA Experiment 20001555 PARAMETER Experiment Name: At_Drought_Soil_Dry_P Parameter: Post Timepoint (hr) Value: None
  misc_feature: MA Experiment 20001555 PARAMETER Experiment Name: At_Drought_Soil_Dry_P Parameter: Post-Treatment Value: None
  misc_feature: MA Experiment 20001555 PARAMETER Experiment Name: At_Drought_Soil_Dry_P Parameter: Timepoint (day) Value: 10
  misc_feature: MA Experiment 20001555 PARAMETER Experiment Name: At_Drought_Soil_Dry_P Parameter: Treatment Value: Drought vs. No Drought
  misc_feature: MA Experiment ID: 20001556 Result: Up-regulated in Transcription
  misc_feature: MA Experiment 20001556 PARAMETER Experiment Name: At_Drought_Soil_Dry_P Parameter: Age (day) Value: 26
  misc_feature: MA Experiment 20001556 PARAMETER Experiment Name: At_Drought_Soil_Dry_P Parameter: Organism Value: A. thaliana
  misc_feature: MA Experiment 20001556 PARAMETER Experiment Name: At_Drought_Soil_Dry_P Parameter: Plant Line Value: WS
  misc_feature: MA Experiment 20001556 PARAMETER Experiment Name: At_Drought_Soil_Dry_P Parameter: Post Timepoint (hr) Value: None
  misc_feature: MA Experiment 20001556 PARAMETER Experiment Name: At_Drought_Soil_Dry_P Parameter: Post-Treatment Value: None
  misc_feature: MA Experiment 20001556 PARAMETER Experiment Name: At_Drought_Soil_Dry_P Parameter: Timepoint (day) Value: 12
  misc_feature: MA Experiment 20001556 PARAMETER Experiment Name: At_Drought_Soil_Dry_P Parameter: Treatment Value: Drought vs. No Drought
  misc_feature: MA Experiment ID: 20001557 Result: Up-regulated in Transcription
  misc_feature: MA Experiment 20001557 PARAMETER Experiment Name: At_Drought_Soil_Dry_P Parameter: Age (day) Value: 27
  misc_feature: MA Experiment 20001557 PARAMETER Experiment Name: At_Drought_Soil_Dry_P Parameter: Organism Value: A. thaliana
  misc_feature: MA Experiment 20001557 PARAMETER Experiment Name: At_Drought_Soil_Dry_P Parameter: Plant Line Value: WS
  misc_feature: MA Experiment 20001557 PARAMETER Experiment Name: At_Drought_Soil_Dry_P Parameter: Post Timepoint (hr) Value: 3
  misc_feature: MA Experiment 20001557 PARAMETER Experiment Name: At_Drought_Soil_Dry_P Parameter: Post-Treatment Value: Re-Water vs. No Drought
  misc_feature: MA Experiment 20001557 PARAMETER Experiment Name: At_Drought_Soil_Dry_P Parameter: Timepoint (day) Value: 13
  misc_feature: MA Experiment 20001557 PARAMETER Experiment Name: At_Drought_Soil_Dry_P Parameter: Treatment Value: Drought vs. No Drought
  misc_feature: MA Experiment ID: 20001558 Result: Up-regulated in Transcription
  misc_feature: MA Experiment 20001558 PARAMETER Experiment Name: At_Drought_Soil_Dry_P Parameter: Age (day) Value: 27
  misc_feature: MA Experiment 20001558 PARAMETER Experiment Name: At_Drought_Soil_Dry_P Parameter: Organism Value: A. thaliana
  misc_feature: MA Experiment 20001558 PARAMETER Experiment Name: At_Drought_Soil_Dry_P Parameter: Plant Line Value: WS
  misc_feature: MA Experiment 20001558 PARAMETER Experiment Name: At_Drought_Soil_Dry_P Parameter: Post Timepoint (hr) Value: 6
  misc_feature: MA Experiment 20001558 PARAMETER Experiment Name: At_Drought_Soil_Dry_P Parameter: Post-Treatment Value: Re-Water vs. No Drought
  misc_feature: MA Experiment 20001558 PARAMETER Experiment Name: At_Drought_Soil_Dry_P Parameter: Timepoint (day) Value: 13
  misc_feature: MA Experiment 20001558 PARAMETER Experiment Name: At_Drought_Soil_Dry_P Parameter: Treatment Value: Drought vs. No Drought
  misc_feature: MA Experiment ID: 20001560 Result: Up-regulated in Transcription
  misc_feature: MA Experiment 20001560 PARAMETER Experiment Name: At_Drought_Soil_Dry_P Parameter: Age (day) Value: 28
  misc_feature: MA Experiment 20001560 PARAMETER Experiment Name: At_Drought_Soil_Dry_P Parameter: Organism Value: A. thaliana
  misc_feature: MA Experiment 20001560 PARAMETER Experiment Name: At_Drought_Soil_Dry_P Parameter: Plant Line Value: WS
  misc_feature: MA Experiment 20001560 PARAMETER Experiment Name: At_Drought_Soil_Dry_P Parameter: Post Timepoint (hr) Value: None
  misc_feature: MA Experiment 20001560 PARAMETER Experiment Name: At_Drought_Soil_Dry_P Parameter: Post-Treatment Value: None
  misc_feature: MA Experiment 20001560 PARAMETER Experiment Name: At_Drought_Soil_Dry_P Parameter: Timepoint (day) Value: 14
  misc_feature: MA Experiment 20001560 PARAMETER Experiment Name: At_Drought_Soil_Dry_P Parameter: Treatment Value: Drought vs. No Drought
  misc_feature: MA Experiment ID: 20001911 Result: Up-regulated in Transcription
  misc_feature: MA Experiment 20001911 PARAMETER Experiment Name: At_Drought_Reproduction_P Parameter: Age (day) Value: 40
  misc_feature: MA Experiment 20001911 PARAMETER Experiment Name: At_Drought_Reproduction_P Parameter: Organism Value: A. thaliana
  misc_feature: MA Experiment 20001911 PARAMETER Experiment Name: At_Drought_Reproduction_P Parameter: Plant Line Value: WS
  misc_feature: MA Experiment 20001911 PARAMETER Experiment Name: At_Drought_Reproduction_P Parameter: Timepoint (day) Value: 10
  misc_feature: MA Experiment 20001911 PARAMETER Experiment Name: At_Drought_Reproduction_P Parameter: Tissue Value: Flowers
  misc_feature: MA Experiment 20001911 PARAMETER Experiment Name: At_Drought_Reproduction_P Parameter: Treatment Value: Drought vs. No Drought
ctccgtcatagaacgcagaactgggtggatcaccgtggtcgtcaaattcctagctcctcgactccaaaaaaaaatcataaacgtattaccgtctcttgttttcctcgtattatatcggtcgaagtctccaatcatcggtctgagtaatctctgacaatggctgcaagagttttggcaagtgtgattgtgatgggctctggaatcatagccagggcttgtactcaggcatatcgtcaggcgcttgcaaatgcatcaaaaaccggggttgcgcatgaagcgacacagactattaagagagggttgactataggtgaagcagaagctagacagattcttggtgtaactgagaaatcatcttgggacgagattcttaagaaatacgacacgttgttcgaacgcaatgcgcagaatggaagcttctatctccaatctaaggtccatagagctaaggaatgcttagagactgcataccagaagagtacaacaacaagcgcatgaacaagcaataaaacaataggagcaaatcaggaacatatcttttgatacaagttatagttttaggacagaagtttgaaattgagtggagatagccgcaaaagttgaaattgagacaaggtcggtgatggccggaatgctgccagtaaccgactcaccggcgttgttaaaagtcttgttattttgttt

SEQ ID NO: 73519 - protein, 113 aa, Arabidopsis thaliana; identical to SEQ ID NO: 42406
  peptide (1)..(113): Ceres Seq. ID no. 4971397
  misc_feature (1)..(113): Pfam Name: Uncharacterised protein family (UPF0108) Pfam Description: Uncharacterised protein family (UPF0108)
  misc_feature (1)..(113): Homolog of NCBI NO: 18424521 NR Description: auxin-regulated protein; protein id: At5g61880.1, by cDNA: 146274., supported by cDNA: gi_14517497 [Arabidopsis >gi|14517498|gb|AAK62639.1| AT5g61880/mac9_180 [Arabidopsis
  misc_feature (12)..(113): Homolog of NCBI NO: 10176880 NR Description: gene_id:MAC9.20~unknown protein [Arabidopsis
  misc_feature (1)..(106): Homolog of NCBI NO: 18411133 NR Description: putative protein; protein id: At3g59280.1, by cDNA: gi_14190486 [Arabidopsis thaliana] AT3g59280/F25L23_140 [Arabidopsis thaliana]
  misc_feature (1)..(106): Homolog of NCBI NO: 11357639 NR Description: hypothetical protein F25L23.140 - Arabidopsis >gi|7801678|emb|CAB91598.1| putative protein [Arabidopsis
  misc_feature (1)..(112): Homolog of NCBI NO: 34905796 NR Description: P0401G10.24 [Oryza sativa (japonica
  misc_feature (12)..(108): Homolog of NCBI NO: 37535410 NR Description: putative pol polyprotein [Oryza sativa (japonica group)] >gi|10140747|gb|AAG13579.1| putative pol polyprotein sativa] >gi|31432696|gb|AAP54294.1| putative pol polyprotein
  misc_feature (1)..(102): Homolog of NCBI NO: 32409779 NR Description: hypothetical protein [Neurospora crassa]
  misc_feature (4)..(103): Homolog of NCBI NO: 19112141 NR Description: conserved hypothetical protein; similar to S. YJL104W [Schizosaccharomyces pombe] Hypothetical protein C713.10 in chromosome II
  misc_feature (1)..(102): Homolog of NCBI NO: 6322357 NR Description: Hypothetical ORF; Mia1p [Saccharomyces cerevisiae]

SEQ ID NO: 73520 - protein, 102 aa, Arabidopsis thaliana; identical to SEQ ID NO: 42407
  peptide (1)..(102): Ceres Seq. ID no. 4971398
  misc_feature (1)..(102): Pfam Name: Uncharacterised protein family (UPF0108) Pfam Description: Uncharacterised protein family (UPF0108)
  misc_feature (1)..(102): Homolog of NCBI NO: 18424521 NR Description: auxin-regulated protein; protein id: At5g61880.1, by cDNA: 146274., supported by cDNA: gi_14517497 [Arabidopsis >gi|14517498|gb|AAK62639.1| AT5g61880/mac9_180 [Arabidopsis
  misc_feature (1)..(102): Homolog of NCBI NO: 10176880 NR Description: gene_id:MAC9.20~unknown protein [Arabidopsis
  misc_feature (1)..(95): Homolog of NCBI NO: 18411133 NR Description: putative protein; protein id: At3g59280.1, by cDNA: gi_14190486 [Arabidopsis thaliana] AT3g59280/F25L23_140 [Arabidopsis thaliana]
  misc_feature (1)..(95): Homolog of NCBI NO: 11357639 NR Description: hypothetical protein F25L23.140 - Arabidopsis >gi|7801678|emb|CAB91598.1| putative protein [Arabidopsis
  misc_feature (1)..(101): Homolog of NCBI NO: 34905796 NR Description: P0401G10.24 [Oryza sativa (japonica
  misc_feature (1)..(97): Homolog of NCBI NO: 37535410 NR Description: putative pol polyprotein [Oryza sativa (japonica group)] >gi|10140747|gb|AAG13579.1| putative pol polyprotein sativa] >gi|31432696|gb|AAP54294.1| putative pol polyprotein
  misc_feature (1)..(91): Homolog of NCBI NO: 32409779 NR Description: hypothetical protein [Neurospora crassa]
  misc_feature (1)..(92): Homolog of NCBI NO: 19112141 NR Description: conserved hypothetical protein; similar to S. YJL104W [Schizosaccharomyces pombe] Hypothetical protein C713.10 in chromosome II
  misc_feature (1)..(91): Homolog of NCBI NO: 6322357 NR Description: Hypothetical ORF; Mia1p [Saccharomyces cerevisiae]

SEQ ID NO: 73521 - DNA, 1137 bp, Arabidopsis thaliana
  misc_feature (1)..(1137): Ceres Seq. ID no. 4971419
  misc_feature: MA Experiment ID: 108488 Result: Down-regulated in Transcription
  misc_feature: MA Experiment ID: 20000224 Result: Down-regulated in Transcription
aaaagctaaatcgggaactggcgcattttagtcgtccgccataaccttcgctctctgattcttccgattacatcggttttcttctctctccggtacatgatcttcttctttcccgcagccgattcattcgatttctccctcttttgtttgatctaattcgatttcgatgaaactcagattttgatctttgagtttttgtttcctttagattcaatggctgctccacctgctagagccagagctgattacgattatctcattaagcttcttttgattggagatagcggtgttggtaaaagttgtcttcttctacgtttctctgatggatctttcaccactagcttcattaccaccattggcattgactttaagataagaacgattgagcttgacggtaaacgtatcaagcttcagatttgggataccgctggtcaagagcggtttcggactatcaccactgcttattaccgtggggcaatgggcattttgctggtgtatgatgtcacagacgagtcatccttcaacaacattaggaactggattcgtaatatcgaacagcatgcttcggataatgttaacaagatcttggtagggaacaaggctgacatggatgaaagcaagagggcagtacctacagcaaagggtcaggctcttgctgatgagtacggaattaagttcttcgaaacaagtgccaagacaaacctaaacgtggaagaagttttcttctcaatagggagggacattaagcagaggctttcagacaccgactcgagggcagagcctgcaacgatcaagataagccaaacggaccaagcagctggagcagggcaggccacacagaaatctgcatgctgtggaacttaaaaaagttttaaaagtgaagtttaagtcgaaaaaagtttgggggtgaagtgaaaaactaagatatcgttgggtgcttatgtaattttttgttttatgccaacaattctgattcgttcttctaaattgtccttcctatttgtacgaaggtttaatcgaaacttgtatttttcttttctattactgattttttatgacggtgactgaattgtttatgttggtcatcacttctctctatatatcctctgttcttaatttttctcttgcttcctcttt

SEQ ID NO: 73522 - protein, 216 aa, Arabidopsis thaliana
  peptide (1)..(216): Ceres Seq. ID no. 4971420
  misc_feature (17)..(179): Pfam Name: Ras family Pfam Description: Ras family
  misc_feature (1)..(216): Homolog of NCBI NO: 15231322 NR Description: GTP-binding protein ara-3; protein id: supported by cDNA: gi_14334917, supported by cDNA: gi_14596014,
  misc_feature (1)..(216): Homolog of NCBI NO: 15238542 NR Description: GTP-binding protein ara-3; protein id: At5g59840.1
  misc_feature (1)..(216): Homolog of NCBI NO: 15231847 NR Description: Ras-related GTP-binding protein, putative; id: At3g53610.1, supported by cDNA: 27384., supported by cDNA:
  misc_feature (1)..(216): Homolog of NCBI NO: 18447917 NR Description: ras-related protein RAB8-3 [Nicotiana tabacum]
  misc_feature (1)..(216): Homolog of NCBI NO: 1362066 NR Description: GTP-binding protein GTP6 - garden pea
  misc_feature (1)..(216): Homolog of NCBI NO: 18447913 NR Description: ras-related protein RAB8-1 [Nicotiana tabacum]
  misc_feature (1)..(216): Homolog of NCBI NO: 18447921 NR Description: ras-related protein RAB8-5 [Nicotiana tabacum]
  misc_feature (1)..(216): Homolog of NCBI NO: 479442 NR Description: GTP-binding protein ypt2 - tomato
  misc_feature (1)..(216): Homolog of NCBI NO: 5669640 NR Description: ethylene-responsive small GTP-binding protein
  misc_feature (1)..(216): Homolog of NCBI NO: 18447915 NR Description: ras-related protein RAB8-2 [Nicotiana tabacum]
MAAPPARARADYDYLIKLLLIGDSGVGKSCLLLRFSDGSFTTSFITTIGIDFKIRTIELDGKRIKLQIWDTAGQERFRTITTAYYRGAMGILLVYDVTDESSFNNIRNWIRNIEQHASDNVNKILVGNKADMDESKRAVPTAKGQALADEYGIKFFETSAKTNLNVEEVFFSIGRDIKQRLSDTDSRAEPATIKISQTDQAAGAGQATQKSACCGT

SEQ ID NO: 73523 - protein, 128 aa, Arabidopsis thaliana
  peptide (1)..(128): Ceres Seq. ID no. 4971421
  misc_feature (1)..(91): Pfam Name: Ras family Pfam Description: Ras family
  misc_feature (1)..(128): Homolog of NCBI NO: 15231322 NR Description: GTP-binding protein ara-3; protein id: supported by cDNA: gi_14334917, supported by cDNA: gi_14596014,
  misc_feature (1)..(128): Homolog of NCBI NO: 15238542 NR Description: GTP-binding protein ara-3; protein id: At5g59840.1
  misc_feature (1)..(128): Homolog of NCBI NO: 15231847 NR Description: Ras-related GTP-binding protein, putative; id: At3g53610.1, supported by cDNA: 27384., supported by cDNA:
  misc_feature (1)..(128): Homolog of NCBI NO: 18447917 NR Description: ras-related protein RAB8-3 [Nicotiana tabacum]
  misc_feature (1)..(128): Homolog of NCBI NO: 1362066 NR Description: GTP-binding protein GTP6 - garden pea
  misc_feature (1)..(128): Homolog of NCBI NO: 18447913 NR Description: ras-related protein RAB8-1 [Nicotiana tabacum]
  misc_feature (1)..(128): Homolog of NCBI NO: 18447921 NR Description: ras-related protein RAB8-5 [Nicotiana tabacum]
  misc_feature (1)..(128): Homolog of NCBI NO: 479442 NR Description: GTP-binding protein ypt2 - tomato
  misc_feature (1)..(128): Homolog of NCBI NO: 5669640 NR Description: ethylene-responsive small GTP-binding protein
  misc_feature (1)..(128): Homolog of NCBI NO: 18447915 NR Description: ras-related protein RAB8-2 [Nicotiana tabacum]
MGILLVYDVTDESSFNNIRNWIRNIEQHASDNVNKILVGNKADMDESKRAVPTAKGQALADEYGIKFFETSAKTNLNVEEVFFSIGRDIKQRLSDTDSRAEPATIKISQTDQAAGAGQATQKSACCGT

SEQ ID NO: 73524 - DNA, 541 bp, Arabidopsis thaliana
  misc_feature (1)..(541): Ceres Seq. ID no. 4971425
  misc_feature: MA Experiment ID: 108434 Result: Up-regulated in Transcription
  misc_feature: MA Experiment 108434 PARAMETER Experiment Name: At_Root_Tips_cDNA_P Parameter: Tissue Value: Root Tips
  misc_feature: MA Experiment ID: 108488 Result: Down-regulated in Transcription
  misc_feature: MA Experiment ID: 108561 Result: Down-regulated in Transcription
  misc_feature: MA Experiment 108561 PARAMETER Experiment Name: At_100uM_ABA_cDNA_P Parameter: Timepoint (hr) Value: 6
  misc_feature: MA Experiment 108561 PARAMETER Experiment Name: At_100uM_ABA_cDNA_P Parameter: Tissue Value: Aerial
  misc_feature: MA Experiment 108561 PARAMETER Experiment Name: At_100uM_ABA_cDNA_P Parameter: Treatment Value: 100uM ABA vs. No Treatment
  misc_feature: MA Experiment ID: 108569 Result: Down-regulated in Transcription
  misc_feature: MA Experiment 108569 PARAMETER Experiment Name: At_0.001%_MeJA__cDNA_P Parameter: Timepoint (hr) Value: 6
  misc_feature: MA Experiment 108569 PARAMETER Experiment Name: At_0.001%_MeJA__cDNA_P Parameter: Tissue Value: Aerial
  misc_feature: MA Experiment 108569 PARAMETER Experiment Name: At_0.001%_MeJA__cDNA_P Parameter: Treatment Value: 0.001% MeJA vs. No Treatment
  misc_feature: MA Experiment ID: 108573 Result: Down-regulated in Transcription
  misc_feature: MA Experiment 108573 PARAMETER Experiment Name: At_Drought_cDNA_P Parameter: Timepoint (hr) Value: 6
  misc_feature: MA Experiment 108573 PARAMETER Experiment Name: At_Drought_cDNA_P Parameter: Tissue Value: Aerial
  misc_feature: MA Experiment 108573 PARAMETER Experiment Name: At_Drought_cDNA_P Parameter: Treatment Value: Drought vs. No Drought
  misc_feature: MA Experiment ID: 108576 Result: Down-regulated in Transcription
  misc_feature: MA Experiment 108576 PARAMETER Experiment Name: At_42deg_Heat_cDNA_P Parameter: Temperature (deg C) Value: 42 vs. 22
  misc_feature: MA Experiment 108576 PARAMETER Experiment Name: At_42deg_Heat_cDNA_P Parameter: Timepoint (hr) Value: 1
  misc_feature: MA Experiment 108576 PARAMETER Experiment Name: At_42deg_Heat_cDNA_P Parameter: Tissue Value: Aerial
  misc_feature: MA Experiment ID: 108577 Result: Down-regulated in Transcription
  misc_feature: MA Experiment 108577 PARAMETER Experiment Name: At_42deg_Heat_cDNA_P Parameter: Temperature (deg C) Value: 42 vs. 22
  misc_feature: MA Experiment 108577 PARAMETER Experiment Name: At_42deg_Heat_cDNA_P Parameter: Timepoint (hr) Value: 6
  misc_feature: MA Experiment 108577 PARAMETER Experiment Name: At_42deg_Heat_cDNA_P Parameter: Tissue Value: Aerial
  misc_feature: MA Experiment ID: 108585 Result: Down-regulated in Transcription
  misc_feature: MA Experiment 108585 PARAMETER Experiment Name: At_5mM_NaNP_cDNA_P Parameter: Timepoint (hr) Value: 6
  misc_feature: MA Experiment 108585 PARAMETER Experiment Name: At_5mM_NaNP_cDNA_P Parameter: Tissue Value: Aerial
  misc_feature: MA Experiment 108585 PARAMETER Experiment Name: At_5mM_NaNP_cDNA_P Parameter: Treatment Value: null
  misc_feature: MA Experiment ID: 20000093 Result: Down-regulated in Transcription
  misc_feature: MA Experiment 20000093 PARAMETER Experiment Name: At_42deg_Heat_cDNA_P Parameter: Temperature (deg C) Value: 42 vs. 22
  misc_feature: MA Experiment 20000093 PARAMETER Experiment Name: At_42deg_Heat_cDNA_P Parameter: Timepoint (hr) Value: 0.5
  misc_feature: MA Experiment 20000093 PARAMETER Experiment Name: At_42deg_Heat_cDNA_P Parameter: Tissue Value: Aerial
  misc_feature: MA Experiment ID: 20000111 Result: Down-regulated in Transcription
  misc_feature: MA Experiment 20000111 PARAMETER Experiment Name: At_42deg_Heat_cDNA_P Parameter: Temperature (deg C) Value: 42 vs. 22
  misc_feature: MA Experiment 20000111 PARAMETER Experiment Name: At_42deg_Heat_cDNA_P Parameter: Timepoint (hr) Value: 6
  misc_feature: MA Experiment 20000111 PARAMETER Experiment Name: At_42deg_Heat_cDNA_P Parameter: Tissue Value: Aerial
  misc_feature: MA Experiment ID: 20000112 Result: Down-regulated in Transcription
  misc_feature: MA Experiment 20000112 PARAMETER Experiment Name: At_42deg_Heat_cDNA_P Parameter: Temperature (deg C) Value: 42 vs. 22
  misc_feature: MA Experiment 20000112 PARAMETER Experiment Name: At_42deg_Heat_cDNA_P Parameter: Timepoint (hr) Value: 2
  misc_feature: MA Experiment 20000112 PARAMETER Experiment Name: At_42deg_Heat_cDNA_P Parameter: Tissue Value: Aerial
  misc_feature: MA Experiment ID: 20000113 Result: Down-regulated in Transcription
  misc_feature: MA Experiment 20000113 PARAMETER Experiment Name: At_42deg_Heat_cDNA_P Parameter: Temperature (deg C) Value: 42 vs. 22
  misc_feature: MA Experiment 20000113 PARAMETER Experiment Name: At_42deg_Heat_cDNA_P Parameter: Timepoint (hr) Value: 8
  misc_feature: MA Experiment 20000113 PARAMETER Experiment Name: At_42deg_Heat_cDNA_P Parameter: Tissue Value: Aerial
  misc_feature: MA Experiment ID: 20000144 Result: Down-regulated in Transcription
  misc_feature: MA Experiment 20000144 PARAMETER Experiment Name: At_42deg_Heat_cDNA_P Parameter: Temperature (deg C) Value: 42 vs. 22
  misc_feature: MA Experiment 20000144 PARAMETER Experiment Name: At_42deg_Heat_cDNA_P Parameter: Timepoint (hr) Value: 1
  misc_feature: MA Experiment 20000144 PARAMETER Experiment Name: At_42deg_Heat_cDNA_P Parameter: Tissue Value: Aerial
  misc_feature: MA Experiment ID: 20000179 Result: Up-regulated in Transcription
  misc_feature: MA Experiment 20000179 PARAMETER Experiment Name: At_Germinating_Seeds_P Parameter: Age (hr) Value: 6 vs. 0
  misc_feature: MA Experiment 20000179 PARAMETER Experiment Name: At_Germinating_Seeds_P Parameter: Tissue Value: Germinating Seeds
  misc_feature: MA Experiment ID: 20000180 Result: Up-regulated in Transcription
  misc_feature: MA Experiment 20000180 PARAMETER Experiment Name: At_Germinating_Seeds_P Parameter: Age (hr) Value: 24 vs. 0
  misc_feature: MA Experiment 20000180 PARAMETER Experiment Name: At_Germinating_Seeds_P Parameter: Tissue Value: Germinating Seeds
  misc_feature: MA Experiment ID: 20000184 Result: Up-regulated in Transcription
  misc_feature: MA Experiment 20000184 PARAMETER Experiment Name: At_Shoots__P Parameter: Age (day) Value: 7
  misc_feature: MA Experiment 20000184 PARAMETER Experiment Name: At_Shoots__P Parameter: Tissue Value: Shoots vs. Whole Plant
  misc_feature: MA Experiment ID: 20000264 Result: Up-regulated in Transcription
  misc_feature: MA Experiment 20000264 PARAMETER Experiment Name: At_Open_Flower_P Parameter: Age (day) Value: 21
  misc_feature: MA Experiment 20000264 PARAMETER Experiment Name: At_Open_Flower_P Parameter: Plant Line Value: WS
  misc_feature: MA Experiment 20000264 PARAMETER Experiment Name: At_Open_Flower_P Parameter: Tissue Value: Open Flower vs. Whole Plant
  misc_feature: MA Experiment ID: 20000265 Result: Up-regulated in Transcription
  misc_feature: MA Experiment 20000265 PARAMETER Experiment Name: At_Open_Flower_P Parameter: Age (day) Value: 21
  misc_feature: MA Experiment 20000265 PARAMETER Experiment Name: At_Open_Flower_P Parameter: Plant Line Value: WS
  misc_feature: MA Experiment 20000265 PARAMETER Experiment Name: At_Open_Flower_P Parameter: Tissue Value: Closed Flower vs. Whole Plant
  misc_feature: MA Experiment ID: 20001555 Result: Down-regulated in Transcription
  misc_feature: MA Experiment 20001555 PARAMETER Experiment Name: At_Drought_Soil_Dry_P Parameter: Age (day) Value: 24
  misc_feature: MA Experiment 20001555 PARAMETER Experiment Name: At_Drought_Soil_Dry_P Parameter: Organism Value: A. thaliana
  misc_feature: MA Experiment 20001555 PARAMETER Experiment Name: At_Drought_Soil_Dry_P Parameter: Plant Line Value: WS
  misc_feature: MA Experiment 20001555 PARAMETER Experiment Name: At_Drought_Soil_Dry_P Parameter: Post Timepoint (hr) Value: None
  misc_feature: MA Experiment 20001555 PARAMETER Experiment Name: At_Drought_Soil_Dry_P Parameter: Post-Treatment Value: None
  misc_feature: MA Experiment 20001555 PARAMETER Experiment Name: At_Drought_Soil_Dry_P Parameter: Timepoint (day) Value: 10
  misc_feature: MA Experiment 20001555 PARAMETER Experiment Name: At_Drought_Soil_Dry_P Parameter: Treatment Value: Drought vs. No Drought
  misc_feature: MA Experiment ID: 20001556 Result: Down-regulated in Transcription
  misc_feature: MA Experiment 20001556 PARAMETER Experiment Name: At_Drought_Soil_Dry_P Parameter: Age (day) Value: 26
  misc_feature: MA Experiment 20001556 PARAMETER Experiment Name: At_Drought_Soil_Dry_P Parameter: Organism Value: A. thaliana
  misc_feature: MA Experiment 20001556 PARAMETER Experiment Name: At_Drought_Soil_Dry_P Parameter: Plant Line Value: WS
  misc_feature: MA Experiment 20001556 PARAMETER Experiment Name: At_Drought_Soil_Dry_P Parameter: Post Timepoint (hr) Value: None
  misc_feature: MA Experiment 20001556 PARAMETER Experiment Name: At_Drought_Soil_Dry_P Parameter: Post-Treatment Value: None
  misc_feature: MA Experiment 20001556 PARAMETER Experiment Name: At_Drought_Soil_Dry_P Parameter: Timepoint (day) Value: 12
  misc_feature: MA Experiment 20001556 PARAMETER Experiment Name: At_Drought_Soil_Dry_P Parameter: Treatment Value: Drought vs. No Drought
  misc_feature: MA Experiment ID: 20001559 Result: Down-regulated in Transcription
  misc_feature: MA Experiment 20001559 PARAMETER Experiment Name: At_Drought_Soil_Dry_P Parameter: Age (day) Value: 28
  misc_feature: MA Experiment 20001559 PARAMETER Experiment Name: At_Drought_Soil_Dry_P Parameter: Organism Value: A. thaliana
  misc_feature: MA Experiment 20001559 PARAMETER Experiment Name: At_Drought_Soil_Dry_P Parameter: Plant Line Value: WS
  misc_feature: MA Experiment 20001559 PARAMETER Experiment Name: At_Drought_Soil_Dry_P Parameter: Post Timepoint (hr) Value: 29
  misc_feature: MA Experiment 20001559 PARAMETER Experiment Name: At_Drought_Soil_Dry_P Parameter: Post-Treatment Value: Re-Water vs. No Drought
  misc_feature: MA Experiment 20001559 PARAMETER Experiment Name: At_Drought_Soil_Dry_P Parameter: Timepoint (day) Value: 14
  misc_feature: MA Experiment 20001559 PARAMETER Experiment Name: At_Drought_Soil_Dry_P Parameter: Treatment Value: Drought vs. No Drought
  misc_feature: Pfam Name: Histone Pfam Description: Core histone H2A/H2B/H3/H4
ctcaaatcatctcaatctcaattaaatcttcaaatcgaaaaatttccgaagaaaaattcaagttcctttagaaaatgtcaggtcgtggaaagggaggcaaaggtttgggcaaaggtggagccaaacgtcataggaaggttctgagagacaacatccaaggaatcactaaaccggcgattcggagattggctcgtagaggtggtgttaaacgtattagtggtctgatctacgaagagacacgtggcgttctcaagatctttttggagaatgttatccgtgacgccgttacttacactgagcacgctcggaggaagacggtgactgctatggatgttgtttatgctcttaagagacaaggaagaactctctacggattcggcggctagggtttttgattgttgttttttgtgtttctacgtttattaggatgttaattttcaggatttggtgttaacttcgaaaaaattaaagaattgaaggttgttgttgcaatttcgtgattgttgaaggtgttgttgcaaacttttagtaatttcagttt

SEQ ID NO: 73525 - protein, 103 aa, Arabidopsis thaliana; identical to SEQ ID NO: 7737
  peptide (1)..(103): Ceres Seq. ID no. 4971426
  misc_feature: Pfam Name: Histone Pfam Description: Core histone H2A/H2B/H3/H4
  misc_feature (1)..(103): Homolog of NCBI NO: 34876368 NR Description: similar to germinal histone H4 gene [Rattus
  misc_feature (1)..(103): Homolog of NCBI NO: 15226944 NR Description: histone H4; protein id: At2g28740.1, supported by
  misc_feature (1)..(103): Homolog of NCBI NO: 27692935 NR Description: Similar to germinal histone H4 gene [Mus musculus]
  misc_feature (1)..(103): Homolog of NCBI NO: 462243 NR Description: Histone H4 >gi|421921|pir||S32769 histone H4 - >gi|297150|emb|CAA48923.1| histone H4 [Lycopersicon esculentum] histone H4 [Lycopersicon esculentum] >gi|2746721|gb|AAB94924.1|
  misc_feature (1)..(103): Homolog of NCBI NO: 1806283 NR Description: Histone H4 homologue [Sesbania rostrata]
  misc_feature (1)..(103): Homolog of NCBI NO: 4504301 NR Description: H4 histone family, member A [Homo sapiens] H4 histone family, member B [Homo sapiens] H4 histone family, member C [Homo sapiens]
  misc_feature (1)..(103): Homolog of NCBI NO: 27692960 NR Description: Similar to germinal histone H4 gene [Mus musculus]
  misc_feature (1)..(103): Homolog of NCBI NO: 34858262 NR Description: similar to germinal histone H4 gene [Rattus
  misc_feature (1)..(103): Homolog of NCBI NO: 37590121 NR Description: Hist1h4h protein [Mus musculus]
  misc_feature (1)..(103): Homolog of NCBI NO: 462242 NR Description: Histone H4 >gi|166311|gb|AAC37355.1| histone H4 formosa] >gi|455652|gb|AAB28739.1| histone H4; H4 [Acropora

SEQ ID NO: 73526 - DNA, 3684 bp, Arabidopsis thaliana
  misc_feature (1)..(3684): Ceres Seq. ID no. 4971431
  misc_feature: MA Experiment ID: 20000355 Result: Up-regulated in Transcription
  misc_feature: MA Experiment 20000355 PARAMETER Experiment Name: At_Siliques_Sub_P Parameter: Age (day) Value: 21
  misc_feature: MA Experiment 20000355 PARAMETER Experiment Name: At_Siliques_Sub_P Parameter: Organism Value: A. thaliana
  misc_feature: MA Experiment 20000355 PARAMETER Experiment Name: At_Siliques_Sub_P Parameter: Plant Line Value: WS
  misc_feature: MA Experiment 20000355 PARAMETER Experiment Name: At_Siliques_Sub_P Parameter: Tissue Value: Less Than 5mm Siliques vs. Whole Plant
atgcaaccgtcaaatgatccagcaatcgtggacatggcagcggcggagaaggagaagaagcggccaagtgtatcatttcttaagctcttctcatttgctgatttttacgattgcgttctgatggctcttggatccattggtgcttgcattcacggagcctccgttccagttttcttcatcttctttggcaaactcatcaacatcatcggtcttgcttacctcttcccacaagaagcttctcacaaagtcgccaagtactcgttggattttgtatatctgagtgtggtgatactcttttcatcatggttagaggttgcatgttggatgcatacgggagagagacaagcagcgaagattagaaaagcttatttgcggtcaatgttaagccaagacataagcttattcgacaccgagatttccaccggagaagtcatctccgccatcacctccgagatccttgttgtccaagacgctatctccgagaaggtagggaatttcatgcacttcataagccggttcatagccggttttgcgatcgggttcgcgagcgtatggcaaataagtctcgtcactctctccatagtcccattcattgctctcgccggcggaatttacgcttttgtcagcagcggacttatcgtccgtgtccggaaatcatacgtcaaggccaacgagatcgcagaagaggtgatcgggaatgtgaggaccgtacaagcgtttacgggagaagaaaaggcggtgagttcgtaccaaggagctttgaggaacacttacaattacgggagaaaagccggtttagccaaaggactagggcttggttcgttgcattttgtcctgtttttgtcttgggctttgctcatttggttcacaagcatcgttgttcacaagggaatcgctaatggtggcgaatctttcacgaccatgctcaatgttgtcatcgctggcttgtctcttggtcaggcggctcctgacatttccacattcatgcgagccagtgctgctgcgtatccgatttttcagatgattgaacggaacacggaggataaaacaggtcgtaaactcgggaatgtaaacggagacattctattcaaagacgtgactttcacatacccctctcgccctgatgtggtgatctttgacaagctaaacttcgtgatccctgcggggaaagtcgtggctcttgttggaggaagcgggtctgggaaaagcaccatgatatccttaattgaacgattctacgagcctaccgatggagcggtgatgctggatgggaacgatatcagatacttggatcttaagtggttaagaggtcatattggtttggttaatcaagagcctgtcctgtttgcaaccacgattcgcgagaacattatgtatggtaaagacgatgccacctctgaggaaattaccaatgctgcaaagctctcggaagccatctcattcatcaacaacctaccggaaggattcgaaactcaggtaggtgagagaggaattcagctatctggcgggcagaagcagaggatcagtatttctagggcgatagtgaagaatccatcgatcctcttactcgatgaggcaacaagcgcactagatgcagagtcagagaaaatcgtgcaggaagctttggacagggtgatggttgggagaacaacggtcgtggtggctcatagactctccactgtaagaaacgctgacatcatagccgttgttggaggagggaagatcattgagtccggaagccacgacgaactcatatctaaccctgatggagcttattcttctcttcttcgtatccaagaagctgccagccctaacttgaaccacactccaagcttaccagtcagtacaaaacccttgccggaactaccaatcacggagacgacctcgtccattcatcaatcagtaaaccaaccagatacgaccaaacaggccaaagtaacggtgggacgtctttactctatgatccgtccggattggaaatacggattatgtgggacgttaggttcctttattgcgggatctcaaatgccgcttttcgcgcttggtatcgcacaggctttagtatcttattacatggactgggagacaactcaaaacgaggtcaaaagaatctctatcctcttctgttgtggctccgtcatcactgtcatcgtacataccattgagcataccacctttggtattatgggtgagcgtctcactctccgagtccgacaaaagatgttttcagcgatcttgaggaatgaaatcgggtggtttgataaggttgataacactagttcgatgttggcatcgcggcttgaaagtgatgcgactttgcttagaaccatcgtggtcgatagatcgacaattctacttgagaatttaggtcttgttgtgactgctttcatcatttcttttatactcaactggcgtctcactcttgttgtcttggccacataccccttgattataagcggtcatatcagcgagaaaattttcatgcaaggctatggaggaaacttgagtaaagcgtatttaaaggctaacatgttggctggagagtctattagcaacatccgaaccgtggtcgccttttgtgcagaggagaaggttttagacctttattccaaagagcttctagaaccttcagaacgttctttcaggcgtggacagatggccgggattttgtacggtgtttctcaattcttcatcttctcctcctacggccttgccctctggtacggatcgattttgatggagaaaggattatcaagtttcgaatctgtgatgaaaacattcatggttttgatagtaacggcgttagtgatgggtgaagtgttggctctagccccagatcttcttaaaggaaaccagatggttgtttcggttttcgagctattggatcgaagaacacaggttgttggtgatactggtgaggagctgagtaatgtggaaggcactatagagctcaaaggtgttcatttcagttatccttcacggcctgatgtgactattttcagcgatttcaatctactagttccttctggcaaaagcatggcgcttgtgggacaaagcggatctggaaaaagttcggttctttcgcttgttctccggttctacgatcctacagccggaataatcatgatagacgggcaagacatcaagaaactgaagttgaaatcactgcgaagacacattggtctggttcaacaagaaccggctctgtttgcaacgactatctatgagaacatcttgtatggtaaagaaggagcttctgaatctgaagtcatggaagcagctaagcttgcaaatgctcacagtttcatcagctctctccctgaaggttactcaaccaaagtcggtgaacgtggcattcagatgtcaggcggccagagacagagaattgctatagctagagccgtcctcaagaacccagagattctgcttcttgatgaagccacaagcgccttagatgttgaatcagagcgtgtggtacaacaagcattggatcggctaatgagagaccgaaccacggtggtggtggctcaccggctatcgacgatcaagaactcagatatgataagtgtaatacaagacggtaagatcatagagcaaggcagccacaatatcctcgttgagaacaagaatggtccctactctaaacttatcagtcttcagcagcggcagcgccatcatccttaa

SEQ ID NO: 73527 - protein, 1227 aa, Arabidopsis thaliana
  peptide (1)..(1227): Ceres Seq. ID no. 4971432
  misc_feature (34)..(163): Pfam Name: ABC transporter transmembrane region Pfam Description: ABC transporter transmembrane region
  misc_feature (633)..(1226): Homolog of NCBI NO: 21740907 NR Description: OSJNBa0036B21.21 [Oryza sativa (japonica
  misc_feature (16)..(602): Homolog of NCBI NO: 21740907 NR Description: OSJNBa0036B21.21 [Oryza sativa (japonica
  misc_feature (650)..(1226): Homolog of NCBI NO: 27368845 NR Description: MDR-like ABC transporter [Oryza sativa (japonica
  misc_feature (22)..(499): Homolog of NCBI NO: 27368845 NR Description: MDR-like ABC transporter [Oryza sativa (japonica
  misc_feature (492)..(634): Homolog of NCBI NO: 27368845 NR Description: MDR-like ABC transporter [Oryza sativa (japonica
  misc_feature (1088)..(1221): Homolog of NCBI NO: 25297460 NR Description: protein F20B24.12 [imported] - Arabidopsis >gi|6573748|gb|AAF17668.1|AC009398_17 F20B24.12 [Arabidopsis
  misc_feature (24)..(643): Homolog of NCBI NO: 25407562 NR Description: hypothetical protein AT4g18050 [imported] -
  misc_feature (763)..(1208): Homolog of NCBI NO: 25407562 NR Description: hypothetical protein AT4g18050 [imported] -
  misc_feature (593)..(759): Homolog of NCBI NO: 25407562 NR Description: hypothetical protein AT4g18050 [imported] -
  misc_feature (24)..(643): Homolog of NCBI NO: 22328760 NR Description: multidrug resistance P-glycoprotein, putative;
MQPSNDPAIVDMAAAEKEKKRPSVSFLKLFSFADFYDCVLMALGSIGACIHGASVPVFFIFFGKLINIIGLAYLFPQEASHKVAKYSLDFVYLSVVILFSSWLEVACWMHTGERQAAKIRKAYLRSMLSQDISLFDTEISTGEVISAITSEILVVQDAISEKVGNFMHFISRFIAGFAIGFASVWQISLVTLSIVPFIALAGGIYAFVSSGLIVRVRKSYVKANEIAEEVIGNVRTVQAFTGEEKAVSSYQGALRNTYNYGRKAGLAKGLGLGSLHFVLFLSWALLIWFTSIVVHKGIANGGESFTTMLNVVIAGLSLGQAAPDISTFMRASAAAYPIFQMIERNTEDKTGRKLGNVNGDILFKDVTFTYPSRPDVVIFDKLNFVIPAGKVVALVGGSGSGKSTMISLIERFYEPTDGAVMLDGNDIRYLDLKWLRGHIGLVNQEPVLFATTIRENIMYGKDDATSEEITNAAKLSEAISFINNLPEGFETQVGERGIQLSGGQKQRISISRAIVKNPSILLLDEATSALDAESEKIVQEALDRVMVGRTTVVVAHRLSTVRNADIIAVVGGGKIIESGSHDELISNPDGAYSSLLRIQEAASPNLNHTPSLPVSTKPLPELPITETTSSIHQSVNQPDTTKQAKVTVGRLYSMIRPDWKYGLCGTLGSFIAGSQMPLFALGIAQALVSYYMDWETTQNEVKRISILFCCGSVITVIVHTIEHTTFGIMGERLTLRVRQKMFSAILRNEIGWFDKVDNTSSMLASRLESDATLLRTIVVDRSTILLENLGLVVTAFIISFILNWRLTLVVLATYPLIISGHISEKIFMQGYGGNLSKAYLKANMLAGESISNIRTVVAFCAEEKVLDLYSKELLEPSERSFRRGQMAGILYGVSQFFIFSSYGLALWYGSILMEKGLSSFESVMKTFMVLIVTALVMGEVLALAPDLLKGNQMVVSVFELLDRRTQVVGDTGEELSNVEGTIELKGVHFSYPSRPDVTIFSDFNLLVPSGKSMALVGQSGSGKSSVLSLVLRFYDPTAGIIMIDGQDIKKLKLKSLRRHIGLVQQEPALFATTIYENILYGKEGASESEVMEAAKLANAHSFISSLPEGYSTKVGERGIQMSGGQRQRIAIARAVLKNPEILLLDEATSALDVESERVVQQALDRLMRDRTTVVVAHRLSTIKNSDMISVIQDGKIIEQGSHNILVENKNGPYSKLISLQQRQRHHP

SEQ ID NO: 73528 - protein, 1216 aa, Arabidopsis thaliana
  peptide (1)..(1216): Ceres Seq. ID no. 4971433
  misc_feature (23)..(152): Pfam Name: ABC transporter transmembrane region Pfam Description: ABC transporter transmembrane region
  misc_feature (622)..(1215): Homolog of NCBI NO: 21740907 NR Description: OSJNBa0036B21.21 [Oryza sativa (japonica
  misc_feature (5)..(591): Homolog of NCBI NO: 21740907 NR Description: OSJNBa0036B21.21 [Oryza sativa (japonica
  misc_feature (639)..(1215): Homolog of NCBI NO: 27368845 NR Description: MDR-like ABC transporter [Oryza sativa (japonica
  misc_feature (11)..(488): Homolog of NCBI NO: 27368845 NR Description: MDR-like ABC transporter [Oryza sativa (japonica
  misc_feature (481)..(623): Homolog of NCBI NO: 27368845 NR Description: MDR-like ABC transporter [Oryza sativa (japonica
  misc_feature (1077)..(1210): Homolog of NCBI NO: 25297460 NR Description: protein F20B24.12 [imported] - Arabidopsis >gi|6573748|gb|AAF17668.1|AC009398_17 F20B24.12 [Arabidopsis
  misc_feature (13)..(632): Homolog of NCBI NO: 25407562 NR Description: hypothetical protein AT4g18050 [imported] -
  misc_feature (752)..(1197): Homolog of NCBI NO: 25407562 NR Description: hypothetical protein AT4g18050 [imported] -
  misc_feature (582)..(748): Homolog of NCBI NO: 25407562 NR Description: hypothetical protein AT4g18050 [imported] -
  misc_feature (13)..(632): Homolog of NCBI NO: 22328760 NR Description: multidrug resistance P-glycoprotein, putative;
MAAAEKEKKRPSVSFLKLFSFADFYDCVLMALGSIGACIHGASVPVFFIFFGKLINIIGLAYLFPQEASHKVAKYSLDFVYLSVVILFSSWLEVACWMHTGERQAAKIRKAYLRSMLSQDISLFDTEISTGEVISAITSEILVVQDAISEKVGNFMHFISRFIAGFAIGFASVWQISLVTLSIVPFIALAGGIYAFVSSGLIVRVRKSYVKANEIAEEVIGNVRTVQAFTGEEKAVSSYQGALRNTYNYGRKAGLAKGLGLGSLHFVLFLSWALLIWFTSIVVHKGIANGGESFTTMLNVVIAGLSLGQAAPDISTFMRASAAAYPIFQMIERNTEDKTGRKLGNVNGDILFKDVTFTYPSRPDVVIFDKLNFVIPAGKVVALVGGSGSGKSTMISLIERFYEPTDGAVMLDGNDIRYLDLKWLRGHIGLVNQEPVLFATTIRENIMYGKDDATSEEITNAAKLSEAISFINNLPEGFETQVGERGIQLSGGQKQRISISRAIVKNPSILLLDEATSALDAESEKIVQEALDRVMVGRTTVVVAHRLSTVRNADIIAVVGGGKIIESGSHDELISNPDGAYSSLLRIQEAASPNLNHTPSLPVSTKPLPELPITETTSSIHQSVNQPDTTKQAKVTVGRLYSMIRPDWKYGLCGTLGSFIAGSQMPLFALGIAQALVSYYMDWETTQNEVKRISILFCCGSVITVIVHTIEHTTFGIMGERLTLRVRQKMFSAILRNEIGWFDKVDNTSSMLASRLESDATLLRTIVVDRSTILLENLGLVVTAFIISFILNWRLTLVVLATYPLIISGHISEKIFMQGYGGNLSKAYLKANMLAGESISNIRTVVAFCAEEKVLDLYSKELLEPSERSFRRGQMAGILYGVSQFFIFSSYGLALWYGSILMEKGLSSFESVMKTFMVLIVTALVMGEVLALAPDLLKGNQMVVSVFELLDRRTQVVGDTGEELSNVEGTIELKGVHFSYPSRPDVTIFSDFNLLVPSGKSMALVGQSGSGKSSVLSLVLRFYDPTAGIIMIDGQDIKKLKLKSLRRHIGLVQQEPALFATTIYENILYGKEGASESEVMEAAKLANAHSFISSLPEGYSTKVGERGIQMSGGQRQRIAIARAVLKNPEILLLDEATSALDVESERVVQQALDRLMRDRTTVVVAHRLSTIKNSDMISVIQDGKIIEQGSHNILVENKNGPYSKLISLQQRQRHHP

SEQ ID NO: 73529 - protein, 1187 aa, Arabidopsis thaliana
  peptide (1)..(1187): Ceres Seq. ID no. 4971434
  misc_feature (1)..(123): Pfam Name: ABC transporter transmembrane region Pfam Description: ABC transporter transmembrane region
  misc_feature (593)..(1186): Homolog of NCBI NO: 21740907 NR Description: OSJNBa0036B21.21 [Oryza sativa (japonica
  misc_feature (1)..(562): Homolog of NCBI NO: 21740907 NR Description: OSJNBa0036B21.21 [Oryza sativa (japonica
  misc_feature (610)..(1186): Homolog of NCBI NO: 27368845 NR Description: MDR-like ABC transporter [Oryza sativa (japonica
  misc_feature (1)..(459): Homolog of NCBI NO: 27368845 NR Description: MDR-like ABC transporter [Oryza sativa (japonica
  misc_feature (452)..(594): Homolog of NCBI NO: 27368845 NR Description: MDR-like ABC transporter [Oryza sativa (japonica
  misc_feature (1048)..(1181): Homolog of NCBI NO: 25297460 NR Description: protein F20B24.12 [imported] - Arabidopsis >gi|6573748|gb|AAF17668.1|AC009398_17 F20B24.12 [Arabidopsis
  misc_feature (1)..(603): Homolog of NCBI NO: 25407562 NR Description: hypothetical protein AT4g18050 [imported] -
  misc_feature (723)..(1168): Homolog of NCBI NO: 25407562 NR Description: hypothetical protein AT4g18050 [imported] -
  misc_feature (553)..(719): Homolog of NCBI NO: 25407562 NR Description: hypothetical protein AT4g18050 [imported] -
  misc_feature (1)..(603): Homolog of NCBI NO: 22328760 NR Description: multidrug resistance P-glycoprotein, putative;
MALGSIGACIHGASVPVFFIFFGKLINIIGLAYLFPQEASHKVAKYSLDFVYLSVVILFSSWLEVACWMHTGERQAAKIRKAYLRSMLSQDISLFDTEISTGEVISAITSEILVVQDAISEKVGNFMHFISRFIAGFAIGFASVWQISLVTLSIVPFIALAGGIYAFVSSGLIVRVRKSYVKANEIAEEVIGNVRTVQAFTGEEKAVSSYQGALRNTYNYGRKAGLAKGLGLGSLHFVLFLSWALLIWFTSIVVHKGIANGGESFTTMLNVVIAGLSLGQAAPDISTFMRASAAAYPIFQMIERNTEDKTGRKLGNVNGDILFKDVTFTYPSRPDVVIFDKLNFVIPAGKVVALVGGSGSGKSTMISLIERFYEPTDGAVMLDGNDIRYLDLKWLRGHIGLVNQEPVLFATTIRENIMYGKDDATSEEITNAAKLSEAISFINNLPEGFETQVGERGIQLSGGQKQRISISRAIVKNPSILLLDEATSALDAESEKIVQEALDRVMVGRTTVVVAHRLSTVRNADIIAVVGGGKIIESGSHDELISNPDGAYSSLLRIQEAASPNLNHTPSLPVSTKPLPELPITETTSSIHQSVNQPDTTKQAKVTVGRLYSMIRPDWKYGLCGTLGSFIAGSQMPLFALGIAQALVSYYMDWETTQNEVKRISILFCCGSVITVIVHTIEHTTFGIMGERLTLRVRQKMFSAILRNEIGWFDKVDNTSSMLASRLESDATLLRTIVVDRSTILLENLGLVVTAFIISFILNWRLTLVVLATYPLIISGHISEKIFMQGYGGNLSKAYLKANMLAGESISNIRTVVAFCAEEKVLDLYSKELLEPSERSFRRGQMAGILYGVSQFFIFSSYGLALWYGSILMEKGLSSFESVMKTFMVLIVTALVMGEVLALAPDLLKGNQMVVSVFELLDRRTQVVGDTGEELSNVEGTIELKGVHFSYPSRPDVTIFSDFNLLVPSGKSMALVGQSGSGKSSVLSLVLRFYDPTAGIIMIDGQDIKKLKLKSLRRHIGLVQQEPALFATTIYENILYGKEGASESEVMEAAKLANAHSFISSLPEGYSTKVGERGIQMSGGQRQRIAIARAVLKNPEILLLDEATSALDVESERVVQQALDRLMRDRTTVVVAHRLSTIKNSDMISVIQDGKIIEQGSHNILVENKNGPYSKLISLQQRQRHHP

SEQ ID NO: 73530 - DNA, 621 bp, Arabidopsis thaliana
  misc_feature (1)..(621): Ceres Seq. ID no. 4971597
  misc_feature: MA Experiment ID: 20000171 Result: Down-regulated in Transcription
  misc_feature: MA Experiment 20000171 PARAMETER Experiment Name: At_42deg_Heat_P Parameter: Age (day) Value: 14
  misc_feature: MA Experiment 20000171 PARAMETER Experiment Name: At_42deg_Heat_P Parameter: Organism Value: A. thaliana
  misc_feature: MA Experiment 20000171 PARAMETER Experiment Name: At_42deg_Heat_P Parameter: Plant Line Value: WS
  misc_feature: MA Experiment 20000171 PARAMETER Experiment Name: At_42deg_Heat_P Parameter: Temperature (deg C) Value: 42 vs. 22
  misc_feature: MA Experiment 20000171 PARAMETER Experiment Name: At_42deg_Heat_P Parameter: Timepoint (hr) Value: 1
  misc_feature: MA Experiment 20000171 PARAMETER Experiment Name: At_42deg_Heat_P Parameter: Tissue Value: Aerial
  misc_feature: MA Experiment ID: 20000173 Result: Down-regulated in Transcription
  misc_feature: MA Experiment 20000173 PARAMETER Experiment Name: At_42deg_Heat_P Parameter: Age (day) Value: 14
  misc_feature: MA Experiment 20000173 PARAMETER Experiment Name: At_42deg_Heat_P Parameter: Organism Value: A. thaliana
  misc_feature: MA Experiment 20000173 PARAMETER Experiment Name: At_42deg_Heat_P Parameter: Plant Line Value: WS
  misc_feature: MA Experiment 20000173 PARAMETER Experiment Name: At_42deg_Heat_P Parameter: Temperature (deg C) Value: 42 vs. 22
  misc_feature: MA Experiment 20000173 PARAMETER Experiment Name: At_42deg_Heat_P Parameter: Timepoint (hr) Value: 6
  misc_feature: MA Experiment 20000173 PARAMETER Experiment Name: At_42deg_Heat_P Parameter: Tissue Value: Aerial
  misc_feature: MA Experiment ID: 20000182 Result: Up-regulated in Transcription
  misc_feature: MA Experiment 20000182 PARAMETER Experiment Name: At_2mM_SA_P Parameter: Age (day) Value: 14
  misc_feature: MA Experiment 20000182 PARAMETER Experiment Name: At_2mM_SA_P Parameter: Organism Value: A. thaliana
  misc_feature: MA Experiment 20000182 PARAMETER Experiment Name: At_2mM_SA_P Parameter: Plant Line Value: WS
  misc_feature: MA Experiment 20000182 PARAMETER Experiment Name: At_2mM_SA_P Parameter: Timepoint (hr) Value: 6
  misc_feature: MA Experiment 20000182 PARAMETER Experiment Name: At_2mM_SA_P Parameter: Tissue Value: Aerial
  misc_feature: MA Experiment 20000182 PARAMETER Experiment Name: At_2mM_SA_P Parameter: Treatment Value: 2mM SA vs. No Treatment
  misc_feature: MA Experiment ID: 20000184 Result: Down-regulated in Transcription
  misc_feature: MA Experiment 20000184 PARAMETER Experiment Name: At_Shoots__P Parameter: Age (day) Value: 7
  misc_feature: MA Experiment 20000184 PARAMETER Experiment Name: At_Shoots__P Parameter: Tissue Value: Shoots vs. Whole Plant
  misc_feature: MA Experiment ID: 20000185 Result: Down-regulated in Transcription
  misc_feature: MA Experiment 20000185 PARAMETER Experiment Name: At_Roots__P Parameter: Age (day) Value: 7 vs. 21
  misc_feature: MA Experiment 20000185 PARAMETER Experiment Name: At_Roots__P Parameter: Organism Value: A. thaliana
  misc_feature: MA Experiment 20000185 PARAMETER Experiment Name: At_Roots__P Parameter: Tissue Value: Roots vs. Whole Plant
  misc_feature: MA Experiment ID: 20000234 Result: Down-regulated in Transcription
  misc_feature: MA Experiment 20000234 PARAMETER Experiment Name: At_Siliques_P Parameter: Age (day) Value: 21
  misc_feature: MA Experiment 20000234 PARAMETER Experiment Name: At_Siliques_P Parameter: Organism Value: A. thaliana
  misc_feature: MA Experiment 20000234 PARAMETER Experiment Name: At_Siliques_P Parameter: Plant Line Value: WS
  misc_feature: MA Experiment 20000234 PARAMETER Experiment Name: At_Siliques_P Parameter: Tissue Value: Less Than 5mm Siliques vs. Whole Plant
  misc_feature: MA Experiment ID: 20000264 Result: Down-regulated in Transcription
  misc_feature: MA Experiment 20000264 PARAMETER Experiment Name: At_Open_Flower_P Parameter: Age (day) Value: 21
  misc_feature: MA Experiment 20000264 PARAMETER Experiment Name: At_Open_Flower_P Parameter: Plant Line Value: WS
  misc_feature: MA Experiment 20000264 PARAMETER Experiment Name: At_Open_Flower_P Parameter: Tissue Value: Open Flower vs. Whole Plant
  misc_feature: MA Experiment ID: 20000265 Result: Down-regulated in Transcription
  misc_feature: MA Experiment 20000265 PARAMETER Experiment Name: At_Open_Flower_P Parameter: Age (day) Value: 21
  misc_feature: MA Experiment 20000265 PARAMETER Experiment Name: At_Open_Flower_P Parameter: Plant Line Value: WS
  misc_feature: MA Experiment 20000265 PARAMETER Experiment Name: At_Open_Flower_P Parameter: Tissue Value: Closed Flower vs. Whole Plant
  misc_feature: MA Experiment ID: 20000286 Result: Down-regulated in Transcription
  misc_feature: MA Experiment 20000286 PARAMETER Experiment Name: At_Open_Flower_P Parameter: Age (day) Value: 21
  misc_feature: MA Experiment 20000286 PARAMETER Experiment Name: At_Open_Flower_P Parameter: Plant Line Value: WS
  misc_feature: MA Experiment 20000286 PARAMETER Experiment Name: At_Open_Flower_P Parameter: Tissue Value: Half Open vs. Whole Plant
  misc_feature: MA Experiment ID: 20000439 Result: Down-regulated in Transcription
  misc_feature: MA Experiment 20000439 PARAMETER Experiment Name: At_Roots__P Parameter: Age (day) Value: 14 vs. 21
  misc_feature: MA Experiment 20000439 PARAMETER Experiment Name: At_Roots__P Parameter: Organism Value: A. thaliana
  misc_feature: MA Experiment 20000439 PARAMETER Experiment Name: At_Roots__P Parameter: Tissue Value: Roots vs. Whole Plant
  misc_feature: MA Experiment ID: 20000460 Result: Down-regulated in Transcription
  misc_feature: MA Experiment 20000460 PARAMETER Experiment Name: At_10percent_PEG_P Parameter: Age (day) Value: 12
  misc_feature: MA Experiment 20000460 PARAMETER Experiment Name: At_10percent_PEG_P Parameter: Organism Value: A. thaliana
  misc_feature: MA Experiment 20000460 PARAMETER Experiment Name: At_10percent_PEG_P Parameter: Plant Line Value: WS
  misc_feature: MA Experiment 20000460 PARAMETER Experiment Name: At_10percent_PEG_P Parameter: Timepoint (day) Value: 12
  misc_feature: MA Experiment 20000460 PARAMETER Experiment Name: At_10percent_PEG_P Parameter: Tissue Value: Whole Plant
  misc_feature: MA Experiment 20000460 PARAMETER Experiment Name: At_10percent_PEG_P Parameter: Treatment Value: 10percent PEG vs. No Treatment
  misc_feature: MA Experiment ID: 20000495 Result: Down-regulated in Transcription
  misc_feature: MA Experiment 20000495 PARAMETER Experiment Name: At_Guard_Cells_P Parameter: Harvest Date Value: 8/2/2002
  misc_feature: MA Experiment 20000495 PARAMETER Experiment Name: At_Guard_Cells_P Parameter: Organism Value: A. thaliana
  misc_feature: MA Experiment 20000495 PARAMETER Experiment Name: At_Guard_Cells_P Parameter: Tissue Value: Guard Cells vs. Leaves
  misc_feature: MA Experiment ID: 20000527 Result: Down-regulated in Transcription
  misc_feature: MA Experiment 20000527 PARAMETER Experiment Name: At_10percent_PEG_P Parameter: Age (day) Value: 20
  misc_feature: MA Experiment 20000527 PARAMETER Experiment Name: At_10percent_PEG_P Parameter: Organism Value: A. thaliana
  misc_feature: MA Experiment 20000527 PARAMETER Experiment Name: At_10percent_PEG_P Parameter: Plant Line Value: WS
  misc_feature: MA Experiment 20000527 PARAMETER Experiment Name: At_10percent_PEG_P Parameter: Timepoint (day) Value: 20
  misc_feature: MA Experiment 20000527 PARAMETER Experiment Name: At_10percent_PEG_P Parameter: Tissue Value: Whole Plant
  misc_feature: MA Experiment 20000527 PARAMETER Experiment Name: At_10percent_PEG_P Parameter: Treatment Value: 10percent PEG vs. No Treatment
  misc_feature: MA Experiment ID: 20000575 Result: Down-regulated in Transcription
  misc_feature: MA Experiment 20000575 PARAMETER Experiment Name: At_100uM_ABA_Mutants__P Parameter: Organism Value: A. thaliana
  misc_feature: MA Experiment 20000575 PARAMETER Experiment Name: At_100uM_ABA_Mutants__P Parameter: Plant Line Value: CS22
  misc_feature: MA Experiment 20000575 PARAMETER Experiment Name: At_100uM_ABA_Mutants__P Parameter: Timepoint (hr) Value: 6
  misc_feature: MA Experiment 20000575 PARAMETER Experiment Name: At_100uM_ABA_Mutants__P Parameter: Tissue Value: Whole Plant
  misc_feature: MA Experiment 20000575 PARAMETER Experiment Name: At_100uM_ABA_Mutants__P Parameter: Treatment Value: 1uM ABA vs. No Treatment
  misc_feature: MA Experiment ID: 20000576 Result: Down-regulated in Transcription
  misc_feature: MA Experiment 20000576 PARAMETER Experiment Name: At_100uM_ABA_Mutants__P Parameter: Organism Value: A. thaliana
  misc_feature: MA Experiment 20000576 PARAMETER Experiment Name: At_100uM_ABA_Mutants__P Parameter: Plant Line Value: CS23
  misc_feature: MA Experiment 20000576 PARAMETER Experiment Name: At_100uM_ABA_Mutants__P Parameter: Timepoint (hr) Value: 6
  misc_feature: MA Experiment 20000576 PARAMETER Experiment Name: At_100uM_ABA_Mutants__P Parameter: Tissue Value: Whole Plant
  misc_feature: MA Experiment 20000576 PARAMETER Experiment Name: At_100uM_ABA_Mutants__P Parameter: Treatment Value: 1uM ABA vs. No Treatment
  misc_feature: MA Experiment ID: 20000709 Result: Down-regulated in Transcription
  misc_feature: MA Experiment 20000709 PARAMETER Experiment Name: At_15mM_NH4NO3_L-to-H_P Parameter: Age (hr) Value: 14
  misc_feature: MA Experiment 20000709 PARAMETER Experiment Name: At_15mM_NH4NO3_L-to-H_P Parameter: Organism Value: A. thaliana
  misc_feature: MA Experiment 20000709 PARAMETER Experiment Name: At_15mM_NH4NO3_L-to-H_P Parameter: Plant Line Value: WS
  misc_feature: MA Experiment 20000709 PARAMETER Experiment Name: At_15mM_NH4NO3_L-to-H_P Parameter: Timepoint (hr) Value: 4
  misc_feature: MA Experiment 20000709 PARAMETER Experiment Name: At_15mM_NH4NO3_L-to-H_P Parameter: Tissue Value: Aerial
  misc_feature: MA Experiment 20000709 PARAMETER Experiment Name: At_15mM_NH4NO3_L-to-H_P Parameter: Treatment Value: 15mM NH4NO3 vs. 30mM Mannitol
  misc_feature: MA Experiment ID: 20000794 Result: Down-regulated in Transcription
  misc_feature: MA Experiment 20000794 PARAMETER Experiment Name: At_Petals_P Parameter: Age (day) Value: 23-25 days
  misc_feature: MA Experiment 20000794 PARAMETER Experiment Name: At_Petals_P Parameter: Plant Line Value: WS
  misc_feature: MA Experiment 20000794 PARAMETER Experiment Name: At_Petals_P Parameter: Tissue Value: Petals vs. Whole plant
  misc_feature: MA Experiment ID: 20001554 Result: Down-regulated in Transcription
  misc_feature: MA Experiment 20001554 PARAMETER Experiment Name: At_Drought_Soil_Dry_P Parameter: Age (day) Value: 21
  misc_feature: MA Experiment 20001554 PARAMETER Experiment Name: At_Drought_Soil_Dry_P Parameter: Organism Value: A. thaliana
  misc_feature: MA Experiment 20001554 PARAMETER Experiment Name: At_Drought_Soil_Dry_P Parameter: Plant Line Value: WS
  misc_feature: MA Experiment 20001554 PARAMETER Experiment Name: At_Drought_Soil_Dry_P Parameter: Post Timepoint (hr) Value: None
  misc_feature: MA Experiment 20001554 PARAMETER Experiment Name: At_Drought_Soil_Dry_P Parameter: Post-Treatment Value: None
  misc_feature: MA Experiment 20001554 PARAMETER Experiment Name: At_Drought_Soil_Dry_P Parameter: Timepoint (day) Value: 7
  misc_feature: MA Experiment 20001554 PARAMETER Experiment Name: At_Drought_Soil_Dry_P Parameter: Treatment Value: Drought vs. No Drought
  misc_feature: MA Experiment ID: 20001555 Result: Down-regulated in Transcription
  misc_feature: MA Experiment 20001555 PARAMETER Experiment Name: At_Drought_Soil_Dry_P Parameter: Age (day) Value: 24
  misc_feature: MA Experiment 20001555 PARAMETER Experiment Name: At_Drought_Soil_Dry_P Parameter: Organism Value: A. thaliana
  misc_feature: MA Experiment 20001555 PARAMETER Experiment Name: At_Drought_Soil_Dry_P Parameter: Plant Line Value: WS
  misc_feature: MA Experiment 20001555 PARAMETER Experiment Name: At_Drought_Soil_Dry_P Parameter: Post Timepoint (hr) Value: None
  misc_feature: MA Experiment 20001555 PARAMETER Experiment Name: At_Drought_Soil_Dry_P Parameter: Post-Treatment Value: None
  misc_feature: MA Experiment 20001555 PARAMETER Experiment Name: At_Drought_Soil_Dry_P Parameter: Timepoint (day) Value: 10
  misc_feature: MA Experiment 20001555 PARAMETER Experiment Name: At_Drought_Soil_Dry_P Parameter: Treatment Value: Drought vs. No Drought
  misc_feature: MA Experiment ID: 20001556 Result: Down-regulated in Transcription
  misc_feature: MA Experiment 20001556 PARAMETER Experiment Name: At_Drought_Soil_Dry_P Parameter: Age (day) Value: 26
  misc_feature: MA Experiment 20001556 PARAMETER Experiment Name: At_Drought_Soil_Dry_P Parameter: Organism Value: A. thaliana
  misc_feature: MA Experiment 20001556 PARAMETER Experiment Name: At_Drought_Soil_Dry_P Parameter: Plant Line Value: WS
  misc_feature: MA Experiment 20001556 PARAMETER Experiment Name: At_Drought_Soil_Dry_P Parameter: Post Timepoint (hr) Value: None
  misc_feature: MA Experiment 20001556 PARAMETER Experiment Name: At_Drought_Soil_Dry_P Parameter: Post-Treatment Value: None
  misc_feature: MA Experiment 20001556 PARAMETER Experiment Name: At_Drought_Soil_Dry_P Parameter: Timepoint (day) Value: 12
  misc_feature: MA Experiment 20001556 PARAMETER Experiment Name: At_Drought_Soil_Dry_P Parameter: Treatment Value: Drought vs. No Drought
  misc_feature: MA Experiment ID: 20001557 Result: Down-regulated in Transcription
  misc_feature: MA Experiment 20001557 PARAMETER Experiment Name: At_Drought_Soil_Dry_P Parameter: Age (day) Value: 27
  misc_feature: MA Experiment 20001557 PARAMETER Experiment Name: At_Drought_Soil_Dry_P Parameter: Organism Value: A. thaliana
  misc_feature: MA Experiment 20001557 PARAMETER Experiment Name: At_Drought_Soil_Dry_P Parameter: Plant Line Value: WS
  misc_feature: MA Experiment 20001557 PARAMETER Experiment Name: At_Drought_Soil_Dry_P Parameter: Post Timepoint (hr) Value: 3
  misc_feature: MA Experiment 20001557 PARAMETER Experiment Name: At_Drought_Soil_Dry_P Parameter: Post-Treatment Value: Re-Water vs. No Drought
  misc_feature: MA Experiment 20001557 PARAMETER Experiment Name: At_Drought_Soil_Dry_P Parameter: Timepoint (day) Value: 13
  misc_feature: MA Experiment 20001557 PARAMETER Experiment Name: At_Drought_Soil_Dry_P Parameter: Treatment Value: Drought vs. No Drought
  misc_feature: MA Experiment ID: 20001558 Result: Down-regulated in Transcription
  misc_feature: MA Experiment 20001558 PARAMETER Experiment Name: At_Drought_Soil_Dry_P Parameter: Age (day) Value: 27
  misc_feature: MA Experiment 20001558 PARAMETER Experiment Name: At_Drought_Soil_Dry_P Parameter: Organism Value: A. thaliana
  misc_feature: MA Experiment 20001558 PARAMETER Experiment Name: At_Drought_Soil_Dry_P Parameter: Plant Line Value: WS
  misc_feature: MA Experiment 20001558 PARAMETER Experiment Name: At_Drought_Soil_Dry_P Parameter: Post Timepoint (hr) Value: 6
  misc_feature: MA Experiment 20001558 PARAMETER Experiment Name: At_Drought_Soil_Dry_P Parameter: Post-Treatment Value: Re-Water vs. No Drought
  misc_feature: MA Experiment 20001558 PARAMETER Experiment Name: At_Drought_Soil_Dry_P Parameter: Timepoint (day) Value: 13
  misc_feature: MA Experiment 20001558 PARAMETER Experiment Name: At_Drought_Soil_Dry_P Parameter: Treatment Value: Drought vs. No Drought
  misc_feature: MA Experiment ID: 20001559 Result: Down-regulated in Transcription
  misc_feature: MA Experiment 20001559 PARAMETER Experiment Name: At_Drought_Soil_Dry_P Parameter: Age (day) Value: 28
  misc_feature: MA Experiment 20001559 PARAMETER Experiment Name: At_Drought_Soil_Dry_P Parameter: Organism Value: A. thaliana
  misc_feature: MA Experiment 20001559 PARAMETER Experiment Name: At_Drought_Soil_Dry_P Parameter: Plant Line Value: WS
  misc_feature: MA Experiment 20001559 PARAMETER Experiment Name: At_Drought_Soil_Dry_P Parameter: Post Timepoint (hr) Value: 29
  misc_feature: MA Experiment 20001559 PARAMETER Experiment Name: At_Drought_Soil_Dry_P Parameter: Post-Treatment Value: Re-Water vs. No Drought
  misc_feature: MA Experiment 20001559 PARAMETER Experiment Name: At_Drought_Soil_Dry_P Parameter: Timepoint (day) Value: 14
  misc_feature: MA Experiment 20001559 PARAMETER Experiment Name: At_Drought_Soil_Dry_P Parameter: Treatment Value: Drought vs. No Drought
  misc_feature: MA Experiment ID: 20001560 Result: Down-regulated in Transcription
  misc_feature: MA Experiment 20001560 PARAMETER Experiment Name: At_Drought_Soil_Dry_P Parameter: Age (day) Value: 28
  misc_feature: MA Experiment 20001560 PARAMETER Experiment Name: At_Drought_Soil_Dry_P Parameter: Organism Value: A. thaliana
  misc_feature: MA Experiment 20001560 PARAMETER Experiment Name: At_Drought_Soil_Dry_P Parameter: Plant Line Value: WS
  misc_feature: MA Experiment 20001560 PARAMETER Experiment Name: At_Drought_Soil_Dry_P Parameter: Post Timepoint (hr) Value: None
  misc_feature: MA Experiment 20001560 PARAMETER Experiment Name: At_Drought_Soil_Dry_P Parameter: Post-Treatment Value: None
  misc_feature: MA Experiment 20001560 PARAMETER Experiment Name: At_Drought_Soil_Dry_P Parameter: Timepoint (day) Value: 14
  misc_feature: MA Experiment 20001560 PARAMETER Experiment Name: At_Drought_Soil_Dry_P Parameter: Treatment Value: Drought vs. No Drought
  misc_feature: MA Experiment ID: 20001773 Result: Down-regulated in Transcription
  misc_feature: MA Experiment 20001773 PARAMETER Experiment Name: At_Far-red-enriched-adult_P Parameter: Age (day) Value: 30
  misc_feature: MA Experiment 20001773 PARAMETER Experiment Name: At_Far-red-enriched-adult_P Parameter: Light Value: Far-red enriched vs. White
  misc_feature: MA Experiment 20001773 PARAMETER Experiment Name: At_Far-red-enriched-adult_P Parameter: Organism Value: A. thaliana
  misc_feature: MA Experiment 20001773 PARAMETER Experiment Name: At_Far-red-enriched-adult_P Parameter: Plant Line Value: Columbia
  misc_feature: MA Experiment 20001773 PARAMETER Experiment Name: At_Far-red-enriched-adult_P Parameter: Timepoint (hr) Value: 48
  misc_feature: MA Experiment 20001773 PARAMETER Experiment Name: At_Far-red-enriched-adult_P Parameter: Tissue Value: Aerial
  misc_feature: MA Experiment ID: 20001904 Result: Down-regulated in Transcription
  misc_feature: MA Experiment 20001904 PARAMETER Experiment Name: At_Drought_Reproduction_P Parameter: Age (day) Value: 37
  misc_feature: MA Experiment 20001904 PARAMETER Experiment Name: At_Drought_Reproduction_P Parameter: Organism Value: A. thaliana
  misc_feature: MA Experiment 20001904 PARAMETER Experiment Name: At_Drought_Reproduction_P Parameter: Plant Line Value: WS
  misc_feature: MA Experiment 20001904 PARAMETER Experiment Name: At_Drought_Reproduction_P Parameter: Timepoint (day) Value: 7
  misc_feature: MA Experiment 20001904 PARAMETER Experiment Name: At_Drought_Reproduction_P Parameter: Tissue Value: Rosettes
  misc_feature: MA Experiment 20001904 PARAMETER Experiment Name: At_Drought_Reproduction_P Parameter: Treatment Value: Drought vs. No Drought
atgatgatagtggatccaaagtactgctctctgcaccctgtagatttggcgatcgtacggaaggtgttgaagataacggacggtaacttcgtgataacgaatgcggaaggaaacttgttgttcaaggtgaaggatcctttttttagtcttcacgagaagaggatcttgatggatggttttggaactaaggtcttgactttgaaagggaagataatgaccatgcatgacaggtggctagtgtttagaggagggagtacggaggaggttgatctgctatacacggtgaaaagatcaaacatggttcagataaccaccaaacttgatgtgtttttggctgataacatagagcagaagaaatgtgattacagactcgaaggggtttggctcgagacttcttgttttgtctacgctggcgattctgacatcattcttgcccaaatgcgcgagaagaaaacgatgcagagcgttctctttggaaaggacaatttctgcctcactgttaatccaaatgttgattatgccttcattgcctctctcattgtcatcctttttcatcaaaaagatgatatatacccaatcgaaagtttatggaagagggacataacagatttcatctgttag

SEQ ID NO: 73531 - protein, 206 aa, Arabidopsis thaliana
  peptide (1)..(206): Ceres Seq. ID no. 4971598
  misc_feature (2)..(182): Pfam Name: Protein of unknown function (DUF567) Pfam Description: Protein of unknown function (DUF567)
  misc_feature (1)..(206): Homolog of NCBI NO: 15217694 NR Description: unknown protein; protein id: At1g33840.1
  misc_feature (2)..(183): Homolog of NCBI NO: 9665105 NR Description: Hypothetical protein [Arabidopsis thaliana]
  misc_feature (2)..(149): Homolog of NCBI NO: 25352417 NR Description: hypothetical protein T3M13.14 - Arabidopsis
  misc_feature (2)..(183): Homolog of NCBI NO: 30679390 NR Description: expressed protein [Arabidopsis thaliana]
  misc_feature (2)..(183): Homolog of NCBI NO: 15225960 NR Description: unknown protein; protein id: At2g14560.1, by cDNA: gi_17979320 [Arabidopsis thaliana]
  misc_feature (2)..(183): Homolog of NCBI NO: 17979321 NR Description: unknown protein [Arabidopsis thaliana]
  misc_feature (2)..(147): Homolog of NCBI NO: 18413737 NR Description: expressed protein; protein id: At5g01750.1,
  misc_feature (2)..(147): Homolog of NCBI NO: 21553506 NR Description: unknown [Arabidopsis thaliana]
  misc_feature (106)..(190): Homolog of NCBI NO: 15229837 NR Description: hypothetical protein; protein id: At3g11740.1 thaliana] >gi|6671930|gb|AAF23190.1|AC016795_3 hypothetical
  misc_feature (1)..(68): Homolog of NCBI NO: 15229837 NR Description: hypothetical protein; protein id: At3g11740.1 thaliana] >gi|6671930|gb|AAF23190.1|AC016795_3 hypothetical
MMIVDPKYCSLHPVDLAIVRKVLKITDGNFVITNAEGNLLFKVKDPFFSLHEKRILMDGFGTKVLTLKGKIMTMHDRWLVFRGGSTEEVDLLYTVKRSNMVQITTKLDVFLADNIEQKKCDYRLEGVWLETSCFVYAGDSDIILAQMREKKTMQSVLFGKDNFCLTVNPNVDYAFIASLIVILFHQKDDIYPIESLWKRDITDFIC

SEQ ID NO: 73532 - protein, 205 aa, Arabidopsis thaliana
  peptide (1)..(205): Ceres Seq. ID no. 4971599
  misc_feature (1)..(181): Pfam Name: Protein of unknown function (DUF567) Pfam Description: Protein of unknown function (DUF567)
  misc_feature (1)..(205): Homolog of NCBI NO: 15217694 NR Description: unknown protein; protein id: At1g33840.1
  misc_feature (1)..(182): Homolog of NCBI NO: 9665105 NR Description: Hypothetical protein [Arabidopsis thaliana]
  misc_feature (1)..(148): Homolog of NCBI NO: 25352417 NR Description: hypothetical protein T3M13.14 - Arabidopsis
  misc_feature (1)..(182): Homolog of NCBI NO: 30679390 NR Description: expressed protein [Arabidopsis thaliana]
  misc_feature (1)..(182): Homolog of NCBI NO: 15225960 NR Description: unknown protein; protein id: At2g14560.1, by cDNA: gi_17979320 [Arabidopsis thaliana]
  misc_feature (1)..(182): Homolog of NCBI NO: 17979321 NR Description: unknown protein [Arabidopsis thaliana]
  misc_feature (1)..(146): Homolog of NCBI NO: 18413737 NR Description: expressed protein; protein id: At5g01750.1,
  misc_feature (1)..(146): Homolog of NCBI NO: 21553506 NR Description: unknown [Arabidopsis thaliana]
  misc_feature (105)..(189): Homolog of NCBI NO: 15229837 NR Description: hypothetical protein; protein id: At3g11740.1 thaliana] >gi|6671930|gb|AAF23190.1|AC016795_3 hypothetical
  misc_feature (1)..(67): Homolog of NCBI NO: 15229837 NR Description: hypothetical protein; protein id: At3g11740.1 thaliana] >gi|6671930|gb|AAF23190.1|AC016795_3 hypothetical
MIVDPKYCSLHPVDLAIVRKVLKITDGNFVITNAEGNLLFKVKDPFFSLHEKRILMDGFGTKVLTLKGKIMTMHDRWLVFRGGSTEEVDLLYTVKRSNMVQITTKLDVFLADNIEQKKCDYRLEGVWLETSCFVYAGDSDIILAQMREKKTMQSVLFGKDNFCLTVNPNVDYAFIASLIVILFHQKDDIYPIESLWKRDITDFIC

SEQ ID NO: 73533 - protein, 150 aa, Arabidopsis thaliana
  peptide (1)..(150): Ceres Seq. ID no. 4971600
  misc_feature (1)..(126): Pfam Name: Protein of unknown function (DUF567) Pfam Description: Protein of unknown function (DUF567)
  misc_feature (1)..(150): Homolog of NCBI NO: 15217694 NR Description: unknown protein; protein id: At1g33840.1
  misc_feature (1)..(127): Homolog of NCBI NO: 9665105 NR Description: Hypothetical protein [Arabidopsis thaliana]
  misc_feature (1)..(93): Homolog of NCBI NO: 25352417 NR Description: hypothetical protein T3M13.14 - Arabidopsis
  misc_feature (1)..(127): Homolog of NCBI NO: 30679390 NR Description: expressed protein [Arabidopsis thaliana]
  misc_feature (1)..(127): Homolog of NCBI NO: 15225960 NR Description: unknown protein; protein id: At2g14560.1, by cDNA: gi_17979320 [Arabidopsis thaliana]
  misc_feature (1)..(127): Homolog of NCBI NO: 17979321 NR Description: unknown protein [Arabidopsis thaliana]
  misc_feature (1)..(91): Homolog of NCBI NO: 18413737 NR Description: expressed protein; protein id: At5g01750.1,
  misc_feature (1)..(91): Homolog of NCBI NO: 21553506 NR Description: unknown [Arabidopsis thaliana]
  misc_feature (50)..(134): Homolog of NCBI NO: 15229837 NR Description: hypothetical protein; protein id: At3g11740.1 thaliana] >gi|6671930|gb|AAF23190.1|AC016795_3 hypothetical
  misc_feature (1)..(12): Homolog of NCBI NO: 15229837 NR Description: hypothetical protein; protein id: At3g11740.1 thaliana] >gi|6671930|gb|AAF23190.1|AC016795_3 hypothetical
MDGFGTKVLTLKGKIMTMHDRWLVFRGGSTEEVDLLYTVKRSNMVQITTKLDVFLADNIEQKKCDYRLEGVWLETSCFVYAGDSDIILAQMREKKTMQSVLFGKDNFCLTVNPNVDYAFIASLIVILFHQKDDIYPIESLWKRDITDFIC

SEQ ID NO: 73534 - DNA, 771 bp, Arabidopsis thaliana
  misc_feature (1)..(771): Ceres Seq. ID no. 4971811
  misc_feature: MA Experiment ID: 20000355 Result: Up-regulated in Transcription
  misc_feature: MA Experiment 20000355 PARAMETER Experiment Name: At_Siliques_Sub_P Parameter: Age (day) Value: 21
  misc_feature: MA Experiment 20000355 PARAMETER Experiment Name: At_Siliques_Sub_P Parameter: Organism Value: A. thaliana
  misc_feature: MA Experiment 20000355 PARAMETER Experiment Name: At_Siliques_Sub_P Parameter: Plant Line Value: WS
  misc_feature: MA Experiment 20000355 PARAMETER Experiment Name: At_Siliques_Sub_P Parameter: Tissue Value: Less Than 5mm Siliques vs. Whole Plant
atgggcataaacgcgagccatgtaccggaaacttgctaccatcattgtaaccagacgttcgagagtagtcgccaatgctttaaatggtgtcaagaattagctcgtaaagatgagtacaagatttatgggtacccttactcaaccaacacaaggcgtgtcctcgccgttcttcatgagaaaggtctctcttacgatcccatcaccgtcaacttgatagccggtgaccagaagaagccgagttttctcgctatcaatccatttggtcaagtcccagttttcctagacgggggtcttaagttgactgaatctcgagctatatctgaatacatagcgactgtccataaatcaagaggcacacaacttctgaattacaaaagctacaaaacaatgggaacacaaagaatgtggatggctatcgaatcttttgagtttgatccactcacatcaacactgacctgggaacaatccatcaagcctatgtacggtctaaagacggactataaggttgtgaatgaaaccgaggcgaagctagagaaggttctagatatatacgaagaacgactcaaaaattctagcttcttggctagtaacagcttcacaatggctgatctttatcaccttcctaatatacaataccttatggacacacatacaaagagaatgtttgtaaaccggccaagcgtgcgccggtgggtggctgagatcacagctagaccggcttggaagagggcatgtgatgtgaaggcttggtaccataagaagaagaattaa

SEQ ID NO: 73535 - protein, 256 aa, Arabidopsis thaliana
  peptide (1)..(256): Ceres Seq. ID no. 4971812
  misc_feature (136)..(239): Pfam Name: Glutathione S-transferase, C-terminal domain Pfam Description: Glutathione S-transferase, C-terminal domain
  misc_feature (1)..(256): Homolog of NCBI NO: 15218641 NR Description: glutathione transferase, putative; protein id:
  misc_feature (1)..(256): Homolog of NCBI NO: 25518742 NR Description: hypothetical protein F22D16.6 - Arabidopsis
  misc_feature (29)..(256): Homolog of NCBI NO: 18379034 NR Description: glutathione transferase, putative; protein id:
  misc_feature (29)..(256): Homolog of NCBI NO: 25287129 NR Description: hypothetical protein F22D16.5 - Arabidopsis
  misc_feature (39)..(256): Homolog of NCBI NO: 30678437 NR Description: glutathione transferase, putative [Arabidopsis >gi|28973615|gb|AAO64132.1| putative glutathione transferase
  misc_feature (40)..(243): Homolog of NCBI NO: 17377644 NR Description: Glutathione S-transferase 11 (GST class-phi)
  misc_feature (40)..(240): Homolog of NCBI NO: 15227063 NR Description: glutathione transferase, putative; protein id:
  misc_feature (40)..(240): Homolog of NCBI NO: 31790099 NR Description: glutathione S-transferase 4 [Brassica juncea]
  misc_feature (40)..(243): Homolog of NCBI NO: 15218639 NR Description: glutathione transferase, putative; protein id: supported by cDNA: gi_11095987, supported by cDNA: gi_17065131,
  misc_feature (40)..(248): Homolog of NCBI NO: 1170094 NR Description: Glutathione S-transferase (GST class-PHI) (25 kDa binding protein) >gi|860956|emb|CAA55039.1| glutathione
MGINASHVPETCYHHCNQTFESSRQCFKWCQELARKDEYKIYGYPYSTNTRRVLAVLHEKGLSYDPITVNLIAGDQKKPSFLAINPFGQVPVFLDGGLKLTESRAISEYIATVHKSRGTQLLNYKSYKTMGTQRMWMAIESFEFDPLTSTLTWEQSIKPMYGLKTDYKVVNETEAKLEKVLDIYEERLKNSSFLASNSFTMADLYHLPNIQYLMDTHTKRMFVNRPSVRRWVAEITARPAWKRACDVKAWYHKKKN

SEQ ID NO: 73536 - DNA, 3723 bp, Arabidopsis thaliana
  misc_feature (1)..(3723): Ceres Seq. ID no. 4971813
  misc_feature: MA Experiment ID: 20000173 Result: Up-regulated in Transcription
  misc_feature: MA Experiment 20000173 PARAMETER Experiment Name: At_42deg_Heat_P Parameter: Age (day) Value: 14
  misc_feature: MA Experiment 20000173 PARAMETER Experiment Name: At_42deg_Heat_P Parameter: Organism Value: A. thaliana
  misc_feature: MA Experiment 20000173 PARAMETER Experiment Name: At_42deg_Heat_P Parameter: Plant Line Value: WS
  misc_feature: MA Experiment 20000173 PARAMETER Experiment Name: At_42deg_Heat_P Parameter: Temperature (deg C) Value: 42 vs. 22
  misc_feature: MA Experiment 20000173 PARAMETER Experiment Name: At_42deg_Heat_P Parameter: Timepoint (hr) Value: 6
  misc_feature: MA Experiment 20000173 PARAMETER Experiment Name: At_42deg_Heat_P Parameter: Tissue Value: Aerial
  misc_feature: MA Experiment ID: 20000794 Result: Up-regulated in Transcription
  misc_feature: MA Experiment 20000794 PARAMETER Experiment Name: At_Petals_P Parameter: Age (day) Value: 23-25 days
  misc_feature: MA Experiment 20000794 PARAMETER Experiment Name: At_Petals_P Parameter: Plant Line Value: WS
  misc_feature: MA Experiment 20000794 PARAMETER Experiment Name: At_Petals_P Parameter: Tissue Value: Petals vs. Whole plant
atggttgatacgagacgtagctcttctgcttccaagcgtttttgtgctgcaacaagttcatcctcacgtcctaccaaacgatccaaggcggcggcggaaccggcatcgtcttcgtcggcgagtgaggtgccgattgataatcaagcaccggtttcggatcctggatcaatatctggagacccggaacttagaacttctgatccgcagagtaacgatgcggagaggccagttactaccaccgatgtgccggcgatggagaccgacacaaatccagaacttgaaggcttggtgacgcctacacctgcaggtgaagtggtggtggaagctgagaaatcgaaatcctcaaagaagcggattgctaaggctccttgggccaagcttctttctcagtttcctcagaaccctcatcttgtcatgagaggctctgtgtttactgttggacggcgagcctgcgatttatgtatcagagatcattctatgcccaatgttctatgtgaactaaggcagtctgagcacggaggtccatcagttgcatcgctggagataatagggaatggagtacttgttcaggtcaatggcaagatttaccaaaggagtacttgtgttcatctacggggtggcgatgaaattatcttcaccacccctgggaaacatgcttatgtatccttttacaagttctttgaaaatgttcagatatttcagcctcttaaagatgaaaatctagctgctccagacagaacttcttccttgagcctttttgaagcgcagagtgcccctctgaaagggcttcacgttgagacaagagcaagagactcttcatctgttgatggaactgcctctttattggcgtctatatcaaagttacaaaatgtcccttttctaccacctactgctaaaagtgtcaaaaggcagcaaaattcagaggtccctgtgttaccttctagctgcgatgattttattctggatgttgacttgaacgatgctgatagtaataatgatcatgctgctattgcttcaatggagaaaactgttgcttcgacttcttgtgctgccaacgatgaccatgatgcagatgggaatggaatggatccttttcaagaacctgaggctggaaatattcctgatcctgcttatgaaattagaccaattttgagtttacttggggatccttctgaatttgatttaaggggtagcatttccaaaatactggtggatgaacgaagggaagtgagggaaatgccgaaagaatatgaacgtccatcagcttcggtattaactagacgtcaagcgcataaggatagtctgcgaggaggaatactcaatcctcaggacatagaagtttcttttgagaacttcccatatttcttaagtggcacaactaaggatgttttgatgatatccacatatgcccatataaagtatggaaaggaatatgcagagtatgcatcagatttgccaacagcgtgtccccgctctgagatatatcaggaaatgttagcaaaagcgcttgcgaaacaatgtggggccaaattgatgattgttgactctctcttgttacctgggggttcaacacccaaggaagcagatactaccaaagaaagttctaggcgtgaaagactgtccgtgcttgctaaacgagctgtacaagctgcacaagctgctgttttgcagcataagaaaccaatttcaagtgtagaggctggtataacaggtggatcaacattgagctctcaggctgttcggaggcaagaagtatcaactgcaacctctaaaagttacaccttcaaagcaggtgatcgagtaaggtttttaggcccttcaacttcttctcttgcttctctccgagctccacctaggggaccggcaacaggttttcaaggaaaagtactccttgcgtttgaaggcaatggatcttcaaaaatcggggttagatttgatagatcgataccagatggcaatgatcttggtggtctatgcgaagaagaccatgcgagttctcttcggttagaaagttcttccagtgacgatgctgataaacttgccattaatgaaatctttgaggtagcttttaatgaaagtgaaagagggtcattgatattgttcctcaaagacattgagaaatctgtgtcggggaacactgatgtgtatataactttgaagagcaagcttgagaatttaccggagaatattgttgtcatagcttcgcaaacccagttggacaaccgaaaggaaaaatcccaccctggaggtttcttgttcacaaagtttggcagcaaccagacagcactgctggaccttgcatttccggatacttttggtggtagactgcaggataggaacacagaaatgcctaaagcagtgaaacaaatcactaggctatttccaaacaaagtgaccatccaattacctgaggatgaagcttcgctggtcgactggaaggataaacttgaacgtgatactgagatcctgaaggctcaagctaatattacaagcatccgtgcggtccttagcaaaaatcagctagtctgccctgacattgaaatcttgtgcatcaaagatcaaacccttccttctgatagtgtggagaaagtggttggctttgctttcaatcaccatcttatgaactgctcagaacctacagtcaaggacaacaagcttatcatctcggcagaaagcatcacatatggcctgcagctgttgcatgagattcaaaacgaaaacaagagcacaaagaaatctctgaaagatgttgttacagagaatgaattcgagaaaaaactactatcagacgtcattcctccaagtgatatcggtgtttctttcagtgatattggggctttggaaaatgtgaaagataccttgaaggagttggtgatgcttcctcttcaaagacccgaattgtttggcaaaggtcaacttacaaagcctacaaagggtatactattgtttggaccgcctggtacggggaagacaatgctggcaaaagctgtagcaaccgaggctggggcaaactttatcaatatttcaatgtccagcattacttcaaagggagagaagtacgttaaagctgttttctctttagcaagtaagatagctccaagcgtcatttttgttgatgaggttgatagcatgctgggaagacgtgagaatccaggagaacatgaagctatgcgtaagatgaagaacgaattcatgataaactgggacggcttacgcacaaaggataaagaaagggttttagtattggctgctaccaacagaccatttgaccttgacgaagcagtaattagacggcttccccgaaggttgatggttaatctgccggattcagcaaacagatcgaagatcttgagcgtgattttggcgaaagaagagatggcagaagacgtagacttagaagcaatagcaaatatgacagatgggtactcagggagtgacttaaagaatctttgcgtgaccgcggcacatcttcctatccgagagattcttgaaaaagaaaagaaggagagaagtgtggctcaagccgaaaaccgagcaatgccacagctatatagcagtacagacgttagacccttgaacatgaatgatttcaaaaccgcacatgatcaggtatgtgcgagtgtggcgtctgattcatcgaacatgaatgagctccagcaatggaacgagctctatggagaaggaggctcgaggaagaagacatcactgagttacttcatgtaa

SEQ ID NO: 73537 - protein, 1240 aa, Arabidopsis thaliana
  peptide (1)..(1240): Ceres Seq. ID no. 4971814
  misc_feature (979)..(1160): Pfam Name: ATPase family associated with various cellular Pfam Description: ATPase family associated with various cellular
  misc_feature (586)..(1240): Homolog of NCBI NO: 33146850 NR Description: putative MSP1(mitochondrial sorting of proteins)
  misc_feature (1)..(221): Homolog of NCBI NO: 33146850 NR Description: putative MSP1(mitochondrial sorting of proteins)
  misc_feature (425)..(536): Homolog of NCBI NO: 33146850 NR Description: putative MSP1(mitochondrial sorting of proteins)
  misc_feature (19)..(687): Homolog of NCBI NO: 7487017 NR Description: hypothetical protein T14P8.8 - Arabidopsis >gi|3193293|gb|AAC19277.1| contains a short region of similarity another Arabidopsis hypothetical protein F19K23.8 (GB:AC000375)
  misc_feature (874)..(1240): Homolog of NCBI NO: 7487016 NR Description: hypothetical protein T14P8.7 - Arabidopsis >gi|3193292|gb|AAC19276.1| similar to ATPases associated with
  misc_feature (802)..(1239): Homolog of NCBI NO: 15234019 NR Description: putative protein; protein id: At4g24850.1
  misc_feature (564)..(1240): Homolog of NCBI NO: 15234347 NR Description: putative protein; protein id: At4g28000.1
  misc_feature (425)..(473): Homolog of NCBI NO: 15234347 NR Description: putative protein; protein id: At4g28000.1
  misc_feature (904)..(1240): Homolog of NCBI NO: 34904204 NR Description: P0492F05.26 [Oryza sativa (japonica
  misc_feature (432)..(623): Homolog of NCBI NO: 34904204 NR Description: P0492F05.26 [Oryza sativa (japonica
MVDTRRSSSASKRFCAATSSSSRPTKRSKAAAEPASSSSASEVPIDNQAPVSDPGSISGDPELRTSDPQSNDAERPVTTTDVPAMETDTNPELEGLVTPTPAGEVVVEAEKSKSSKKRIAKAPWAKLLSQFPQNPHLVMRGSVFTVGRRACDLCIRDHSMPNVLCELRQSEHGGPSVASLEIIGNGVLVQVNGKIYQRSTCVHLRGGDEIIFTTPGKHAYVSFYKFFENVQIFQPLKDENLAAPDRTSSLSLFEAQSAPLKGLHVETRARDSSSVDGTASLLASISKLQNVPFLPPTAKSVKRQQNSEVPVLPSSCDDFILDVDLNDADSNNDHAAIASMEKTVASTSCAANDDHDADGNGMDPFQEPEAGNIPDPAYEIRPILSLLGDPSEFDLRGSISKILVDERREVREMPKEYERPSASVLTRRQAHKDSLRGGILNPQDIEVSFENFPYFLSGTTKDVLMISTYAHIKYGKEYAEYASDLPTACPRSEIYQEMLAKALAKQCGAKLMIVDSLLLPGGSTPKEADTTKESSRRERLSVLAKRAVQAAQAAVLQHKKPISSVEAGITGGSTLSSQAVRRQEVSTATSKSYTFKAGDRVRFLGPSTSSLASLRAPPRGPATGFQGKVLLAFEGNGSSKIGVRFDRSIPDGNDLGGLCEEDHASSLRLESSSSDDADKLAINEIFEVAFNESERGSLILFLKDIEKSVSGNTDVYITLKSKLENLPENIVVIASQTQLDNRKEKSHPGGFLFTKFGSNQTALLDLAFPDTFGGRLQDRNTEMPKAVKQITRLFPNKVTIQLPEDEASLVDWKDKLERDTEILKAQANITSIRAVLSKNQLVCPDIEILCIKDQTLPSDSVEKVVGFAFNHHLMNCSEPTVKDNKLIISAESITYGLQLLHEIQNENKSTKKSLKDVVTENEFEKKLLSDVIPPSDIGVSFSDIGALENVKDTLKELVMLPLQRPELFGKGQLTKPTKGILLFGPPGTGKTMLAKAVATEAGANFINISMSSITSKGEKYVKAVFSLASKIAPSVIFVDEVDSMLGRRENPGEHEAMRKMKNEFMINWDGLRTKDKERVLVLAATNRPFDLDEAVIRRLPRRLMVNLPDSANRSKILSVILAKEEMAEDVDLEAIANMTDGYSGSDLKNLCVTAAHLPIREILEKEKKERSVAQAENRAMPQLYSSTDVRPLNMNDFKTAHDQVCASVASDSSNMNELQQWNELYGEGGSRKKTSLSYFM

SEQ ID NO: 73538 - protein, 1156 aa, Arabidopsis thaliana
  peptide (1)..(1156): Ceres Seq. ID no. 4971815
  misc_feature (895)..(1076): Pfam Name: ATPase family associated with various cellular Pfam Description: ATPase family associated with various cellular
  misc_feature (502)..(1156): Homolog of NCBI NO: 33146850 NR Description: putative MSP1(mitochondrial sorting of proteins)
  misc_feature (1)..(137): Homolog of NCBI NO: 33146850 NR Description: putative MSP1(mitochondrial sorting of proteins)
  misc_feature (341)..(452): Homolog of NCBI NO: 33146850 NR Description: putative MSP1(mitochondrial sorting of proteins)
  misc_feature (1)..(603): Homolog of NCBI NO: 7487017 NR Description: hypothetical protein T14P8.8 - Arabidopsis >gi|3193293|gb|AAC19277.1| contains a short region of similarity another Arabidopsis hypothetical protein F19K23.8 (GB:AC000375)
  misc_feature (790)..(1156): Homolog of NCBI NO: 7487016 NR Description: hypothetical protein T14P8.7 - Arabidopsis >gi|3193292|gb|AAC19276.1| similar to ATPases associated with
  misc_feature (718)..(1155): Homolog of NCBI NO: 15234019 NR Description: putative protein; protein id: At4g24850.1
  misc_feature (480)..(1156): Homolog of NCBI NO: 15234347 NR Description: putative protein; protein id: At4g28000.1
  misc_feature (341)..(389): Homolog of NCBI NO: 15234347 NR Description: putative protein; protein id: At4g28000.1
  misc_feature (820)..(1156): Homolog of NCBI NO: 34904204 NR Description: P0492F05.26 [Oryza sativa (japonica
  misc_feature (348)..(539): Homolog of NCBI NO: 34904204 NR Description: P0492F05.26 [Oryza sativa (japonica
METDTNPELEGLVTPTPAGEVVVEAEKSKSSKKRIAKAPWAKLLSQFPQNPHLVMRGSVFTVGRRACDLCIRDHSMPNVLCELRQSEHGGPSVASLEIIGNGVLVQVNGKIYQRSTCVHLRGGDEIIFTTPGKHAYVSFYKFFENVQIFQPLKDENLAAPDRTSSLSLFEAQSAPLKGLHVETRARDSSSVDGTASLLASISKLQNVPFLPPTAKSVKRQQNSEVPVLPSSCDDFILDVDLNDADSNNDHAAIASMEKTVASTSCAANDDHDADGNGMDPFQEPEAGNIPDPAYEIRPILSLLGDPSEFDLRGSISKILVDERREVREMPKEYERPSASVLTRRQAHKDSLRGGILNPQDIEVSFENFPYFLSGTTKDVLMISTYAHIKYGKEYAEYASDLPTACPRSEIYQEMLAKALAKQCGAKLMIVDSLLLPGGSTPKEADTTKESSRRERLSVLAKRAVQAAQAAVLQHKKPISSVEAGITGGSTLSSQAVRRQEVSTATSKSYTFKAGDRVRFLGPSTSSLASLRAPPRGPATGFQGKVLLAFEGNGSSKIGVRFDRSIPDGNDLGGLCEEDHASSLRLESSSSDDADKLAINEIFEVAFNESERGSLILFLKDIEKSVSGNTDVYITLKSKLENLPENIVVIASQTQLDNRKEKSHPGGFLFTKFGSNQTALLDLAFPDTFGGRLQDRNTEMPKAVKQITRLFPNKVTIQLPEDEASLVDWKDKLERDTEILKAQANITSIRAVLSKNQLVCPDIEILCIKDQTLPSDSVEKVVGFAFNHHLMNCSEPTVKDNKLIISAESITYGLQLLHEIQNENKSTKKSLKDVVTENEFEKKLLSDVIPPSDIGVSFSDIGALENVKDTLKELVMLPLQRPELFGKGQLTKPTKGILLFGPPGTGKTMLAKAVATEAGANFINISMSSITSKGEKYVKAVFSLASKIAPSVIFVDEVDSMLGRRENPGEHEAMRKMKNEFMINWDGLRTKDKERVLVLAATNRPFDLDEAVIRRLPRRLMVNLPDSANRSKILSVILAKEEMAEDVDLEAIANMTDGYSGSDLKNLCVTAAHLPIREILEKEKKERSVAQAENRAMPQLYSSTDVRPLNMNDFKTAHDQVCASVASDSSNMNELQQWNELYGEGGSRKKTSLSYFM

SEQ ID NO: 73539 - protein, 1102 aa, Arabidopsis thaliana
  peptide (1)..(1102): Ceres Seq. ID no. 4971816
  misc_feature (841)..(1022): Pfam Name: ATPase family associated with various cellular Pfam Description: ATPase family associated with various cellular
  misc_feature (448)..(1102): Homolog of NCBI NO: 33146850 NR Description: putative MSP1(mitochondrial sorting of proteins)
  misc_feature (1)..(83): Homolog of NCBI NO: 33146850 NR Description: putative MSP1(mitochondrial sorting of proteins)
  misc_feature (287)..(398): Homolog of NCBI NO: 33146850 NR Description: putative MSP1(mitochondrial sorting of proteins)
  misc_feature (1)..(549): Homolog of NCBI NO: 7487017 NR Description: hypothetical protein T14P8.8 - Arabidopsis >gi|3193293|gb|AAC19277.1| contains a short region of similarity another Arabidopsis hypothetical protein F19K23.8 (GB:AC000375)
  misc_feature (736)..(1102): Homolog of NCBI NO: 7487016 NR Description: hypothetical protein T14P8.7 - Arabidopsis >gi|3193292|gb|AAC19276.1| similar to ATPases associated with
  misc_feature (664)..(1101): Homolog of NCBI NO: 15234019 NR Description: putative protein; protein id: At4g24850.1
  misc_feature (426)..(1102): Homolog of NCBI NO: 15234347 NR Description: putative protein; protein id: At4g28000.1
  misc_feature (287)..(335): Homolog of NCBI NO: 15234347 NR Description: putative protein; protein id: At4g28000.1
  misc_feature (766)..(1102): Homolog of NCBI NO: 34904204 NR Description: P0492F05.26 [Oryza sativa (japonica
  misc_feature (294)..(485): Homolog of NCBI NO: 34904204 NR Description: P0492F05.26 [Oryza sativa (japonica
MRGSVFTVGRRACDLCIRDHSMPNVLCELRQSEHGGPSVASLEIIGNGVLVQVNGKIYQRSTCVHLRGGDEIIFTTPGKHAYVSFYKFFENVQIFQPLKDENLAAPDRTSSLSLFEAQSAPLKGLHVETRARDSSSVDGTASLLASISKLQNVPFLPPTAKSVKRQQNSEVPVLPSSCDDFILDVDLNDADSNNDHAAIASMEKTVASTSCAANDDHDADGNGMDPFQEPEAGNIPDPAYEIRPILSLLGDPSEFDLRGSISKILVDERREVREMPKEYERPSASVLTRRQAHKDSLRGGILNPQDIEVSFENFPYFLSGTTKDVLMISTYAHIKYGKEYAEYASDLPTACPRSEIYQEMLAKALAKQCGAKLMIVDSLLLPGGSTPKEADTTKESSRRERLSVLAKRAVQAAQAAVLQHKKPISSVEAGITGGSTLSSQAVRRQEVSTATSKSYTFKAGDRVRFLGPSTSSLASLRAPPRGPATGFQGKVLLAFEGNGSSKIGVRFDRSIPDGNDLGGLCEEDHASSLRLESSSSDDADKLAINEIFEVAFNESERGSLILFLKDIEKSVSGNTDVYITLKSKLENLPENIVVIASQTQLDNRKEKSHPGGFLFTKFGSNQTALLDLAFPDTFGGRLQDRNTEMPKAVKQITRLFPNKVTIQLPEDEASLVDWKDKLERDTEILKAQANITSIRAVLSKNQLVCPDIEILCIKDQTLPSDSVEKVVGFAFNHHLMNCSEPTVKDNKLIISAESITYGLQLLHEIQNENKSTKKSLKDVVTENEFEKKLLSDVIPPSDIGVSFSDIGALENVKDTLKELVMLPLQRPELFGKGQLTKPTKGILLFGPPGTGKTMLAKAVATEAGANFINISMSSITSKGEKYVKAVFSLASKIAPSVIFVDEVDSMLGRRENPGEHEAMRKMKNEFMINWDGLRTKDKERVLVLAATNRPFDLDEAVIRRLPRRLMVNLPDSANRSKILSVILAKEEMAEDVDLEAIANMTDGYSGSDLKNLCVTAAHLPIREILEKEKKERSVAQAENRAMPQLYSSTDVRPLNMNDFKTAHDQVCASVASDSSNMNELQQWNELYGEGGSRKKTSLSYFM

SEQ ID NO: 73540 - DNA, 2706 bp, Arabidopsis thaliana
  misc_feature (1)..(2706): Ceres Seq. ID no. 4971924
  misc_feature: MA Experiment ID: 20000166 Result: Down-regulated in Transcription
  misc_feature: MA Experiment 20000166 PARAMETER Experiment Name: At_100uM_ABA_P Parameter: Age (day) Value: 14
  misc_feature: MA Experiment 20000166 PARAMETER Experiment Name: At_100uM_ABA_P Parameter: Organism Value: A. thaliana
  misc_feature: MA Experiment 20000166 PARAMETER Experiment Name: At_100uM_ABA_P Parameter: Plant Line Value: WS
  misc_feature: MA Experiment 20000166 PARAMETER Experiment Name: At_100uM_ABA_P Parameter: Timepoint (hr) Value: 1
  misc_feature: MA Experiment 20000166 PARAMETER Experiment Name: At_100uM_ABA_P Parameter: Tissue Value: Aerial
  misc_feature: MA Experiment 20000166 PARAMETER Experiment Name: At_100uM_ABA_P Parameter: Treatment Value: 100uM ABA vs. No Treatment
  misc_feature: MA Experiment ID: 20000436 Result: Down-regulated in Transcription
  misc_feature: MA Experiment 20000436 PARAMETER Experiment Name: At_Drought_P Parameter: Age (day) Value: 7
  misc_feature: MA Experiment 20000436 PARAMETER Experiment Name: At_Drought_P Parameter: Organism Value: A. thaliana
  misc_feature: MA Experiment 20000436 PARAMETER Experiment Name: At_Drought_P Parameter: Plant Line Value: WS
  misc_feature: MA Experiment 20000436 PARAMETER Experiment Name: At_Drought_P Parameter: Timepoint (hr) Value: 12
  misc_feature: MA Experiment 20000436 PARAMETER Experiment Name: At_Drought_P Parameter: Tissue Value: Whole Plant
  misc_feature: MA Experiment 20000436 PARAMETER Experiment Name: At_Drought_P Parameter: Treatment Value: Drought vs. No Drought
  misc_feature: MA Experiment ID: 20000438 Result: Up-regulated in Transcription
  misc_feature: MA Experiment 20000438 PARAMETER Experiment Name: At_Shoots__P Parameter: Age (day) Value: 14
  misc_feature: MA Experiment 20000438 PARAMETER Experiment Name: At_Shoots__P Parameter: Tissue Value: Shoots vs. Whole Plant
  misc_feature: MA Experiment ID: 20000453 Result: Down-regulated in Transcription
  misc_feature: MA Experiment 20000453 PARAMETER Experiment Name: At_100uM_ABA_P Parameter: Age (day) Value: 15
  misc_feature: MA Experiment 20000453 PARAMETER Experiment Name: At_100uM_ABA_P Parameter: Organism Value: A. thaliana
  misc_feature: MA Experiment 20000453 PARAMETER Experiment Name: At_100uM_ABA_P Parameter: Plant Line Value: WS
  misc_feature: MA Experiment 20000453 PARAMETER Experiment Name: At_100uM_ABA_P Parameter: Timepoint (hr) Value: 24
  misc_feature: MA Experiment 20000453 PARAMETER Experiment Name: At_100uM_ABA_P Parameter: Tissue Value: Aerial
  misc_feature: MA Experiment 20000453 PARAMETER Experiment Name: At_100uM_ABA_P Parameter: Treatment Value: 100uM ABA vs. No Treatment
atgattattgttggtgttcttttagttagtttcacacttttaagtcacatgaatcagttcttacatctttttgaaagtccaacctttgagatatatccggaactggggcgtgactcacagttaatgactgatccacttggttttcaatacttacacagcatttatacattttcactaaatccttgctctgaaacaaacacaaatatgaaggttgtcttcgttatcttctttttcttcctcttccaattttgtatctctgtggatacaattatgagaagacagtccttgagagatggtgaggttatactctccgcagggaagagattcgcgtttggattcttcagtcttggggattcagagctccggtatgttgggatttggtatgctcaaatctctcaacagactattgtttgggttgcaaacagagaccatcctattaatgacacctctgggatggtaaagttcagcaacagaggcaatctctctgtctatgcatctgacaatgaaacagagcttatctggtcaacaaatgtttcagatagtatgttggaaccaactttagttgctacactctctgatttaggcaaccttgttctgtttgatccagtcacagggagaagtttctgggagagctttgatcaccctacagacacgtttcttccgtttatgagattgggattcacacgaaaagacggtttggatcgctctctaacatcatggaagtctcatggtgaccctggttctggagacttaatactgcggatggaacgtagagggtttccacagttgattctgtacaaaggtgtaaccccatggtggcgtatggggtcatggaccgggcataggtggagcggggtgcctgaaatgccaatagggtacatcttcaataactcatttgtgaataatgaggacgaagtatccttcacttacggtgtgacagatgcttcggtcataacaagaaccatggtgaacgagactggaaccatgcaccggtttacatggattgcgagggacaagagatggaatgatttctggtcagttcctaaagagcagtgcgataactacgctcattgtggccctaacggttactgtgattcccctagctcaaaaacgtttgagtgcacatgcctacctggttttgagcccaagtttccccggcattggttcttgagggactcttctggcgggtgtacaaagaaaaagagagcttcaatatgcagtgagaaagacgggtttgtgaagttaaagcgcatgaagattcccgacacatcagatgcaagtgtggatatgaacataacattgaaggagtgcaaacagaggtgcttgaagaactgctcttgtgtcgcttacgcaagtgcttaccacgagagtaaaagaggagcaataggatgcttgaaatggcatggtggtatgttggatgcaaggacatacttgaactcgggacaagatttctacatacgtgtagacaaggaagacgcggtggaacagaaatggcttatcagggaagaggagagtccttctgattcttatcagtttgattgcagccgtaatgttactaactgtcattttgttctgtgttgtaagggagcgacgaatgcagagtcaaacaggcatagaagctcttcggcaaacttcgccccggtcccttttgattttgacgaatcatttagatttgaacaagacaaggcgagaaaccgggagttacctttatttgatcttaacacgatcgttgcagcaacaaataacttctcttcccaaaacaagcttggagcaggtggtttcggacctgtttataagggcgtgttacaaaaccgtatggagatagcggtgaagaggttgtcgagaaactcgggacaaggaatggaagagttcaagaacgaggtcaagctgatatcaaagttgcagcatcgaaatctcgtgaggatcttaggatgttgcgttgaattggaagagaagatgttggtatacgagtatttaccaaacaagagcctagactatttcatattccatgaagagcagagagcagagttggattggccaaaaagaatggagatagtccgagggattgctcgtggaatcttatatcttcatcaagattcaagactgagaatcatccacagagatctcaaggccagcaatatacttcttgacagtgaaatgatcccaaagatttcagatttcggcatggctagaatctttgggggcaaccaaatggaaggatgcacaagtagggtcgtcggaacattcggatatatggcaccggagtatgcaatggagggacagttctccattaaatccgacgtctatagctttggagtattgatgttagagatcataaccggaaagaaaaacagtgctttccacgaggaatcatctaacttagtcggacatatttgggatctatgggaaaacggtgaagcaacagagatcatagacaatttaatggaccaagagacttatgatgagagagaagtgatgaagtgcatacaaattgggttgctctgtgtgcaagaaaacgcttcggacagagtagacatgtcctctgttgtcatcatgttgggtcataacgccactaatcttccgaatccaaagcatcctgcgtttacttccgcgagaaggagaggcggtgaaaatggtgcttgtcttaagggacaaaccggtatttctgttaatgacgttaccttcagcgacattcaaggtcgttaa

SEQ ID NO: 73541 - protein, 901 aa, Arabidopsis thaliana
  peptide (1)..(901): Ceres Seq. ID no. 4971925
  misc_feature (133)..(247): Pfam Name: D-mannose binding lectin Pfam Description: D-mannose binding lectin
  misc_feature (1)..(589): Homolog of NCBI NO: 6554177 NR Description: T23J18.1 [Arabidopsis thaliana]
  misc_feature (73)..(497): Homolog of NCBI NO: 15234427 NR Description: receptor-like serine/threonine protein kinase
  misc_feature (567)..(901): Homolog of NCBI NO: 15234427 NR Description: receptor-like serine/threonine protein kinase
  misc_feature (73)..(497): Homolog of NCBI NO: 913141 NR Description: ARK3 product/receptor-like serine/threonine
  misc_feature (567)..(901): Homolog of NCBI NO: 913141 NR Description: ARK3 product/receptor-like serine/threonine
  misc_feature (71)..(496): Homolog of NCBI NO: 16040952 NR Description: receptor kinase 5 [Brassica rapa]
  misc_feature (560)..(901): Homolog of NCBI NO: 16040952 NR Description: receptor kinase 5 [Brassica rapa]
  misc_feature (73)..(492): Homolog of NCBI NO: 7434408 NR Description: S-receptor kinase (EC 2.7.1.-) 1 - turnip
  misc_feature (554)..(901): Homolog of NCBI NO: 7434408 NR Description: S-receptor kinase (EC 2.7.1.-) 1 - turnip
  misc_feature (67)..(497): Homolog of NCBI NO: 38344784 NR Description: OSJNBa0043L09.4 [Oryza sativa (japonica
MIIVGVLLVSFTLLSHMNQFLHLFESPTFEIYPELGRDSQLMTDPLGFQYLHSIYTFSLNPCSETNTNMKVVFVIFFFFLFQFCISVDTIMRRQSLRDGEVILSAGKRFAFGFFSLGDSELRYVGIWYAQISQQTIVWVANRDHPINDTSGMVKFSNRGNLSVYASDNETELIWSTNVSDSMLEPTLVATLSDLGNLVLFDPVTGRSFWESFDHPTDTFLPFMRLGFTRKDGLDRSLTSWKSHGDPGSGDLILRMERRGFPQLILYKGVTPWWRMGSWTGHRWSGVPEMPIGYIFNNSFVNNEDEVSFTYGVTDASVITRTMVNETGTMHRFTWIARDKRWNDFWSVPKEQCDNYAHCGPNGYCDSPSSKTFECTCLPGFEPKFPRHWFLRDSSGGCTKKKRASICSEKDGFVKLKRMKIPDTSDASVDMNITLKECKQRCLKNCSCVAYASAYHESKRGAIGCLKWHGGMLDARTYLNSGQDFYIRVDKEDAVEQKWLIREEESPSDSYQFDCSRNVTNCHFVLCCKGATNAESNRHRSSSANFAPVPFDFDESFRFEQDKARNRELPLFDLNTIVAATNNFSSQNKLGAGGFGPVYKGVLQNRMEIAVKRLSRNSGQGMEEFKNEVKLISKLQHRNLVRILGCCVELEEKMLVYEYLPNKSLDYFIFHEEQRAELDWPKRMEIVRGIARGILYLHQDSRLRIIHRDLKASNILLDSEMIPKISDFGMARIFGGNQMEGCTSRVVGTFGYMAPEYAMEGQFSIKSDVYSFGVLMLEIITGKKNSAFHEESSNLVGHIWDLWENGEATEIIDNLMDQETYDEREVMKCIQIGLLCVQENASDRVDMSSVVIMLGHNATNLPNPKHPAFTSARRRGGENGACLKGQTGISVNDVTFSDIQGR

SEQ ID NO: 73542 - protein, 885 aa, Arabidopsis thaliana
  peptide (1)..(885): Ceres Seq. ID no. 4971926
  misc_feature (117)..(231): Pfam Name: D-mannose binding lectin Pfam Description: D-mannose binding lectin
  misc_feature (1)..(573): Homolog of NCBI NO: 6554177 NR Description: T23J18.1 [Arabidopsis thaliana]
  misc_feature (57)..(481): Homolog of NCBI NO: 15234427 NR Description: receptor-like serine/threonine protein kinase
  misc_feature (551)..(885): Homolog of NCBI NO: 15234427 NR Description: receptor-like serine/threonine protein kinase
  misc_feature (57)..(481): Homolog of NCBI NO: 913141 NR Description: ARK3 product/receptor-like serine/threonine
  misc_feature (551)..(885): Homolog of NCBI NO: 913141 NR Description: ARK3 product/receptor-like serine/threonine
  misc_feature (55)..(480): Homolog of NCBI NO: 16040952 NR Description: receptor kinase 5 [Brassica rapa]
  misc_feature (544)..(885): Homolog of NCBI NO: 16040952 NR Description: receptor kinase 5 [Brassica rapa]
  misc_feature (57)..(476): Homolog of NCBI NO: 7434408 NR Description: S-receptor kinase (EC 2.7.1.-) 1 - turnip
  misc_feature (538)..(885): Homolog of NCBI NO: 7434408 NR Description: S-receptor kinase (EC 2.7.1.-) 1 - turnip
  misc_feature (51)..(481): Homolog of NCBI NO: 38344784 NR Description: OSJNBa0043L09.4 [Oryza sativa (japonica
MNQFLHLFESPTFEIYPELGRDSQLMTDPLGFQYLHSIYTFSLNPCSETNTNMKVVFVIFFFFLFQFCISVDTIMRRQSLRDGEVILSAGKRFAFGFFSLGDSELRYVGIWYAQISQQTIVWVANRDHPINDTSGMVKFSNRGNLSVYASDNETELIWSTNVSDSMLEPTLVATLSDLGNLVLFDPVTGRSFWESFDHPTDTFLPFMRLGFTRKDGLDRSLTSWKSHGDPGSGDLILRMERRGFPQLILYKGVTPWWRMGSWTGHRWSGVPEMPIGYIFNNSFVNNEDEVSFTYGVTDASVITRTMVNETGTMHRFTWIARDKRWNDFWSVPKEQCDNYAHCGPNGYCDSPSSKTFECTCLPGFEPKFPRHWFLRDSSGGCTKKKRASICSEKDGFVKLKRMKIPDTSDASVDMNITLKECKQRCLKNCSCVAYASAYHESKRGAIGCLKWHGGMLDARTYLNSGQDFYIRVDKEDAVEQKWLIREEESPSDSYQFDCSRNVTNCHFVLCCKGATNAESNRHRSSSANFAPVPFDFDESFRFEQDKARNRELPLFDLNTIVAATNNFSSQNKLGAGGFGPVYKGVLQNRMEIAVKRLSRNSGQGMEEFKNEVKLISKLQHRNLVRILGCCVELEEKMLVYEYLPNKSLDYFIFHEEQRAELDWPKRMEIVRGIARGILYLHQDSRLRIIHRDLKASNILLDSEMIPKISDFGMARIFGGNQMEGCTSRVVGTFGYMAPEYAMEGQFSIKSDVYSFGVLMLEIITGKKNSAFHEESSNLVGHIWDLWENGEATEIIDNLMDQETYDEREVMKCIQIGLLCVQENASDRVDMSSVVIMLGHNATNLPNPKHPAFTSARRRGGENGACLKGQTGISVNDVTFSDIQGR

SEQ ID NO: 73543 - protein, 860 aa, Arabidopsis thaliana
  peptide (1)..(860): Ceres Seq. ID no. 4971927
  misc_feature (92)..(206): Pfam Name: D-mannose binding lectin Pfam Description: D-mannose binding lectin
  misc_feature (1)..(548): Homolog of NCBI NO: 6554177 NR Description: T23J18.1 [Arabidopsis thaliana]
  misc_feature (32)..(456): Homolog of NCBI NO: 15234427 NR Description: receptor-like serine/threonine protein kinase
  misc_feature (526)..(860): Homolog of NCBI NO: 15234427 NR Description: receptor-like serine/threonine protein kinase
  misc_feature (32)..(456): Homolog of NCBI NO: 913141 NR Description: ARK3 product/receptor-like serine/threonine
  misc_feature (526)..(860): Homolog of NCBI NO: 913141 NR Description: ARK3 product/receptor-like serine/threonine
  misc_feature (30)..(455): Homolog of NCBI NO: 16040952 NR Description: receptor kinase 5 [Brassica rapa]
  misc_feature (519)..(860): Homolog of NCBI NO: 16040952 NR Description: receptor kinase 5 [Brassica rapa]
  misc_feature (32)..(451): Homolog of NCBI NO: 7434408 NR Description: S-receptor kinase (EC 2.7.1.-) 1 - turnip
  misc_feature (513)..(860): Homolog of NCBI NO: 7434408 NR Description: S-receptor kinase (EC 2.7.1.-) 1 - turnip
  misc_feature (26)..(456): Homolog of NCBI NO: 38344784 NR Description: OSJNBa0043L09.4 [Oryza sativa (japonica
MTDPLGFQYLHSIYTFSLNPCSETNTNMKVVFVIFFFFLFQFCISVDTIMRRQSLRDGEVILSAGKRFAFGFFSLGDSELRYVGIWYAQISQQTIVWVANRDHPINDTSGMVKFSNRGNLSVYASDNETELIWSTNVSDSMLEPTLVATLSDLGNLVLFDPVTGRSFWESFDHPTDTFLPFMRLGFTRKDGLDRSLTSWKSHGDPGSGDLILRMERRGFPQLILYKGVTPWWRMGSWTGHRWSGVPEMPIGYIFNNSFVNNEDEVSFTYGVTDASVITRTMVNETGTMHRFTWIARDKRWNDFWSVPKEQCDNYAHCGPNGYCDSPSSKTFECTCLPGFEPKFPRHWFLRDSSGGCTKKKRASICSEKDGFVKLKRMKIPDTSDASVDMNITLKECKQRCLKNCSCVAYASAYHESKRGAIGCLKWHGGMLDARTYLNSGQDFYIRVDKEDAVEQKWLIREEESPSDSYQFDCSRNVTNCHFVLCCKGATNAESNRHRSSSANFAPVPFDFDESFRFEQDKARNRELPLFDLNTIVAATNNFSSQNKLGAGGFGPVYKGVLQNRMEIAVKRLSRNSGQGMEEFKNEVKLISKLQHRNLVRILGCCVELEEKMLVYEYLPNKSLDYFIFHEEQRAELDWPKRMEIVRGIARGILYLHQDSRLRIIHRDLKASNILLDSEMIPKISDFGMARIFGGNQMEGCTSRVVGTFGYMAPEYAMEGQFSIKSDVYSFGVLMLEIITGKKNSAFHEESSNLVGHIWDLWENGEATEIIDNLMDQETYDEREVMKCIQIGLLCVQENASDRVDMSSVVIMLGHNATNLPNPKHPAFTSARRRGGENGACLKGQTGISVNDVTFSDIQGR

SEQ ID NO: 73544 - DNA, 2523 bp, Arabidopsis thaliana
  misc_feature (1)..(2523): Ceres Seq. ID no. 4971928
  misc_feature: MA Experiment ID: 20000171 Result: Down-regulated in Transcription
  misc_feature: MA Experiment 20000171 PARAMETER Experiment Name: At_42deg_Heat_P Parameter: Age (day) Value: 14
  misc_feature: MA Experiment 20000171 PARAMETER Experiment Name: At_42deg_Heat_P Parameter: Organism Value: A. thaliana
  misc_feature: MA Experiment 20000171 PARAMETER Experiment Name: At_42deg_Heat_P Parameter: Plant Line Value: WS
  misc_feature: MA Experiment 20000171 PARAMETER Experiment Name: At_42deg_Heat_P Parameter: Temperature (deg C) Value: 42 vs. 22
  misc_feature: MA Experiment 20000171 PARAMETER Experiment Name: At_42deg_Heat_P Parameter: Timepoint (hr) Value: 1
  misc_feature: MA Experiment 20000171 PARAMETER Experiment Name: At_42deg_Heat_P Parameter: Tissue Value: Aerial
  misc_feature: MA Experiment ID: 20000173 Result: Down-regulated in Transcription
  misc_feature: MA Experiment 20000173 PARAMETER Experiment Name: At_42deg_Heat_P Parameter: Age (day) Value: 14
  misc_feature: MA Experiment 20000173 PARAMETER Experiment Name: At_42deg_Heat_P Parameter: Organism Value: A. thaliana
  misc_feature: MA Experiment 20000173 PARAMETER Experiment Name: At_42deg_Heat_P Parameter: Plant Line Value: WS
  misc_feature: MA Experiment 20000173 PARAMETER Experiment Name: At_42deg_Heat_P Parameter: Temperature (deg C) Value: 42 vs. 22
  misc_feature: MA Experiment 20000173 PARAMETER Experiment Name: At_42deg_Heat_P Parameter: Timepoint (hr) Value: 6
  misc_feature: MA Experiment 20000173 PARAMETER Experiment Name: At_42deg_Heat_P Parameter: Tissue Value: Aerial
  misc_feature: MA Experiment ID: 20000182 Result: Up-regulated in Transcription
  misc_feature: MA Experiment 20000182 PARAMETER Experiment Name: At_2mM_SA_P Parameter: Age (day) Value: 14
  misc_feature: MA Experiment 20000182 PARAMETER Experiment Name: At_2mM_SA_P Parameter: Organism Value: A. thaliana
  misc_feature: MA Experiment 20000182 PARAMETER Experiment Name: At_2mM_SA_P Parameter: Plant Line Value: WS
  misc_feature: MA Experiment 20000182 PARAMETER Experiment Name: At_2mM_SA_P Parameter: Timepoint (hr) Value: 6
  misc_feature: MA Experiment 20000182 PARAMETER Experiment Name: At_2mM_SA_P Parameter: Tissue Value: Aerial
  misc_feature: MA Experiment 20000182 PARAMETER Experiment Name: At_2mM_SA_P Parameter: Treatment Value: 2mM SA vs. No Treatment
  misc_feature: MA Experiment ID: 20000184 Result: Down-regulated in Transcription
  misc_feature: MA Experiment 20000184 PARAMETER Experiment Name: At_Shoots__P Parameter: Age (day) Value: 7
  misc_feature: MA Experiment 20000184 PARAMETER Experiment Name: At_Shoots__P Parameter: Tissue Value: Shoots vs. Whole Plant
  misc_feature: MA Experiment ID: 20000185 Result: Down-regulated in Transcription
  misc_feature: MA Experiment 20000185 PARAMETER Experiment Name: At_Roots__P Parameter: Age (day) Value: 7 vs. 21
  misc_feature: MA Experiment 20000185 PARAMETER Experiment Name: At_Roots__P Parameter: Organism Value: A. thaliana
  misc_feature: MA Experiment 20000185 PARAMETER Experiment Name: At_Roots__P Parameter: Tissue Value: Roots vs. Whole Plant
  misc_feature: MA Experiment ID: 20000439 Result: Down-regulated in Transcription
  misc_feature: MA Experiment 20000439 PARAMETER Experiment Name: At_Roots__P Parameter: Age (day) Value: 14 vs. 21
  misc_feature: MA Experiment 20000439 PARAMETER Experiment Name: At_Roots__P Parameter: Organism Value: A. thaliana
  misc_feature: MA Experiment 20000439 PARAMETER Experiment Name: At_Roots__P Parameter: Tissue Value: Roots vs. Whole Plant
  misc_feature: MA Experiment ID: 20000445 Result: Up-regulated in Transcription
  misc_feature: MA Experiment 20000445 PARAMETER Experiment Name: At_100uM_NAA__P Parameter: Age (day) Value: 14
  misc_feature: MA Experiment 20000445 PARAMETER Experiment Name: At_100uM_NAA__P Parameter: Organism Value: A. thaliana
  misc_feature: MA Experiment 20000445 PARAMETER Experiment Name: At_100uM_NAA__P Parameter: Plant Line Value: WS
  misc_feature: MA Experiment 20000445 PARAMETER Experiment Name: At_100uM_NAA__P Parameter: Timepoint (hr) Value: 6
  misc_feature: MA Experiment 20000445 PARAMETER Experiment Name: At_100uM_NAA__P Parameter: Tissue Value: Aerial
  misc_feature: MA Experiment 20000445 PARAMETER Experiment Name: At_100uM_NAA__P Parameter: Treatment Value: 100uM NAA vs. No Treatment
  misc_feature: MA Experiment ID: 20000495 Result: Down-regulated in Transcription
  misc_feature: MA Experiment 20000495 PARAMETER Experiment Name: At_Guard_Cells_P Parameter: Harvest Date Value: 8/2/2002
  misc_feature: MA Experiment 20000495 PARAMETER Experiment Name: At_Guard_Cells_P Parameter: Organism Value: A. thaliana
  misc_feature: MA Experiment 20000495 PARAMETER Experiment Name: At_Guard_Cells_P Parameter: Tissue Value: Guard Cells vs. Leaves
  misc_feature: MA Experiment ID: 20000496 Result: Down-regulated in Transcription
  misc_feature: MA Experiment 20000496 PARAMETER Experiment Name: At_Guard_Cells_P Parameter: Harvest Date Value: 7/19/2002
  misc_feature: MA Experiment 20000496 PARAMETER Experiment Name: At_Guard_Cells_P Parameter: Organism Value: Canola
  misc_feature: MA Experiment 20000496 PARAMETER Experiment Name: At_Guard_Cells_P Parameter: Tissue Value: Guard Cells vs. Leaves
  misc_feature: MA Experiment ID: 20000527 Result: Down-regulated in Transcription
  misc_feature: MA Experiment 20000527 PARAMETER Experiment Name: At_10percent_PEG_P Parameter: Age (day) Value: 20
  misc_feature: MA Experiment 20000527 PARAMETER Experiment Name: At_10percent_PEG_P Parameter: Organism Value: A. thaliana
  misc_feature: MA Experiment 20000527 PARAMETER Experiment Name: At_10percent_PEG_P Parameter: Plant Line Value: WS
  misc_feature: MA Experiment 20000527 PARAMETER Experiment Name: At_10percent_PEG_P Parameter: Timepoint (day) Value: 20
  misc_feature: MA Experiment 20000527 PARAMETER Experiment Name: At_10percent_PEG_P Parameter: Tissue Value: Whole Plant
  misc_feature: MA Experiment 20000527 PARAMETER Experiment Name: At_10percent_PEG_P Parameter: Treatment Value: 10percent PEG vs. No Treatment
  misc_feature: MA Experiment ID: 20001451 Result: Down-regulated in Transcription
  misc_feature: MA Experiment 20001451 PARAMETER Experiment Name: At_Far-red-induction_P Parameter: Age (day) Value: 7
  misc_feature: MA Experiment 20001451 PARAMETER Experiment Name: At_Far-red-induction_P Parameter: Light Value: Far-red vs. White
  misc_feature: MA Experiment 20001451 PARAMETER Experiment Name: At_Far-red-induction_P Parameter: Organism Value: A. thaliana
  misc_feature: MA Experiment 20001451 PARAMETER Experiment Name: At_Far-red-induction_P Parameter: Plant Line Value: Columbia
  misc_feature: MA Experiment 20001451 PARAMETER Experiment Name: At_Far-red-induction_P Parameter: Timepoint (hr) Value: 24
  misc_feature: MA Experiment 20001451 PARAMETER Experiment Name: At_Far-red-induction_P Parameter: Tissue Value: Whole Plant
  misc_feature: MA Experiment ID: 20001554 Result: Down-regulated in Transcription
  misc_feature: MA Experiment 20001554 PARAMETER Experiment Name: At_Drought_Soil_Dry_P Parameter: Age (day) Value: 21
  misc_feature: MA Experiment 20001554 PARAMETER Experiment Name: At_Drought_Soil_Dry_P Parameter: Organism Value: A. thaliana
  misc_feature: MA Experiment 20001554 PARAMETER Experiment Name: At_Drought_Soil_Dry_P Parameter: Plant Line Value: WS
  misc_feature: MA Experiment 20001554 PARAMETER Experiment Name: At_Drought_Soil_Dry_P Parameter: Post Timepoint (hr) Value: None
  misc_feature: MA Experiment 20001554 PARAMETER Experiment Name: At_Drought_Soil_Dry_P Parameter: Post-Treatment Value: None
  misc_feature: MA Experiment 20001554 PARAMETER Experiment Name: At_Drought_Soil_Dry_P Parameter: Timepoint (day) Value: 7
  misc_feature: MA Experiment 20001554 PARAMETER Experiment Name: At_Drought_Soil_Dry_P Parameter: Treatment Value: Drought vs. No Drought
  misc_feature: MA Experiment ID: 20001558 Result: Up-regulated in Transcription
  misc_feature: MA Experiment 20001558 PARAMETER Experiment Name: At_Drought_Soil_Dry_P Parameter: Age (day) Value: 27
  misc_feature: MA Experiment 20001558 PARAMETER Experiment Name: At_Drought_Soil_Dry_P Parameter: Organism Value: A. thaliana
  misc_feature: MA Experiment 20001558 PARAMETER Experiment Name: At_Drought_Soil_Dry_P Parameter: Plant Line Value: WS
  misc_feature: MA Experiment 20001558 PARAMETER Experiment Name: At_Drought_Soil_Dry_P Parameter: Post Timepoint (hr) Value: 6
  misc_feature: MA Experiment 20001558 PARAMETER Experiment Name: At_Drought_Soil_Dry_P Parameter: Post-Treatment Value: Re-Water vs. No Drought
  misc_feature: MA Experiment 20001558 PARAMETER Experiment Name: At_Drought_Soil_Dry_P Parameter: Timepoint (day) Value: 13
  misc_feature: MA Experiment 20001558 PARAMETER Experiment Name: At_Drought_Soil_Dry_P Parameter: Treatment Value: Drought vs. No Drought
atggtggtttcagtgaccatacgtcgtcgttttgttcttcttctacttgcatgcacttgtttgttgtctcggagactctgttttggtgaggacagaatcactttctcaagtcctatcaaagactcagagtcagagacccttctatgcaaaagtggtattttcaggtttggtttcttcactcctgttaattccactactcggttacgttatgttgggatttggtacgaaaagattccaatccaaactgtggtttgggttgctaacaaagactctcccatcaacgacacttccggtgttatctcgatctatcaagatggaaatctcgcggttaccgatggtcgaaatcgccttgtatggtcgacgaatgtctcagtaccagtagctccaaatgctacttgggttcagcttatggattctgggaatcttatgttacaagacaacagaaacaatggtgagattctttgggagagtttcaagcatccttatgattctttcatgccaagaatgactcttggcaccgacggtagaactggaggtaacctaaagcttacttcttggacaagccacgatgatccttcaacaggaaactacacagctggtattgctcctttcacgtttcctgagcttcttatctggaagaacaatgtcccaacgtggcgtagcggaccgtggaacggtcaggttttcatcggtttaccgaatatggattcacttctgtttcttgatgggtttaatcttaacagtgataatcaaggaacgatctcaatgtcttatgctaatgattcgttcatgtatcactttaacttggatcctgaaggaattatttatcagaaagattggagtacttctatgagaacttggaggataggtgtaaagtttccatacacagactgtgatgcatacggtagatgtggtcgattcgggagctgccatgccggggaaaacccgccttgtaaatgtgttaaagggtttgttccaaagaataacacagagtggaatggtggtaattggagtaatggatgtatgagaaaagctccattgcagtgtgaaagacagagaaatgtaagtaatggtggtggtggaggaaaagcagatggttttttgaaactgcagaagatgaaagtaccaatctctgcggaacggtctgaagctagtgaacaagtttgtcctaaagtatgcttagataactgttcttgcacagcttatgcatatgatagaggaattggatgcatgctttggagtggtgatttagttgatatgcaatcatttttgggaagtggcattgatctttttattcgtgttgctcattcagaactcaaaacacatagcaatctagcagttatgatcgcagcacctgtgataggcgttatgttaattgctgcggtctgcgttcttttagcatgccggaaatacaaaaagcgtccagcgaaagatagaagtgcagagctaatgtttaagagaatggaagcacttacaagtgataatgagtctgcttctaaccaaatcaagctcaaggagcttccactctttgagtttcaagtgttagctacatcaactgatagcttctctctaagaaacaagctcgggcaaggcgggtttggtcctgtttacaagggaaaattacctgaaggacaagaaattgcagtgaagaggctctcacggaaatcaggtcaaggactagaggaacttatgaacgaagtggttgtgatatctaagttgcaacatcggaatctagtgaagttacttggatgttgtattgaaggtgaagaaagaatgttagtatatgaatatatgccaaagaaaagcttggatgcatatctttttgacccaatgaagcaaaagattcttgattggaagactcggttcaacataatggaaggaatttgcagaggtcttttgtaccttcacagagattcaagactaaagatcatacacagagatttaaaagccagcaacattttgttagatgagaatctaaaccccaagatatctgattttggacttgcaagaattttccgagcgaatgaagatgaagctaacacaagaagggttgttggaacatacggctatatgtcaccggagtatgcaatggaaggtttcttttcagaaaaatcagatgttttcagcttgggggttatatttctcgagatcataagtgggagaagaaactctagttctcacaaggaagagaataatctcaaccttttggcttatgcttggaagctgtggaacgacggtgaggctgcttctctagcagatccagccgtctttgataagtgtttcgagaaagagatagagaaatgtgttcatattggactgttatgtgtgcaagaagttgcaaacgatagaccaaatgtttcaaacgtgatatggatgctaactaccgagaacatgagcctcgccgatccgaagcagccagcgtttatagtaagaagaggagcttctgaggctgaatcttctgaccagagtagtcaaaaggtatctatcaatgatgtgagcctcacagctgtaacaggacgttaa

SEQ ID NO: 73545 - protein, 840 aa, Arabidopsis thaliana
  peptide (1)..(840): Ceres Seq. ID no. 4971929
  misc_feature (80)..(193): Pfam Name: D-mannose binding lectin Pfam Description: D-mannose binding lectin
  misc_feature (12)..(840): Homolog of NCBI NO: 15220353 NR Description: serine/threonine kinase, putative; protein id:
  misc_feature (12)..(840): Homolog of NCBI NO: 4008010 NR Description: receptor-like protein kinase [Arabidopsis
  misc_feature (12)..(688): Homolog of NCBI NO: 6554204 NR Description: T23J18.2 [Arabidopsis thaliana]
  misc_feature (710)..(840): Homolog of NCBI NO: 6554204 NR Description: T23J18.2 [Arabidopsis thaliana]
  misc_feature (11)..(840): Homolog of NCBI NO: 25287696 NR Description: hypothetical protein [imported] - Arabidopsis
  misc_feature (12)..(840): Homolog of NCBI NO: 15220338 NR Description: serine/threonine kinase, putative; protein id:
  misc_feature (12)..(840): Homolog of NCBI NO: 25287697 NR Description: hypothetical protein [imported] - Arabidopsis
  misc_feature (30)..(840): Homolog of NCBI NO: 7434416 NR Description: serine/threonine kinase (EC 2.7.1.-) BRLK - wild >gi|2181190|emb|CAA73134.1| serine/threonine kinase [Brassica
  misc_feature (54)..(840): Homolog of NCBI NO: 15234429 NR Description: serine/threonine kinase - like protein; protein
  misc_feature (25)..(840): Homolog of NCBI NO: 15220351 NR Description: receptor kinase, putative; protein id:
MVVSVTIRRRFVLLLLACTCLLSRRLCFGEDRITFSSPIKDSESETLLCKSGIFRFGFFTPVNSTTRLRYVGIWYEKIPIQTVVWVANKDSPINDTSGVISIYQDGNLAVTDGRNRLVWSTNVSVPVAPNATWVQLMDSGNLMLQDNRNNGEILWESFKHPYDSFMPRMTLGTDGRTGGNLKLTSWTSHDDPSTGNYTAGIAPFTFPELLIWKNNVPTWRSGPWNGQVFIGLPNMDSLLFLDGFNLNSDNQGTISMSYANDSFMYHFNLDPEGIIYQKDWSTSMRTWRIGVKFPYTDCDAYGRCGRFGSCHAGENPPCKCVKGFVPKNNTEWNGGNWSNGCMRKAPLQCERQRNVSNGGGGGKADGFLKLQKMKVPISAERSEASEQVCPKVCLDNCSCTAYAYDRGIGCMLWSGDLVDMQSFLGSGIDLFIRVAHSELKTHSNLAVMIAAPVIGVMLIAAVCVLLACRKYKKRPAKDRSAELMFKRMEALTSDNESASNQIKLKELPLFEFQVLATSTDSFSLRNKLGQGGFGPVYKGKLPEGQEIAVKRLSRKSGQGLEELMNEVVVISKLQHRNLVKLLGCCIEGEERMLVYEYMPKKSLDAYLFDPMKQKILDWKTRFNIMEGICRGLLYLHRDSRLKIIHRDLKASNILLDENLNPKISDFGLARIFRANEDEANTRRVVGTYGYMSPEYAMEGFFSEKSDVFSLGVIFLEIISGRRNSSSHKEENNLNLLAYAWKLWNDGEAASLADPAVFDKCFEKEIEKCVHIGLLCVQEVANDRPNVSNVIWMLTTENMSLADPKQPAFIVRRGASEAESSDQSSQKVSINDVSLTAVTGR

SEQ ID NO: 73546 - protein, 704 aa, Arabidopsis thaliana
  peptide (1)..(704): Ceres Seq. ID no. 4971930
  misc_feature (1)..(57): Pfam Name: D-mannose binding lectin Pfam Description: D-mannose binding lectin
  misc_feature (1)..(704): Homolog of NCBI NO: 15220353 NR Description: serine/threonine kinase, putative; protein id:
  misc_feature (1)..(704): Homolog of NCBI NO: 4008010 NR Description: receptor-like protein kinase [Arabidopsis
  misc_feature (1)..(552): Homolog of NCBI NO: 6554204 NR Description: T23J18.2 [Arabidopsis thaliana]
  misc_feature (574)..(704): Homolog of NCBI NO: 6554204 NR Description: T23J18.2 [Arabidopsis thaliana]
  misc_feature (1)..(704): Homolog of NCBI NO: 25287696 NR Description: hypothetical protein [imported] - Arabidopsis
  misc_feature (1)..(704): Homolog of NCBI NO: 15220338 NR Description: serine/threonine kinase, putative; protein id:
  misc_feature (1)..(704): Homolog of NCBI NO: 25287697 NR Description: hypothetical protein [imported] - Arabidopsis
  misc_feature (1)..(704): Homolog of NCBI NO: 7434416 NR Description: serine/threonine kinase (EC 2.7.1.-) BRLK - wild >gi|2181190|emb|CAA73134.1| serine/threonine kinase [Brassica
  misc_feature (1)..(704): Homolog of NCBI NO: 15234429 NR Description: serine/threonine kinase - like protein; protein
  misc_feature (1)..(704): Homolog of NCBI NO: 15220351 NR Description: receptor kinase, putative; protein id:
MDSGNLMLQDNRNNGEILWESFKHPYDSFMPRMTLGTDGRTGGNLKLTSWTSHDDPSTGNYTAGIAPFTFPELLIWKNNVPTWRSGPWNGQVFIGLPNMDSLLFLDGFNLNSDNQGTISMSYANDSFMYHFNLDPEGIIYQKDWSTSMRTWRIGVKFPYTDCDAYGRCGRFGSCHAGENPPCKCVKGFVPKNNTEWNGGNWSNGCMRKAPLQCERQRNVSNGGGGGKADGFLKLQKMKVPISAERSEASEQVCPKVCLDNCSCTAYAYDRGIGCMLWSGDLVDMQSFLGSGIDLFIRVAHSELKTHSNLAVMIAAPVIGVMLIAAVCVLLACRKYKKRPAKDRSAELMFKRMEALTSDNESASNQIKLKELPLFEFQVLATSTDSFSLRNKLGQGGFGPVYKGKLPEGQEIAVKRLSRKSGQGLEELMNEVVVISKLQHRNLVKLLGCCIEGEERMLVYEYMPKKSLDAYLFDPMKQKILDWKTRFNIMEGICRGLLYLHRDSRLKIIHRDLKASNILLDENLNPKISDFGLARIFRANEDEANTRRVVGTYGYMSPEYAMEGFFSEKSDVFSLGVIFLEIISGRRNSSSHKEENNLNLLAYAWKLWNDGEAASLADPAVFDKCFEKEIEKCVHIGLLCVQEVANDRPNVSNVIWMLTTENMSLADPKQPAFIVRRGASEAESSDQSSQKVSINDVSLTAVTGR

SEQ ID NO: 73547 - protein, 698 aa, Arabidopsis thaliana
  peptide (1)..(698): Ceres Seq. ID no. 4971931
  misc_feature (1)..(51): Pfam Name: D-mannose binding lectin Pfam Description: D-mannose binding lectin
  misc_feature (1)..(698): Homolog of NCBI NO: 15220353 NR Description: serine/threonine kinase, putative; protein id:
  misc_feature (1)..(698): Homolog of NCBI NO: 4008010 NR Description: receptor-like protein kinase [Arabidopsis
  misc_feature (1)..(546): Homolog of NCBI NO: 6554204 NR Description: T23J18.2 [Arabidopsis thaliana]
  misc_feature (568)..(698): Homolog of NCBI NO: 6554204 NR Description: T23J18.2 [Arabidopsis thaliana]
  misc_feature (1)..(698): Homolog of NCBI NO: 25287696 NR Description: hypothetical protein [imported] - Arabidopsis
  misc_feature (1)..(698): Homolog of NCBI NO: 15220338 NR Description: serine/threonine kinase, putative; protein id:
  misc_feature (1)..(698): Homolog of NCBI NO: 25287697 NR Description: hypothetical protein [imported] - Arabidopsis
  misc_feature (1)..(698): Homolog of NCBI NO: 7434416 NR Description: serine/threonine kinase (EC 2.7.1.-) BRLK - wild >gi|2181190|emb|CAA73134.1| serine/threonine kinase [Brassica
  misc_feature (1)..(698): Homolog of NCBI NO: 15234429 NR Description: serine/threonine kinase - like protein; protein
  misc_feature (1)..(698): Homolog of NCBI NO: 15220351 NR Description: receptor kinase, putative; protein id:
MLQDNRNNGEILWESFKHPYDSFMPRMTLGTDGRTGGNLKLTSWTSHDDPSTGNYTAGIAPFTFPELLIWKNNVPTWRSGPWNGQVFIGLPNMDSLLFLDGFNLNSDNQGTISMSYANDSFMYHFNLDPEGIIYQKDWSTSMRTWRIGVKFPYTDCDAYGRCGRFGSCHAGENPPCKCVKGFVPKNNTEWNGGNWSNGCMRKAPLQCERQRNVSNGGGGGKADGFLKLQKMKVPISAERSEASEQVCPKVCLDNCSCTAYAYDRGIGCMLWSGDLVDMQSFLGSGIDLFIRVAHSELKTHSNLAVMIAAPVIGVMLIAAVCVLLACRKYKKRPAKDRSAELMFKRMEALTSDNESASNQIKLKELPLFEFQVLATSTDSFSLRNKLGQGGFGPVYKGKLPEGQEIAVKRLSRKSGQGLEELMNEVVVISKLQHRNLVKLLGCCIEGEERMLVYEYMPKKSLDAYLFDPMKQKILDWKTRFNIMEGICRGLLYLHRDSRLKIIHRDLKASNILLDENLNPKISDFGLARIFRANEDEANTRRVVGTYGYMSPEYAMEGFFSEKSDVFSLGVIFLEIISGRRNSSSHKEENNLNLLAYAWKLWNDGEAASLADPAVFDKCFEKEIEKCVHIGLLCVQEVANDRPNVSNVIWMLTTENMSLADPKQPAFIVRRGASEAESSDQSSQKVSINDVSLTAVTGR

SEQ ID NO: 73548 - DNA, 4908 bp, Arabidopsis thaliana
  misc_feature (1)..(4908): Ceres Seq. ID no. 4971932
  misc_feature: MA Experiment ID: 20000173 Result: Down-regulated in Transcription
  misc_feature: MA Experiment 20000173 PARAMETER Experiment Name: At_42deg_Heat_P Parameter: Age (day) Value: 14
  misc_feature: MA Experiment 20000173 PARAMETER Experiment Name: At_42deg_Heat_P Parameter: Organism Value: A. thaliana
  misc_feature: MA Experiment 20000173 PARAMETER Experiment Name: At_42deg_Heat_P Parameter: Plant Line Value: WS
  misc_feature: MA Experiment 20000173 PARAMETER Experiment Name: At_42deg_Heat_P Parameter: Temperature (deg C) Value: 42 vs. 22
  misc_feature: MA Experiment 20000173 PARAMETER Experiment Name: At_42deg_Heat_P Parameter: Timepoint (hr) Value: 6
  misc_feature: MA Experiment 20000173 PARAMETER Experiment Name: At_42deg_Heat_P Parameter: Tissue Value: Aerial
  misc_feature: MA Experiment ID: 20000180 Result: Down-regulated in Transcription
  misc_feature: MA Experiment 20000180 PARAMETER Experiment Name: At_Germinating_Seeds_P Parameter: Age (hr) Value: 24 vs. 0
  misc_feature: MA Experiment 20000180 PARAMETER Experiment Name: At_Germinating_Seeds_P Parameter: Tissue Value: Germinating Seeds
  misc_feature: MA Experiment ID: 20000265 Result: Up-regulated in Transcription
  misc_feature: MA Experiment 20000265 PARAMETER Experiment Name: At_Open_Flower_P Parameter: Age (day) Value: 21
  misc_feature: MA Experiment 20000265 PARAMETER Experiment Name: At_Open_Flower_P Parameter: Plant Line Value: WS
  misc_feature: MA Experiment 20000265 PARAMETER Experiment Name: At_Open_Flower_P Parameter: Tissue Value: Closed Flower vs. Whole Plant
  misc_feature: MA Experiment ID: 20000286 Result: Up-regulated in Transcription
  misc_feature: MA Experiment 20000286 PARAMETER Experiment Name: At_Open_Flower_P Parameter: Age (day) Value: 21
  misc_feature: MA Experiment 20000286 PARAMETER Experiment Name: At_Open_Flower_P Parameter: Plant Line Value: WS
  misc_feature: MA Experiment 20000286 PARAMETER Experiment Name: At_Open_Flower_P Parameter: Tissue Value: Half Open vs. Whole Plant
  misc_feature: MA Experiment ID: 20000438 Result: Up-regulated in Transcription
  misc_feature: MA Experiment 20000438 PARAMETER Experiment Name: At_Shoots__P Parameter: Age (day) Value: 14
  misc_feature: MA Experiment 20000438 PARAMETER Experiment Name: At_Shoots__P Parameter: Tissue Value: Shoots vs. Whole Plant
  misc_feature: MA Experiment ID: 20001554 Result: Down-regulated in Transcription
  misc_feature: MA Experiment 20001554 PARAMETER Experiment Name: At_Drought_Soil_Dry_P Parameter: Age (day) Value: 21
  misc_feature: MA Experiment 20001554 PARAMETER Experiment Name: At_Drought_Soil_Dry_P Parameter: Organism Value: A. thaliana
  misc_feature: MA Experiment 20001554 PARAMETER Experiment Name: At_Drought_Soil_Dry_P Parameter: Plant Line Value: WS
  misc_feature: MA Experiment 20001554 PARAMETER Experiment Name: At_Drought_Soil_Dry_P Parameter: Post Timepoint (hr) Value: None
  misc_feature: MA Experiment 20001554 PARAMETER Experiment Name: At_Drought_Soil_Dry_P Parameter: Post-Treatment Value: None
  misc_feature: MA Experiment 20001554 PARAMETER Experiment Name: At_Drought_Soil_Dry_P Parameter: Timepoint (day) Value: 7
  misc_feature: MA Experiment 20001554 PARAMETER Experiment Name: At_Drought_Soil_Dry_P Parameter: Treatment Value: Drought vs. No Drought
  misc_feature: MA Experiment ID: 20001555 Result: Down-regulated in Transcription
  misc_feature: MA Experiment 20001555 PARAMETER Experiment Name: At_Drought_Soil_Dry_P Parameter: Age (day) Value: 24
  misc_feature: MA Experiment 20001555 PARAMETER Experiment Name: At_Drought_Soil_Dry_P Parameter: Organism Value: A. thaliana
  misc_feature: MA Experiment 20001555 PARAMETER Experiment Name: At_Drought_Soil_Dry_P Parameter: Plant Line Value: WS
  misc_feature: MA Experiment 20001555 PARAMETER Experiment Name: At_Drought_Soil_Dry_P Parameter: Post Timepoint (hr) Value: None
  misc_feature: MA Experiment 20001555 PARAMETER Experiment Name: At_Drought_Soil_Dry_P Parameter: Post-Treatment Value: None
  misc_feature: MA Experiment 20001555 PARAMETER Experiment Name: At_Drought_Soil_Dry_P Parameter: Timepoint (day) Value: 10
  misc_feature: MA Experiment 20001555 PARAMETER Experiment Name: At_Drought_Soil_Dry_P Parameter: Treatment Value: Drought vs. No Drought
  misc_feature: MA Experiment ID: 20001557 Result: Down-regulated in Transcription
  misc_feature: MA Experiment 20001557 PARAMETER Experiment Name: At_Drought_Soil_Dry_P Parameter: Age (day) Value: 27
  misc_feature: MA Experiment 20001557 PARAMETER Experiment Name: At_Drought_Soil_Dry_P Parameter: Organism Value: A. thaliana
  misc_feature: MA Experiment 20001557 PARAMETER Experiment Name: At_Drought_Soil_Dry_P Parameter: Plant Line Value: WS
  misc_feature: MA Experiment 20001557 PARAMETER Experiment Name: At_Drought_Soil_Dry_P Parameter: Post Timepoint (hr) Value: 3
  misc_feature: MA Experiment 20001557 PARAMETER Experiment Name: At_Drought_Soil_Dry_P Parameter: Post-Treatment Value: Re-Water vs. No Drought
  misc_feature: MA Experiment 20001557 PARAMETER Experiment Name: At_Drought_Soil_Dry_P Parameter: Timepoint (day) Value: 13
  misc_feature: MA Experiment 20001557 PARAMETER Experiment Name: At_Drought_Soil_Dry_P Parameter: Treatment Value: Drought vs. No Drought
atgagacttcatgagagctcgagtccttttgtttgtattcttgtactgtcttgcttcttcttgagcgtgtctctggctcaggaaagagctttcttttctggcaagctcaatgattccgagacgattgtctctagctttcggacattcaggttcggtttcttcagccctgttaattccacaagtcgatatgctggtatatggtataacagtgtttctgtacaaactgtgatatgggttgctaacaaagataagccgatcaatgattcctctggagttatttcggtttctcaagatggaaatcttgtagttacggatggacagaggcgtgttctatggtcaactaacgtctctactcaagccagtgccaattctactgtcgctgagcttcttgattccgggaatctggtgctaaaagaggcgagtagtgacgcgtatctttgggagagcttcaagtatcctactgattcttggttgccaaatatgttggttgggacaaacgcaagaattggaggaggaaacgtcacgataacttcttggaaatccccttcggatccttcgcctgggagctacactgctgcactcgttcttgctgcatatccagagctcttcattatgaacaataataataataacagtacggtgtggcgaagtggcccgtggaatggccagatgtttaatggtttaccagatgtttatgcgggtgtttttctttatagattcatagttaatgatgacaccaatggatctgtcaccatgtcatatgctaatgattcaaccttgagatacttctacatggattatagaggatctgtgatccgaagagattggagtgagactaggagaaactggacggtcgggttacaagttccagcaaccgagtgtgacaactacaggcgatgtggcgaattcgctacttgcaatccacggaaaaacccgctttgttcttgcattagagggtttaggccaaggaacctaatagagtggaacaatggaaactggagtggtggatgcacaagaagggttcctttgcagtgtgaaagacagaacaataatgggagtgctgatgggtttttgaggctgcggcgaatgaaactgcctgactttgcaagaagatccgaagcaagcgaaccagaatgcttaaggacttgtttgcagacatgttcttgtatagctgctgctcatggcttaggatatggctgcatgatttggaatggaagcttagttgattcgcaggagttgtctgctagtggattggatctttatatccgtcttgcacattcagaaatcagcggtatttttgttgtggcagcttgtgttcttctggcacgacgaattgtcatgaagaaaagagcgaaaaagaaaggaagagatgcagagcagatttttgagagagtggaagccttagctggtggtaataaaggaaagttgaaagagctaccattgtttgagtttcaagtgctagcagcagcaactaataatttctcgctgagaaataagcttggacaaggtggctttggtcctgtttacaaagggaagttgcaagaggggcaagagattgctgtgaagaggctgtcacgagcatcaggacaagggcttgaggagcttgttaacgaagtggttgtaatttctaagttgcagcatcggaatctggtgaaattacttggttgttgcattgcaggagaagagaggatgttagtctatgagttcatgcccaagaaaagcttagactattatctctttgactcaaggagggcaaaacttcttgattggaagacccggtttaacataatcaatggaatatgtagaggtcttctgtaccttcacagagattctaggctgagaatcattcacagagacctgaaagctagtaacatcttgttagatgagaatctgattccgaaaatatctgatttcgggttggccagaatttttccagggaatgaagatgaagcaaataccagaagggtcgttggaacatatggctatatggcacctgaatatgcaatgggaggactgttttcagagaaatctgacgttttcagcttaggagtgatactcttagagattatcagtggaagaagaaactcaaattcgactcttttagcttatgtatggtcaatctggaacgaaggggagattaatagtctggtagatcctgagatctttgacctactctttgagaaagaaatacacaaatgcattcacattgggcttttgtgtgtgcaagaagctgctaacgataggccaagtgtttctacagtgtgttcgatgctcagcagcgagattgcagatattccagaaccaaaacagcctgcttttatatcaaggaacaatgttccagaagctgagtcctctgagaacagtgaccttaaagactctatcaacaatgtcaccatcaccgatgttacaggactttttcgtcttgagaggctgggactaaaagatatgagacttcatgagagcttgagtcctattgttcatgttctttcactgtcttgcttctttttaagcgtctctctagctcatgaaagagctttattttctggcacgctcaatgattccgagacgatagtctccagcttccgaacgttcaggttcggtttcttcagccctgttaattccaccaaccgatatgctggtatatggtataacagcattcctgtacaaactgtgatatgggttgctaacaaagatacgccgatcaatgactcctctggagtgatttcaatatctgaagatggaaatctggtagttactgatggtcagaggcgtgttttgtggtcaactaacgtttctactcgagccagtgccaattctactgtcgctgagcttttggagtccgggaacctcgtgctaaaagatgccaataccgatgcatatctttgggagagcttcaagtatcctactgattcttggttgccaaatatgttggttgggacaaacgcaagaaccggaggaggaaacatcacaataacttcttggacaaacccttcggatccttcgccggggagctacactgctgcactcgttcttgctccatatccagagctttttattttcaacaataatgacaacaatgctacggtgtggcgcagtggcccttggaacggactgatgtttaacggtttaccagatgtatatccggggctctttctttatagatttaaagttaatgatgacaccaatggttcagccaccatgtcatatgctaatgattcaactttgagacacctctacttggattatagaggatttgctatccggagagattggagtgaggctaggagaaactggacgttagggtcacaagttccggcaaccgagtgtgacatttacagccgatgtggtcaatacactacctgcaatcctcggaaaaacccgcattgttcttgcattaaagggtttaggccaaggaaccttatagagtggaacaatggaaactggagtggtggatgcataagaaagctccctttgcagtgtgaaagacagaacaataaggggagtgctgataggtttttgaagctgcagcgaatgaaaatgcctgactttgcaagaagatccgaagccagcgaaccagaatgctttatgacttgtttgcagtcatgttcttgtatagcttttgctcatggattaggatatggctgcatgatttggaatagaagcttagttgattcacaagtgttgtctgctagtggaatggatctttctatccgtcttgcacattcagaattcaaaacacaggacaggcgacctattttgatcggtacatcattggcaggaggcatttttgttgtggcgacttgtgtccttctggcacgacgtattgtcatgaagaaaagagctaaaaagaaaggaacagatgcagagcaaatttttaagagagtagaagctttagctggtggtagtagagaaaagttgaaagagctacctttgtttgagtttcaagtgttagctactgcaaccgataacttctctcttagcaataagctcggacaaggcggttttggtccggtttacaaggggatgttgctagaaggtcaagagattgctgtgaagagactgtcacaagcatcaggacaagggcttgaggaacttgtcactgaagtggttgtgatttctaagttgcaacatcgaaatctggtgaaattatttggttgctgcattgcaggggaagaaaggatgttagtctatgagttcatgcccaagaaaagcttagacttttatatatttgatccaagggaagcaaaacttcttgactggaacacgcggtttgaaataatcaatggaatatgtagaggtctcctgtaccttcacagagattctaggctgagaatcattcacagagatctgaaagcaagcaacatcttgctagatgagaatctgattccgaaaatatctgattttgggttggccaggatattcccggggaatgaagatgaagcaaacaccagaagggtcgttggaacatatggctatatggcacctgaatatgcaatgggaggactgttttcagagaaatctgatgttttcagcttaggagtgatactcttagagattatcagtggaagaagaaactcacattcaactcttttggctcatgtgtggtcaatctggaacgaaggggagattaatggtatggtagatcctgagatttttgaccaactttttgagaaagaaatacgaaaatgcgttcacattgcgcttttgtgtgtgcaagacgctgctaatgataggccaagtgtttctacagtgtgtatgatgcttagcagtgaggttgcagacattccagaaccgaaacagcctgcttttatgcctagaaacgttggtttagaagctgagttctctgagagcattgctcttaaagcctctatcaacaatgtcaccatcactgatgtctcaggacgttaa

SEQ ID NO: 73549 - protein, 1635 aa, Arabidopsis thaliana
  peptide (1)..(1635): Ceres Seq. ID no. 4971933
  misc_feature (888)..(1001): Pfam Name: D-mannose binding lectin Pfam Description: D-mannose binding lectin
  misc_feature (825)..(1635): Homolog of NCBI NO: 15220348 NR Description: receptor-like protein kinase, putative; protein
  misc_feature (11)..(476): Homolog of NCBI NO: 15220353 NR Description: serine/threonine kinase, putative; protein id:
  misc_feature (407)..(804): Homolog of NCBI NO: 15220353 NR Description: serine/threonine kinase, putative; protein id:
  misc_feature (11)..(476): Homolog of NCBI NO: 4008010 NR Description: receptor-like protein kinase [Arabidopsis
  misc_feature (407)..(804): Homolog of NCBI NO: 4008010 NR Description: receptor-like protein kinase [Arabidopsis
  misc_feature (825)..(1635): Homolog of NCBI NO: 15220353 NR Description: serine/threonine kinase, putative; protein id:
  misc_feature (825)..(1635): Homolog of NCBI NO: 4008010 NR Description: receptor-like protein kinase [Arabidopsis
  misc_feature (10)..(446): Homolog of NCBI NO: 25287698 NR Description: hypothetical protein [imported] - Arabidopsis
  misc_feature (610)..(804): Homolog of NCBI NO: 25287698 NR Description: hypothetical protein [imported] - Arabidopsis
  misc_feature (419)..(564): Homolog of NCBI NO: 25287698 NR Description: hypothetical protein [imported] - Arabidopsis
MRLHESSSPFVCILVLSCFFLSVSLAQERAFFSGKLNDSETIVSSFRTFRFGFFSPVNSTSRYAGIWYNSVSVQTVIWVANKDKPINDSSGVISVSQDGNLVVTDGQRRVLWSTNVSTQASANSTVAELLDSGNLVLKEASSDAYLWESFKYPTDSWLPNMLVGTNARIGGGNVTITSWKSPSDPSPGSYTAALVLAAYPELFIMNNNNNNSTVWRSGPWNGQMFNGLPDVYAGVFLYRFIVNDDTNGSVTMSYANDSTLRYFYMDYRGSVIRRDWSETRRNWTVGLQVPATECDNYRRCGEFATCNPRKNPLCSCIRGFRPRNLIEWNNGNWSGGCTRRVPLQCERQNNNGSADGFLRLRRMKLPDFARRSEASEPECLRTCLQTCSCIAAAHGLGYGCMIWNGSLVDSQELSASGLDLYIRLAHSEISGIFVVAACVLLARRIVMKKRAKKKGRDAEQIFERVEALAGGNKGKLKELPLFEFQVLAAATNNFSLRNKLGQGGFGPVYKGKLQEGQEIAVKRLSRASGQGLEELVNEVVVISKLQHRNLVKLLGCCIAGEERMLVYEFMPKKSLDYYLFDSRRAKLLDWKTRFNIINGICRGLLYLHRDSRLRIIHRDLKASNILLDENLIPKISDFGLARIFPGNEDEANTRRVVGTYGYMAPEYAMGGLFSEKSDVFSLGVILLEIISGRRNSNSTLLAYVWSIWNEGEINSLVDPEIFDLLFEKEIHKCIHIGLLCVQEAANDRPSVSTVCSMLSSEIADIPEPKQPAFISRNNVPEAESSENSDLKDSINNVTITDVTGLFRLERLGLKDMRLHESLSPIVHVLSLSCFFLSVSLAHERALFSGTLNDSETIVSSFRTFRFGFFSPVNSTNRYAGIWYNSIPVQTVIWVANKDTPINDSSGVISISEDGNLVVTDGQRRVLWSTNVSTRASANSTVAELLESGNLVLKDANTDAYLWESFKYPTDSWLPNMLVGTNARTGGGNITITSWTNPSDPSPGSYTAALVLAPYPELFIFNNNDNNATVWRSGPWNGLMFNGLPDVYPGLFLYRFKVNDDTNGSATMSYANDSTLRHLYLDYRGFAIRRDWSEARRNWTLGSQVPATECDIYSRCGQYTTCNPRKNPHCSCIKGFRPRNLIEWNNGNWSGGCIRKLPLQCERQNNKGSADRFLKLQRMKMPDFARRSEASEPECFMTCLQSCSCIAFAHGLGYGCMIWNRSLVDSQVLSASGMDLSIRLAHSEFKTQDRRPILIGTSLAGGIFVVATCVLLARRIVMKKRAKKKGTDAEQIFKRVEALAGGSREKLKELPLFEFQVLATATDNFSLSNKLGQGGFGPVYKGMLLEGQEIAVKRLSQASGQGLEELVTEVVVISKLQHRNLVKLFGCCIAGEERMLVYEFMPKKSLDFYIFDPREAKLLDWNTRFEIINGICRGLLYLHRDSRLRIIHRDLKASNILLDENLIPKISDFGLARIFPGNEDEANTRRVVGTYGYMAPEYAMGGLFSEKSDVFSLGVILLEIISGRRNSHSTLLAHVWSIWNEGEINGMVDPEIFDQLFEKEIRKCVHIALLCVQDAANDRPSVSTVCMMLSSEVADIPEPKQPAFMPRNVGLEAEFSESIALKASINNVTITDVSGR

SEQ ID NO: 73550 - protein, 1475 aa, Arabidopsis thaliana
  peptide (1)..(1475): Ceres Seq. ID no. 4971934
  misc_feature (728)..(841): Pfam Name: D-mannose binding lectin Pfam Description: D-mannose binding lectin
  misc_feature (665)..(1475): Homolog of NCBI NO: 15220348 NR Description: receptor-like protein kinase, putative; protein
  misc_feature (1)..(316): Homolog of NCBI NO: 15220353 NR Description: serine/threonine kinase, putative; protein id:
  misc_feature (247)..(644): Homolog of NCBI NO: 15220353 NR Description: serine/threonine kinase, putative; protein id:
  misc_feature (1)..(316): Homolog of NCBI NO: 4008010 NR Description: receptor-like protein kinase [Arabidopsis
  misc_feature (247)..(644): Homolog of NCBI NO: 4008010 NR Description: receptor-like protein kinase [Arabidopsis
  misc_feature (665)..(1475): Homolog of NCBI NO: 15220353 NR Description: serine/threonine kinase, putative; protein id:
  misc_feature (665)..(1475): Homolog of NCBI NO: 4008010 NR Description: receptor-like protein kinase [Arabidopsis
  misc_feature (1)..(286): Homolog of NCBI NO: 25287698 NR Description: hypothetical protein [imported] - Arabidopsis
  misc_feature (450)..(644): Homolog of NCBI NO: 25287698 NR Description: hypothetical protein [imported] - Arabidopsis
  misc_feature (259)..(404): Homolog of NCBI NO: 25287698 NR Description: hypothetical protein [imported] - Arabidopsis
MLVGTNARIGGGNVTITSWKSPSDPSPGSYTAALVLAAYPELFIMNNNNNNSTVWRSGPWNGQMFNGLPDVYAGVFLYRFIVNDDTNGSVTMSYANDSTLRYFYMDYRGSVIRRDWSETRRNWTVGLQVPATECDNYRRCGEFATCNPRKNPLCSCIRGFRPRNLIEWNNGNWSGGCTRRVPLQCERQNNNGSADGFLRLRRMKLPDFARRSEASEPECLRTCLQTCSCIAAAHGLGYGCMIWNGSLVDSQELSASGLDLYIRLAHSEISGIFVVAACVLLARRIVMKKRAKKKGRDAEQIFERVEALAGGNKGKLKELPLFEFQVLAAATNNFSLRNKLGQGGFGPVYKGKLQEGQEIAVKRLSRASGQGLEELVNEVVVISKLQHRNLVKLLGCCIAGEERMLVYEFMPKKSLDYYLFDSRRAKLLDWKTRFNIINGICRGLLYLHRDSRLRIIHRDLKASNILLDENLIPKISDFGLARIFPGNEDEANTRRVVGTYGYMAPEYAMGGLFSEKSDVFSLGVILLEIISGRRNSNSTLLAYVWSIWNEGEINSLVDPEIFDLLFEKEIHKCIHIGLLCVQEAANDRPSVSTVCSMLSSEIADIPEPKQPAFISRNNVPEAESSENSDLKDSINNVTITDVTGLFRLERLGLKDMRLHESLSPIVHVLSLSCFFLSVSLAHERALFSGTLNDSETIVSSFRTFRFGFFSPVNSTNRYAGIWYNSIPVQTVIWVANKDTPINDSSGVISISEDGNLVVTDGQRRVLWSTNVSTRASANSTVAELLESGNLVLKDANTDAYLWESFKYPTDSWLPNMLVGTNARTGGGNITITSWTNPSDPSPGSYTAALVLAPYPELFIFNNNDNNATVWRSGPWNGLMFNGLPDVYPGLFLYRFKVNDDTNGSATMSYANDSTLRHLYLDYRGFAIRRDWSEARRNWTLGSQVPATECDIYSRCGQYTTCNPRKNPHCSCIKGFRPRNLIEWNNGNWSGGCIRKLPLQCERQNNKGSADRFLKLQRMKMPDFARRSEASEPECFMTCLQSCSCIAFAHGLGYGCMIWNRSLVDSQVLSASGMDLSIRLAHSEFKTQDRRPILIGTSLAGGIFVVATCVLLARRIVMKKRAKKKGTDAEQIFKRVEALAGGSREKLKELPLFEFQVLATATDNFSLSNKLGQGGFGPVYKGMLLEGQEIAVKRLSQASGQGLEELVTEVVVISKLQHRNLVKLFGCCIAGEERMLVYEFMPKKSLDFYIFDPREAKLLDWNTRFEIINGICRGLLYLHRDSRLRIIHRDLKASNILLDENLIPKISDFGLARIFPGNEDEANTRRVVGTYGYMAPEYAMGGLFSEKSDVFSLGVILLEIISGRRNSHSTLLAHVWSIWNEGEINGMVDPEIFDQLFEKEIRKCVHIALLCVQDAANDRPSVSTVCMMLSSEVADIPEPKQPAFMPRNVGLEAEFSESIALKASINNVTITDVSGR

SEQ ID NO: 73551 - protein, 1431 aa, Arabidopsis thaliana
  peptide (1)..(1431): Ceres Seq. ID no. 4971935
  misc_feature (684)..(797): Pfam Name: D-mannose binding lectin Pfam Description: D-mannose binding lectin
  misc_feature (621)..(1431): Homolog of NCBI NO: 15220348 NR Description: receptor-like protein kinase, putative; protein
  misc_feature (1)..(272): Homolog of NCBI NO: 15220353 NR Description: serine/threonine kinase, putative; protein id:
  misc_feature (203)..(600): Homolog of NCBI NO: 15220353 NR Description: serine/threonine kinase, putative; protein id:
  misc_feature (1)..(272): Homolog of NCBI NO: 4008010 NR Description: receptor-like protein kinase [Arabidopsis
  misc_feature (203)..(600): Homolog of NCBI NO: 4008010 NR Description: receptor-like protein kinase [Arabidopsis
  misc_feature (621)..(1431): Homolog of NCBI NO: 15220353 NR Description: serine/threonine kinase, putative; protein id:
  misc_feature (621)..(1431): Homolog of NCBI NO: 4008010 NR Description: receptor-like protein kinase [Arabidopsis
  misc_feature (1)..(242): Homolog of NCBI NO: 25287698 NR Description: hypothetical protein [imported] - Arabidopsis
  misc_feature (406)..(600): Homolog of NCBI NO: 25287698 NR Description: hypothetical protein [imported] - Arabidopsis
  misc_feature (215)..(360): Homolog of NCBI NO: 25287698 NR Description: hypothetical protein [imported] - Arabidopsis
MNNNNNNSTVWRSGPWNGQMFNGLPDVYAGVFLYRFIVNDDTNGSVTMSYANDSTLRYFYMDYRGSVIRRDWSETRRNWTVGLQVPATECDNYRRCGEFATCNPRKNPLCSCIRGFRPRNLIEWNNGNWSGGCTRRVPLQCERQNNNGSADGFLRLRRMKLPDFARRSEASEPECLRTCLQTCSCIAAAHGLGYGCMIWNGSLVDSQELSASGLDLYIRLAHSEISGIFVVAACVLLARRIVMKKRAKKKGRDAEQIFERVEALAGGNKGKLKELPLFEFQVLAAATNNFSLRNKLGQGGFGPVYKGKLQEGQEIAVKRLSRASGQGLEELVNEVVVISKLQHRNLVKLLGCCIAGEERMLVYEFMPKKSLDYYLFDSRRAKLLDWKTRFNIINGICRGLLYLHRDSRLRIIHRDLKASNILLDENLIPKISDFGLARIFPGNEDEANTRRVVGTYGYMAPEYAMGGLFSEKSDVFSLGVILLEIISGRRNSNSTLLAYVWSIWNEGEINSLVDPEIFDLLFEKEIHKCIHIGLLCVQEAANDRPSVSTVCSMLSSEIADIPEPKQPAFISRNNVPEAESSENSDLKDSINNVTITDVTGLFRLERLGLKDMRLHESLSPIVHVLSLSCFFLSVSLAHERALFSGTLNDSETIVSSFRTFRFGFFSPVNSTNRYAGIWYNSIPVQTVIWVANKDTPINDSSGVISISEDGNLVVTDGQRRVLWSTNVSTRASANSTVAELLESGNLVLKDANTDAYLWESFKYPTDSWLPNMLVGTNARTGGGNITITSWTNPSDPSPGSYTAALVLAPYPELFIFNNNDNNATVWRSGPWNGLMFNGLPDVYPGLFLYRFKVNDDTNGSATMSYANDSTLRHLYLDYRGFAIRRDWSEARRNWTLGSQVPATECDIYSRCGQYTTCNPRKNPHCSCIKGFRPRNLIEWNNGNWSGGCIRKLPLQCERQNNKGSADRFLKLQRMKMPDFARRSEASEPECFMTCLQSCSCIAFAHGLGYGCMIWNRSLVDSQVLSASGMDLSIRLAHSEFKTQDRRPILIGTSLAGGIFVVATCVLLARRIVMKKRAKKKGTDAEQIFKRVEALAGGSREKLKELPLFEFQVLATATDNFSLSNKLGQGGFGPVYKGMLLEGQEIAVKRLSQASGQGLEELVTEVVVISKLQHRNLVKLFGCCIAGEERMLVYEFMPKKSLDFYIFDPREAKLLDWNTRFEIINGICRGLLYLHRDSRLRIIHRDLKASNILLDENLIPKISDFGLARIFPGNEDEANTRRVVGTYGYMAPEYAMGGLFSEKSDVFSLGVILLEIISGRRNSHSTLLAHVWSIWNEGEINGMVDPEIFDQLFEKEIRKCVHIALLCVQDAANDRPSVSTVCMMLSSEVADIPEPKQPAFMPRNVGLEAEFSESIALKASINNVTITDVSGR

SEQ ID NO: 73552 - DNA, 1065 bp, Arabidopsis thaliana
  misc_feature (1)..(1065): Ceres Seq. ID no. 4971947
  misc_feature: MA Experiment ID: 20000173 Result: Down-regulated in Transcription
  misc_feature: MA Experiment 20000173 PARAMETER Experiment Name: At_42deg_Heat_P Parameter: Age (day) Value: 14
  misc_feature: MA Experiment 20000173 PARAMETER Experiment Name: At_42deg_Heat_P Parameter: Organism Value: A. thaliana
  misc_feature: MA Experiment 20000173 PARAMETER Experiment Name: At_42deg_Heat_P Parameter: Plant Line Value: WS
  misc_feature: MA Experiment 20000173 PARAMETER Experiment Name: At_42deg_Heat_P Parameter: Temperature (deg C) Value: 42 vs. 22
  misc_feature: MA Experiment 20000173 PARAMETER Experiment Name: At_42deg_Heat_P Parameter: Timepoint (hr) Value: 6
  misc_feature: MA Experiment 20000173 PARAMETER Experiment Name: At_42deg_Heat_P Parameter: Tissue Value: Aerial
  misc_feature: MA Experiment ID: 20000184 Result: Down-regulated in Transcription
  misc_feature: MA Experiment 20000184 PARAMETER Experiment Name: At_Shoots__P Parameter: Age (day) Value: 7
  misc_feature: MA Experiment 20000184 PARAMETER Experiment Name: At_Shoots__P Parameter: Tissue Value: Shoots vs. Whole Plant
atgtccgaggatgtctggttgacttgcctcactcacgcattatccaccgagaccgaagagatcatgggtctccttctcggcgacatcgagtactcaaaggacgggggaagtgccacagctatgatctggggagcatcgcctcagtcacggtctgatcggcagaaggatagaaatgacgatatcaacgggcagaactacacgggtcattggatggtaccactcccatcctcatattaccgttcttccttcccatatgttcgaacacaagctatgtatcagcttttagattctggttttattggcctcatcttttcctgttttagtgaagatgctaacaaggttggcagaatccaagttatcgctttccagtcttctgatggaaagccgaatagtattcctaaatcaatgagcctggttcttgcaaataaagattctgttatcgatttagaatcttcatttagttcttcggactcgatataccagagatcgtcttctgctcggggagacaatcctgagctcgacacaagtgatacagctacaacttccggatctaagggtggaggacgcgtttcagattttgaggctttctttgtgaacaatactgaggccaacaacaccagaagagatggaacaagtggaaactacagcagcacagcaatagaaattgactcgatggacatgtctgaaagtatgcaagaggcaatgcaccgctcaaatttagaaaccagtggtgtggggtatgttagaaaagaagtcccacttcatgttttgccgacttcatcccttcttcaactcaattcacctttagcatcttttaaaagcctgcaacgagtactctacgaggaggaacgagcagcgtaccaccaatccgtgcagcaaagcaagagcttgagtcctgccattaacgcacttcaagataggctgaaggagaacaagatccggttagcaatgctgatggatgaagctgaagttttggaagcacagaaactgaaaggagcagagacaagcgggggagcatctcgtctggttcacggttctggcagccgaagcagaagacgatcgtag

SEQ ID NO: 73553 - protein, 354 aa, Arabidopsis thaliana
  peptide (1)..(354): Ceres Seq. ID no. 4971948
  misc_feature (2)..(57): Pfam Name: Mov34/MPN/PAD-1 family Pfam Description: Mov34/MPN/PAD-1 family
  misc_feature (1)..(354): Homolog of NCBI NO: 15220090 NR Description: hypothetical protein; protein id: At1g80210.1
  misc_feature (86)..(295): Homolog of NCBI NO: 20147355 NR Description: At1g80210/F18B13_28 [Arabidopsis thaliana]
  misc_feature (297)..(354): Homolog of NCBI NO: 20147355 NR Description: At1g80210/F18B13_28 [Arabidopsis thaliana]
  misc_feature (1)..(57): Homolog of NCBI NO: 20147355 NR Description: At1g80210/F18B13_28 [Arabidopsis thaliana]
  misc_feature (58)..(354): Homolog of NCBI NO: 25406643 NR Description: hypothetical protein F18B13.28 [imported] - thaliana >gi|5902374|gb|AAD55476.1|AC009322_16 Hypothetical
  misc_feature (1)..(43): Homolog of NCBI NO: 25406643 NR Description: hypothetical protein F18B13.28 [imported] - thaliana >gi|5902374|gb|AAD55476.1|AC009322_16 Hypothetical
  misc_feature (86)..(354): Homolog of NCBI NO: 7549631 NR Description: unknown protein [Arabidopsis thaliana]
  misc_feature (1)..(57): Homolog of NCBI NO: 7549631 NR Description: unknown protein [Arabidopsis thaliana]
  misc_feature (86)..(294): Homolog of NCBI NO: 30680023 NR Description: expressed protein [Arabidopsis thaliana]
  misc_feature (297)..(354): Homolog of NCBI NO: 30680023 NR Description: expressed protein [Arabidopsis thaliana]
MSEDVWLTCLTHALSTETEEIMGLLLGDIEYSKDGGSATAMIWGASPQSRSDRQKDRNDDINGQNYTGHWMVPLPSSYYRSSFPYVRTQAMYQLLDSGFIGLIFSCFSEDANKVGRIQVIAFQSSDGKPNSIPKSMSLVLANKDSVIDLESSFSSSDSIYQRSSSARGDNPELDTSDTATTSGSKGGGRVSDFEAFFVNNTEANNTRRDGTSGNYSSTAIEIDSMDMSESMQEAMHRSNLETSGVGYVRKEVPLHVLPTSSLLQLNSPLASFKSLQRVLYEEERAAYHQSVQQSKSLSPAINALQDRLKENKIRLAMLMDEAEVLEAQKLKGAETSGGASRLVHGSGSRSRRRS

SEQ ID NO: 73554 - protein, 333 aa, Arabidopsis thaliana
  peptide (1)..(333): Ceres Seq. ID no. 4971949
  misc_feature (1)..(333): Homolog of NCBI NO: 15220090 NR Description: hypothetical protein; protein id: At1g80210.1
  misc_feature (65)..(274): Homolog of NCBI NO: 20147355 NR Description: At1g80210/F18B13_28 [Arabidopsis thaliana]
  misc_feature (276)..(333): Homolog of NCBI NO: 20147355 NR Description: At1g80210/F18B13_28 [Arabidopsis thaliana]
  misc_feature (1)..(36): Homolog of NCBI NO: 20147355 NR Description: At1g80210/F18B13_28 [Arabidopsis thaliana]
  misc_feature (37)..(333): Homolog of NCBI NO: 25406643 NR Description: hypothetical protein F18B13.28 [imported] - thaliana >gi|5902374|gb|AAD55476.1|AC009322_16 Hypothetical
  misc_feature (1)..(22): Homolog of NCBI NO: 25406643 NR Description: hypothetical protein F18B13.28 [imported] - thaliana >gi|5902374|gb|AAD55476.1|AC009322_16 Hypothetical
  misc_feature (65)..(333): Homolog of NCBI NO: 7549631 NR Description: unknown protein [Arabidopsis thaliana]
  misc_feature (1)..(36): Homolog of NCBI NO: 7549631 NR Description: unknown protein [Arabidopsis thaliana]
  misc_feature (65)..(273): Homolog of NCBI NO: 30680023 NR Description: expressed protein [Arabidopsis thaliana]
  misc_feature (276)..(333): Homolog of NCBI NO: 30680023 NR Description: expressed protein [Arabidopsis thaliana]
MGLLLGDIEYSKDGGSATAMIWGASPQSRSDRQKDRNDDINGQNYTGHWMVPLPSSYYRSSFPYVRTQAMYQLLDSGFIGLIFSCFSEDANKVGRIQVIAFQSSDGKPNSIPKSMSLVLANKDSVIDLESSFSSSDSIYQRSSSARGDNPELDTSDTATTSGSKGGGRVSDFEAFFVNNTEANNTRRDGTSGNYSSTAIEIDSMDMSESMQEAMHRSNLETSGVGYVRKEVPLHVLPTSSLLQLNSPLASFKSLQRVLYEEERAAYHQSVQQSKSLSPAINALQDRLKENKIRLAMLMDEAEVLEAQKLKGAETSGGASRLVHGSGSRSRRRS

SEQ ID NO: 73555 - protein, 314 aa, Arabidopsis thaliana
  peptide (1)..(314): Ceres Seq. ID no. 4971950
  misc_feature (1)..(314): Homolog of NCBI NO: 15220090 NR Description: hypothetical protein; protein id: At1g80210.1
  misc_feature (46)..(255): Homolog of NCBI NO: 20147355 NR Description: At1g80210/F18B13_28 [Arabidopsis thaliana]
  misc_feature (257)..(314): Homolog of NCBI NO: 20147355 NR Description: At1g80210/F18B13_28 [Arabidopsis thaliana]
  misc_feature (1)..(17): Homolog of NCBI NO: 20147355 NR Description: At1g80210/F18B13_28 [Arabidopsis thaliana]
  misc_feature (18)..(314): Homolog of NCBI NO: 25406643 NR Description: hypothetical protein F18B13.28 [imported] - thaliana >gi|5902374|gb|AAD55476.1|AC009322_16 Hypothetical
  misc_feature (46)..(314): Homolog of NCBI NO: 7549631 NR Description: unknown protein [Arabidopsis thaliana]
  misc_feature (1)..(17): Homolog of NCBI NO: 7549631 NR Description: unknown protein [Arabidopsis thaliana]
  misc_feature (46)..(254): Homolog of NCBI NO: 30680023 NR Description: expressed protein [Arabidopsis thaliana]
  misc_feature (257)..(314): Homolog of NCBI NO: 30680023 NR Description: expressed protein [Arabidopsis thaliana]
  misc_feature (1)..(17): Homolog of NCBI NO: 30680023 NR Description: expressed protein [Arabidopsis thaliana]
MIWGASPQSRSDRQKDRNDDINGQNYTGHWMVPLPSSYYRSSFPYVRTQAMYQLLDSGFIGLIFSCFSEDANKVGRIQVIAFQSSDGKPNSIPKSMSLVLANKDSVIDLESSFSSSDSIYQRSSSARGDNPELDTSDTATTSGSKGGGRVSDFEAFFVNNTEANNTRRDGTSGNYSSTAIEIDSMDMSESMQEAMHRSNLETSGVGYVRKEVPLHVLPTSSLLQLNSPLASFKSLQRVLYEEERAAYHQSVQQSKSLSPAINALQDRLKENKIRLAMLMDEAEVLEAQKLKGAETSGGASRLVHGSGSRSRRRS

SEQ ID NO: 73556 - DNA, 1002 bp, Arabidopsis thaliana
  misc_feature (1)..(1002): Ceres Seq. ID no. 4971971
  misc_feature: MA Experiment ID: 20000794 Result: Up-regulated in Transcription
  misc_feature: MA Experiment 20000794 PARAMETER Experiment Name: At_Petals_P Parameter: Age (day) Value: 23-25 days
  misc_feature: MA Experiment 20000794 PARAMETER Experiment Name: At_Petals_P Parameter: Plant Line Value: WS
  misc_feature: MA Experiment 20000794 PARAMETER Experiment Name: At_Petals_P Parameter: Tissue Value: Petals vs. Whole plant
  misc_feature: MA Experiment ID: 20001558 Result: Down-regulated in Transcription
  misc_feature: MA Experiment 20001558 PARAMETER Experiment Name: At_Drought_Soil_Dry_P Parameter: Age (day) Value: 27
  misc_feature: MA Experiment 20001558 PARAMETER Experiment Name: At_Drought_Soil_Dry_P Parameter: Organism Value: A. thaliana
  misc_feature: MA Experiment 20001558 PARAMETER Experiment Name: At_Drought_Soil_Dry_P Parameter: Plant Line Value: WS
  misc_feature: MA Experiment 20001558 PARAMETER Experiment Name: At_Drought_Soil_Dry_P Parameter: Post Timepoint (hr) Value: 6
  misc_feature: MA Experiment 20001558 PARAMETER Experiment Name: At_Drought_Soil_Dry_P Parameter: Post-Treatment Value: Re-Water vs. No Drought
  misc_feature: MA Experiment 20001558 PARAMETER Experiment Name: At_Drought_Soil_Dry_P Parameter: Timepoint (day) Value: 13
  misc_feature: MA Experiment 20001558 PARAMETER Experiment Name: At_Drought_Soil_Dry_P Parameter: Treatment Value: Drought vs. No Drought
atgctcccctttgtgaaaaattcaacgcctagaagcggtagtcaacggccttttaaagcgaaggagcatgacacgtgtctttcgtcattatccggcgatgccaaactcttcttcctcgatcgagagaacacagcaccgcttcgcttaaatcggacatttgagtcggaactgttgggattcaaagttcacttatgggaccaatctcttgttcctcttcatttcagcattcgaaaacgaaagaacacccctcgttatttgatttcttgcagtcagaagaaagatgtcactgttgttgatggaagttgtatggatgagatctatgataagttggcggaacgtcttgtccctacagcagcggcaatgtttagccccaatcttaaacgtttggtcggtttggctggtcctcctggtgccgggaaaagtacagtagcaaatgaagttgtgcgtcgtgtaaataagctatggcctcagaaagctgcttcttttgatgctgaggttaatccaccggatgttgctatagtacttcccatggatggtttccatttgtatcgttcgcaactcgatgctatggaggatcccaaagaagcccatgcgagaagaggggctccgtggacttttgatcctgcactactgcttaactgtttaaagaagctgaaaaacgagggctcagtttatgtgccatcatttgatcatggagttggggatccagttgaagatgatatctttgttagcctccagcataaagtggtaattgtagaaggaaactacatcttgttagaagaagggtcttggaaagacatctcagatatgtttgatgagaaatggttcatcgatgtgaatctcgatacagcaatgcaacgtgttgaaaaccggcatatctcaactggtaaacccccagatgttgctaaatggcgggtggattataatgaccgacccaacgcagagctgataataaagtcaaagacaaacgctgatctactgatcagatctatgaacatttga

SEQ ID NO: 73557 - protein, 333 aa, Arabidopsis thaliana
  peptide (1)..(333): Ceres Seq. ID no. 4971972
  misc_feature (129)..(333): Pfam Name: Phosphoribulokinase / Uridine kinase family Pfam Description: Phosphoribulokinase / Uridine kinase family
  misc_feature (1)..(333): Homolog of NCBI NO: 15218676 NR Description: unknown protein; protein id: At1g03030.1
  misc_feature (43)..(201): Homolog of NCBI NO: 25363622 NR Description: hypothetical protein F10O3.15 - Arabidopsis >gi|4587575|gb|AAD25806.1|AC006550_14 Belongs to PF|01121 protein family UPF0038 containing ATP/GTP binding gene.
  misc_feature (224)..(333): Homolog of NCBI NO: 25363622 NR Description: hypothetical protein F10O3.15 - Arabidopsis >gi|4587575|gb|AAD25806.1|AC006550_14 Belongs to PF|01121 protein family UPF0038 containing ATP/GTP binding gene.
  misc_feature (103)..(331): Homolog of NCBI NO: 32406072 NR Description: hypothetical protein [Neurospora crassa] hypothetical protein [Neurospora crassa]
  misc_feature (125)..(330): Homolog of NCBI NO: 40741109 NR Description: hypothetical protein AN4382.2 [Aspergillus
  misc_feature (107)..(333): Homolog of NCBI NO: 19113880 NR Description: similarity to uridine kinase [Schizosaccharomyces
  misc_feature (124)..(315): Homolog of NCBI NO: 38108268 NR Description: hypothetical protein MG02303.4 [Magnaporthe
  misc_feature (172)..(317): Homolog of NCBI NO: 40740541 NR Description: hypothetical protein AN8109.2 [Aspergillus
  misc_feature (127)..(328): Homolog of NCBI NO: 32141121 NR Description: conserved hypothetical protein [Streptomyces A3(2)] >gi|24413735|emb|CAD55275.1| conserved hypothetical
  misc_feature (129)..(328): Homolog of NCBI NO: 23500977 NR Description: kinase-related protein [Brucella suis 1330]
MLPFVKNSTPRSGSQRPFKAKEHDTCLSSLSGDAKLFFLDRENTAPLRLNRTFESELLGFKVHLWDQSLVPLHFSIRKRKNTPRYLISCSQKKDVTVVDGSCMDEIYDKLAERLVPTAAAMFSPNLKRLVGLAGPPGAGKSTVANEVVRRVNKLWPQKAASFDAEVNPPDVAIVLPMDGFHLYRSQLDAMEDPKEAHARRGAPWTFDPALLLNCLKKLKNEGSVYVPSFDHGVGDPVEDDIFVSLQHKVVIVEGNYILLEEGSWKDISDMFDEKWFIDVNLDTAMQRVENRHISTGKPPDVAKWRVDYNDRPNAELIIKSKTNADLLIRSMNI

SEQ ID NO: 73558 - protein, 231 aa, Arabidopsis thaliana; identical to SEQ ID NO: 20483
  peptide (1)..(231): Ceres Seq. ID no. 4971973
  misc_feature (27)..(231): Pfam Name: Phosphoribulokinase / Uridine kinase family Pfam Description: Phosphoribulokinase / Uridine kinase family
  misc_feature (1)..(231): Homolog of NCBI NO: 15218676 NR Description: unknown protein; protein id: At1g03030.1
  misc_feature (1)..(99): Homolog of NCBI NO: 25363622 NR Description: hypothetical protein F10O3.15 - Arabidopsis >gi|4587575|gb|AAD25806.1|AC006550_14 Belongs to PF|01121 protein family UPF0038 containing ATP/GTP binding gene.
  misc_feature (122)..(231): Homolog of NCBI NO: 25363622 NR Description: hypothetical protein F10O3.15 - Arabidopsis >gi|4587575|gb|AAD25806.1|AC006550_14 Belongs to PF|01121 protein family UPF0038 containing ATP/GTP binding gene.
  misc_feature (1)..(229): Homolog of NCBI NO: 32406072 NR Description: hypothetical protein [Neurospora crassa] hypothetical protein [Neurospora crassa]
  misc_feature (23)..(228): Homolog of NCBI NO: 40741109 NR Description: hypothetical protein AN4382.2 [Aspergillus
  misc_feature (5)..(231): Homolog of NCBI NO: 19113880 NR Description: similarity to uridine kinase [Schizosaccharomyces
  misc_feature (22)..(213): Homolog of NCBI NO: 38108268 NR Description: hypothetical protein MG02303.4 [Magnaporthe
  misc_feature (70)..(215): Homolog of NCBI NO: 40740541 NR Description: hypothetical protein AN8109.2 [Aspergillus
  misc_feature (25)..(226): Homolog of NCBI NO: 32141121 NR Description: conserved hypothetical protein [Streptomyces A3(2)] >gi|24413735|emb|CAD55275.1| conserved hypothetical
  misc_feature (27)..(226): Homolog of NCBI NO: 23500977 NR Description: kinase-related protein [Brucella suis 1330]

SEQ ID NO: 73559 - protein, 213 aa, Arabidopsis thaliana; identical to SEQ ID NO: 20484
  peptide (1)..(213): Ceres Seq. ID no. 4971974
  misc_feature (9)..(213): Pfam Name: Phosphoribulokinase / Uridine kinase family Pfam Description: Phosphoribulokinase / Uridine kinase family
  misc_feature (1)..(213): Homolog of NCBI NO: 15218676 NR Description: unknown protein; protein id: At1g03030.1
  misc_feature (1)..(81): Homolog of NCBI NO: 25363622 NR Description: hypothetical protein F10O3.15 - Arabidopsis >gi|4587575|gb|AAD25806.1|AC006550_14 Belongs to PF|01121 protein family UPF0038 containing ATP/GTP binding gene.
  misc_feature (104)..(213): Homolog of NCBI NO: 25363622 NR Description: hypothetical protein F10O3.15 - Arabidopsis >gi|4587575|gb|AAD25806.1|AC006550_14 Belongs to PF|01121 protein family UPF0038 containing ATP/GTP binding gene.
  misc_feature (1)..(211): Homolog of NCBI NO: 32406072 NR Description: hypothetical protein [Neurospora crassa] hypothetical protein [Neurospora crassa]
  misc_feature (5)..(210): Homolog of NCBI NO: 40741109 NR Description: hypothetical protein AN4382.2 [Aspergillus
  misc_feature (1)..(213): Homolog of NCBI NO: 19113880 NR Description: similarity to uridine kinase [Schizosaccharomyces
  misc_feature (4)..(195): Homolog of NCBI NO: 38108268 NR Description: hypothetical protein MG02303.4 [Magnaporthe
  misc_feature (52)..(197): Homolog of NCBI NO: 40740541 NR Description: hypothetical protein AN8109.2 [Aspergillus
  misc_feature (7)..(208): Homolog of NCBI NO: 32141121 NR Description: conserved hypothetical protein [Streptomyces A3(2)] >gi|24413735|emb|CAD55275.1| conserved hypothetical
  misc_feature (9)..(208): Homolog of NCBI NO: 23500977 NR Description: kinase-related protein [Brucella suis 1330]

SEQ ID NO: 73560 - DNA, 4671 bp, Arabidopsis thaliana
  misc_feature (1)..(4671): Ceres Seq. ID no. 4972001
  misc_feature: MA Experiment ID: 20000314 Result: Up-regulated in Transcription
  misc_feature: MA Experiment 20000314 PARAMETER Experiment Name: At_14day_Shoots-Roots_Sub_P Parameter: Age (day) Value: 14
  misc_feature: MA Experiment 20000314 PARAMETER Experiment Name: At_14day_Shoots-Roots_Sub_P Parameter: Organism Value: A. thaliana
  misc_feature: MA Experiment 20000314 PARAMETER Experiment Name: At_14day_Shoots-Roots_Sub_P Parameter: Plant Line Value: WS
  misc_feature: MA Experiment 20000314 PARAMETER Experiment Name: At_14day_Shoots-Roots_Sub_P Parameter: Tissue Value: Roots vs. Whole Plant
  misc_feature: MA Experiment ID: 20000315 Result: Down-regulated in Transcription
  misc_feature: MA Experiment 20000315 PARAMETER Experiment Name: At_14day_Shoots-Roots_Sub_P Parameter: Age (day) Value: 14
  misc_feature: MA Experiment 20000315 PARAMETER Experiment Name: At_14day_Shoots-Roots_Sub_P Parameter: Organism Value: A. thaliana
  misc_feature: MA Experiment 20000315 PARAMETER Experiment Name: At_14day_Shoots-Roots_Sub_P Parameter: Plant Line Value: WS
  misc_feature: MA Experiment 20000315 PARAMETER Experiment Name: At_14day_Shoots-Roots_Sub_P Parameter: Tissue Value: Shoots vs. Whole Plant
  misc_feature: MA Experiment ID: 20000347 Result: Up-regulated in Transcription
  misc_feature: MA Experiment 20000347 PARAMETER Experiment Name: At_2mM_SA_Sub_P Parameter: Age (day) Value: 14
  misc_feature: MA Experiment 20000347 PARAMETER Experiment Name: At_2mM_SA_Sub_P Parameter: Organism Value: A. thaliana
  misc_feature: MA Experiment 20000347 PARAMETER Experiment Name: At_2mM_SA_Sub_P Parameter: Plant Line Value: WS
  misc_feature: MA Experiment 20000347 PARAMETER Experiment Name: At_2mM_SA_Sub_P Parameter: Timepoint (hr) Value: 6
  misc_feature: MA Experiment 20000347 PARAMETER Experiment Name: At_2mM_SA_Sub_P Parameter: Tissue Value: Aerial
  misc_feature: MA Experiment 20000347 PARAMETER Experiment Name: At_2mM_SA_Sub_P Parameter: Treatment Value: 2mM SA vs. No Treatment
atgatgaagaccggtgctgttgtttccaatccacgttcgagggtcaagtgggacgcattcctgagtttccaaagagacacgagccacaatttcacggatcgtctctatgaagcgcttgtcaaggaagagctccgggtttggaacgatgatttggaacgtgtggatcatgatcatgatcatgagctacgtccaagtctcgtggaggctatagaggactcggtggcttttgtcgtcgtcttatcccctaactacgctaactctcacctgcgcctcgaagaattagctaagctctgcgatctaaaatgtttgatggtaccgatcttttataaggttgaaccacgggaagttaaggaacagaacggtcctttcgaaaaggattttgaagagcattccaaaagatttggcgaggagaagatacaacgatggaagggagctatgactacggtcggaaatatctccggattcatttgcgggtatgagatccaattggagatggagactggcgttgttccgaataggctaaagtacagcgtctttctgagcttccgaggattcgacacgcgaaccaacttctgtgagcgtctgtatatcgctctcaacgaaaagcaaaatgtccgagtctttcgcgacaacgagggtatggaaaaaggtgataagatcgatccaagtctcttcgaagccattgaggactcggctgcctccgtcatcatcttatccactaactacgctaactcttcttggtgcctagatgaattagctttgctctgcgatcttagatcgtctctgaaacgtcccatgatacctatcttctatggagtcaatcccgaggatgtccgcaaacagagcggtgagttcaggaaagattttgaagagaaagcgaaaagttttgatgaggagacgattcagcgatggaagcgagctatgaatttagtcggaaatatccctggatatgtttgcacagcaaagactgttggagatgacaatgaaggcataaacagagagaaagtagatgacatgattgatctggtggtgaaaaaggttgtagctgctgtgaggaatagaccagagatagttgcagactacactgttggtctggaatcacctataaaggatttgatgaaactgttcaacactgaatccagttctggcatccaagtcatgggactttatggtatgggcggtattgggaagactacccttgcaaaagccttttataacaagatcattgttaacttcaaccgtcatcgagttttcatcgaaagcgttaggggaaaatcgtcagaccaagatggtttagtcaatctacaaaaaactctcatcaaggaacttttccgtttggtacctgaaatagaggatgttagcataggcctggaaaagataaaagagaatgttcatgagaagaagattattgtggttttggatgatgttgatcacatagaccaggttaatgcgctggttggtgaaacaagctggtatggtgaaggaagtcttatagtcatcactaccagagattctgagattctgagtaagctctcagtgaaccaacagtatgaggtcaagtgcttgactgaaccgcaggcgttgaagctctttagtttttattcactacgaaaagagaaaccaccaacacagggtttattggagttgtccaagaagattgccgaggtgacgggactgttgccactggctgttaaagtgtttggttctcatttttatgacaaggacgaaaacgaatggcaagttgaactagagaagctgaaaacccaacaagacaaacttcacggtgttctggctctgagtttcaaatctttagacgaagaagaaaagaagatattcctcgacattgcatgtctctttctcaaaatggatataacaaaagaagaagttgtcgacatactgaaaggatgtgggttaaacgccgaggctgctctccgtgttcttatacagaaatctctccttacaatcttgacagacgacactctgtggatgcatgatcagatcagagacatgggtaggcagatggttcataaagaaagcagcgatgatcctgagatgcggagtagactctgggatcgtggtgaaataatgaacgtattggactatatgaagggaacatcatccattcgaggaatcgtactagactttaataagaagtttgcgagggaccatactgcagatgaaattttctcgagtaatctacgcaacaatccgggtatctactctgtattcaattacctgaagaataagttagtaagatttccagcagaggaaaagccaaaaaggtctgaaatcaccattcccgtagaatcttttgcaccaatgaagaagttgagacttcttcagattaataacgtggaactggaaggagatcttaaacttctcccatctgaactcaagtggatacagtggaaaggtttcccattagaaaatctccctccggatattctttctaggcaacttggtgttcttgatctttcagagagtggagtaagacgagtcaagactttgccccgcaaaaggggggatgagaacttgaaagttgtaaatttgcgtggttgccacggcttagaagccattcctgatttatcaaaccataatgcactagaaaagcttgttcttgagcgatgcaaccttctggtgaaggttcctagatcagttggtaatctgggaaaattgcttcagctggaccttagaaggtgctcaagtctttctgaatttcttggggatgtttctggactgaagtgtcttgaaaaatttttcctctctggctgttcaaatctgagtgtgttaccagaaaacattggttccatgccatgtttgaaagagcttcttcttgatggaactgcgataagtaacttaccgtactctatttttcgcctccaaaagcttgaaaagcttagtctaatgggttgcaggtctattgaagagctaccttcgtgtgtaggatatttgacatcgctcgaagatttatatcttgatgatactgcattgcgaaaccttcctagttctattggagatctaaaaaatctccagaagctgcatctgatgcgctgcacgtccctttctacgattcctgagactataaataagctcatgtcattgaaggaattattcatcaatggaagcgcggtggaggagctacctatagaaaccggctcactcctatgtttgactgacctctctgcaggagattgcaaatttctgaaacaggttccgagttcaattggtggattaaattctcttctccaacttcagttggatagcaccccaattgaagctctaccagaagagattggagacttgcactttattcgacaacttgacttgagaaactgcaaatctctgaaggctctgcctaaaacaatcggaaagatggacacactctatagcttaaaccttgtaggctctaacattgaggaactgccggaagaatttggcaagctggaaaacctagttgaactgcgaatgaacaactgtaaaatgctcaaacggcttcctaaatcgtttggagacttgaaatctcttcaccgtctgtacatgcaggaaactttggtcgcggagttgccagaaagtttcggaaacctctcaaatttaatggtactggaaatgctgaagaagcctctttttagaatttctgagagtaatgttccaggtacaagcgaagaacctcgttttgtagaagtaccaaactctttctcaaagctcttgaagcttgaggaactagatgcttgcagctggagaatatcgggtaaaatccctgatgatcttgagaagctttcgtgtttgatgaaactgaatctggggaataattattttcatagtcttccgtctagcctcgtaaagttatcaaatctccaagaactttcattacgtgactgccgagagctcaagcgtcttccccctcttccatgtaaactggagcagctaaacctagcaaactgtttctcattggagagtgtatccgacctttcagagttaacgatcttgacggatctcaatctcacaaactgtgcgaaagtggttgatattccaggcctagagcacttgacggctctgaaaagattatacatgaccggatgtaactccaactactcccttgcagtaaagaaaagactttccaaggcttctttgaagatgatgcggaatctgagcttgcctggaaacagggtcccggactggttctcgcaaggccctgtcacattctcagctcaaccgaacagagagctcagaggtgtaatcattgctgttgttgtggctcttaatgatgaaaccgaagatgacgactatcagctgcctgatgtgatggaggttcaagcccaaattcataaacttgatcatcacaaatgcaccaacacattgcatctctccggagtgcctagaacaaataacgatcagcttcacatctgccgatactcagcttttcacccactggttacgatgttgaaagacgggtacaccatacaggtgatcaaacgaaacccaccaatcaaacaaggcgttgagctaaagatgcatggcattcatctcgtttacgagggggatgatgatttggaaggcagagaaaatacattacccgaggctcaacaaaccgtttctcagaaacttgccaattttttcagctcgtttgaagaaggtgaagccagcgcaaaaggtgattccactgttgcatga

SEQ ID NO: 73561 - protein, 1556 aa, Arabidopsis thaliana
  peptide (1)..(1556): Ceres Seq. ID no. 4972002
  misc_feature (379)..(643): Pfam Name: NB-ARC domain Pfam Description: NB-ARC domain
  misc_feature (176)..(1321): Homolog of NCBI NO: 12597786 NR Description: disease resistance protein, putative [Arabidopsis
  misc_feature (263)..(1189): Homolog of NCBI NO: 9759045 NR Description: disease resistance protein-like [Arabidopsis
  misc_feature (175)..(344): Homolog of NCBI NO: 9759045 NR Description: disease resistance protein-like [Arabidopsis
  misc_feature (170)..(713): Homolog of NCBI NO: 10178211 NR Description: TMV resistance protein N [Arabidopsis thaliana]
  misc_feature (768)..(1119): Homolog of NCBI NO: 10178211 NR Description: TMV resistance protein N [Arabidopsis thaliana]
  misc_feature (170)..(713): Homolog of NCBI NO: 30692996 NR Description: disease resistance protein (TIR-NBS-LRR class),
  misc_feature (768)..(1119): Homolog of NCBI NO: 30692996 NR Description: disease resistance protein (TIR-NBS-LRR class),
  misc_feature (9)..(154): Homolog of NCBI NO: 9759045 NR Description: disease resistance protein-like [Arabidopsis
  misc_feature (1010)..(1421): Homolog of NCBI NO: 10178211 NR Description: TMV resistance protein N [Arabidopsis thaliana]
  misc_feature (163)..(1128): Homolog of NCBI NO: 37781356 NR Description: nematode resistance-like protein [Solanum
MMKTGAVVSNPRSRVKWDAFLSFQRDTSHNFTDRLYEALVKEELRVWNDDLERVDHDHDHELRPSLVEAIEDSVAFVVVLSPNYANSHLRLEELAKLCDLKCLMVPIFYKVEPREVKEQNGPFEKDFEEHSKRFGEEKIQRWKGAMTTVGNISGFICGYEIQLEMETGVVPNRLKYSVFLSFRGFDTRTNFCERLYIALNEKQNVRVFRDNEGMEKGDKIDPSLFEAIEDSAASVIILSTNYANSSWCLDELALLCDLRSSLKRPMIPIFYGVNPEDVRKQSGEFRKDFEEKAKSFDEETIQRWKRAMNLVGNIPGYVCTAKTVGDDNEGINREKVDDMIDLVVKKVVAAVRNRPEIVADYTVGLESPIKDLMKLFNTESSSGIQVMGLYGMGGIGKTTLAKAFYNKIIVNFNRHRVFIESVRGKSSDQDGLVNLQKTLIKELFRLVPEIEDVSIGLEKIKENVHEKKIIVVLDDVDHIDQVNALVGETSWYGEGSLIVITTRDSEILSKLSVNQQYEVKCLTEPQALKLFSFYSLRKEKPPTQGLLELSKKIAEVTGLLPLAVKVFGSHFYDKDENEWQVELEKLKTQQDKLHGVLALSFKSLDEEEKKIFLDIACLFLKMDITKEEVVDILKGCGLNAEAALRVLIQKSLLTILTDDTLWMHDQIRDMGRQMVHKESSDDPEMRSRLWDRGEIMNVLDYMKGTSSIRGIVLDFNKKFARDHTADEIFSSNLRNNPGIYSVFNYLKNKLVRFPAEEKPKRSEITIPVESFAPMKKLRLLQINNVELEGDLKLLPSELKWIQWKGFPLENLPPDILSRQLGVLDLSESGVRRVKTLPRKRGDENLKVVNLRGCHGLEAIPDLSNHNALEKLVLERCNLLVKVPRSVGNLGKLLQLDLRRCSSLSEFLGDVSGLKCLEKFFLSGCSNLSVLPENIGSMPCLKELLLDGTAISNLPYSIFRLQKLEKLSLMGCRSIEELPSCVGYLTSLEDLYLDDTALRNLPSSIGDLKNLQKLHLMRCTSLSTIPETINKLMSLKELFINGSAVEELPIETGSLLCLTDLSAGDCKFLKQVPSSIGGLNSLLQLQLDSTPIEALPEEIGDLHFIRQLDLRNCKSLKALPKTIGKMDTLYSLNLVGSNIEELPEEFGKLENLVELRMNNCKMLKRLPKSFGDLKSLHRLYMQETLVAELPESFGNLSNLMVLEMLKKPLFRISESNVPGTSEEPRFVEVPNSFSKLLKLEELDACSWRISGKIPDDLEKLSCLMKLNLGNNYFHSLPSSLVKLSNLQELSLRDCRELKRLPPLPCKLEQLNLANCFSLESVSDLSELTILTDLNLTNCAKVVDIPGLEHLTALKRLYMTGCNSNYSLAVKKRLSKASLKMMRNLSLPGNRVPDWFSQGPVTFSAQPNRELRGVIIAVVVALNDETEDDDYQLPDVMEVQAQIHKLDHHKCTNTLHLSGVPRTNNDQLHICRYSAFHPLVTMLKDGYTIQVIKRNPPIKQGVELKMHGIHLVYEGDDDLEGRENTLPEAQQTVSQKLANFFSSFEEGEASAKGDSTVA

SEQ ID NO: 73562 - protein, 1555 aa, Arabidopsis thaliana
  peptide (1)..(1555): Ceres Seq. ID no. 4972003
  misc_feature (378)..(642): Pfam Name: NB-ARC domain Pfam Description: NB-ARC domain
  misc_feature (175)..(1320): Homolog of NCBI NO: 12597786 NR Description: disease resistance protein, putative [Arabidopsis
  misc_feature (262)..(1188): Homolog of NCBI NO: 9759045 NR Description: disease resistance protein-like [Arabidopsis
  misc_feature (174)..(343): Homolog of NCBI NO: 9759045 NR Description: disease resistance protein-like [Arabidopsis
  misc_feature (169)..(712): Homolog of NCBI NO: 10178211 NR Description: TMV resistance protein N [Arabidopsis thaliana]
  misc_feature (767)..(1118): Homolog of NCBI NO: 10178211 NR Description: TMV resistance protein N [Arabidopsis thaliana]
  misc_feature (169)..(712): Homolog of NCBI NO: 30692996 NR Description: disease resistance protein (TIR-NBS-LRR class),
  misc_feature (767)..(1118): Homolog of NCBI NO: 30692996 NR Description: disease resistance protein (TIR-NBS-LRR class),
  misc_feature (8)..(153): Homolog of NCBI NO: 9759045 NR Description: disease resistance protein-like [Arabidopsis
  misc_feature (1009)..(1420): Homolog of NCBI NO: 10178211 NR Description: TMV resistance protein N [Arabidopsis thaliana]
  misc_feature (162)..(1127): Homolog of NCBI NO: 37781356 NR Description: nematode resistance-like protein [Solanum
MKTGAVVSNPRSRVKWDAFLSFQRDTSHNFTDRLYEALVKEELRVWNDDLERVDHDHDHELRPSLVEAIEDSVAFVVVLSPNYANSHLRLEELAKLCDLKCLMVPIFYKVEPREVKEQNGPFEKDFEEHSKRFGEEKIQRWKGAMTTVGNISGFICGYEIQLEMETGVVPNRLKYSVFLSFRGFDTRTNFCERLYIALNEKQNVRVFRDNEGMEKGDKIDPSLFEAIEDSAASVIILSTNYANSSWCLDELALLCDLRSSLKRPMIPIFYGVNPEDVRKQSGEFRKDFEEKAKSFDEETIQRWKRAMNLVGNIPGYVCTAKTVGDDNEGINREKVDDMIDLVVKKVVAAVRNRPEIVADYTVGLESPIKDLMKLFNTESSSGIQVMGLYGMGGIGKTTLAKAFYNKIIVNFNRHRVFIESVRGKSSDQDGLVNLQKTLIKELFRLVPEIEDVSIGLEKIKENVHEKKIIVVLDDVDHIDQVNALVGETSWYGEGSLIVITTRDSEILSKLSVNQQYEVKCLTEPQALKLFSFYSLRKEKPPTQGLLELSKKIAEVTGLLPLAVKVFGSHFYDKDENEWQVELEKLKTQQDKLHGVLALSFKSLDEEEKKIFLDIACLFLKMDITKEEVVDILKGCGLNAEAALRVLIQKSLLTILTDDTLWMHDQIRDMGRQMVHKESSDDPEMRSRLWDRGEIMNVLDYMKGTSSIRGIVLDFNKKFARDHTADEIFSSNLRNNPGIYSVFNYLKNKLVRFPAEEKPKRSEITIPVESFAPMKKLRLLQINNVELEGDLKLLPSELKWIQWKGFPLENLPPDILSRQLGVLDLSESGVRRVKTLPRKRGDENLKVVNLRGCHGLEAIPDLSNHNALEKLVLERCNLLVKVPRSVGNLGKLLQLDLRRCSSLSEFLGDVSGLKCLEKFFLSGCSNLSVLPENIGSMPCLKELLLDGTAISNLPYSIFRLQKLEKLSLMGCRSIEELPSCVGYLTSLEDLYLDDTALRNLPSSIGDLKNLQKLHLMRCTSLSTIPETINKLMSLKELFINGSAVEELPIETGSLLCLTDLSAGDCKFLKQVPSSIGGLNSLLQLQLDSTPIEALPEEIGDLHFIRQLDLRNCKSLKALPKTIGKMDTLYSLNLVGSNIEELPEEFGKLENLVELRMNNCKMLKRLPKSFGDLKSLHRLYMQETLVAELPESFGNLSNLMVLEMLKKPLFRISESNVPGTSEEPRFVEVPNSFSKLLKLEELDACSWRISGKIPDDLEKLSCLMKLNLGNNYFHSLPSSLVKLSNLQELSLRDCRELKRLPPLPCKLEQLNLANCFSLESVSDLSELTILTDLNLTNCAKVVDIPGLEHLTALKRLYMTGCNSNYSLAVKKRLSKASLKMMRNLSLPGNRVPDWFSQGPVTFSAQPNRELRGVIIAVVVALNDETEDDDYQLPDVMEVQAQIHKLDHHKCTNTLHLSGVPRTNNDQLHICRYSAFHPLVTMLKDGYTIQVIKRNPPIKQGVELKMHGIHLVYEGDDDLEGRENTLPEAQQTVSQKLANFFSSFEEGEASAKGDSTVA

SEQ ID NO: 73563 - protein, 1453 aa, Arabidopsis thaliana
  peptide (1)..(1453): Ceres Seq. ID no. 4972004
  misc_feature (276)..(540): Pfam Name: NB-ARC domain Pfam Description: NB-ARC domain
  misc_feature (73)..(1218): Homolog of NCBI NO: 12597786 NR Description: disease resistance protein, putative [Arabidopsis
  misc_feature (160)..(1086): Homolog of NCBI NO: 9759045 NR Description: disease resistance protein-like [Arabidopsis
  misc_feature (72)..(241): Homolog of NCBI NO: 9759045 NR Description: disease resistance protein-like [Arabidopsis
  misc_feature (67)..(610): Homolog of NCBI NO: 10178211 NR Description: TMV resistance protein N [Arabidopsis thaliana]
  misc_feature (665)..(1016): Homolog of NCBI NO: 10178211 NR Description: TMV resistance protein N [Arabidopsis thaliana]
  misc_feature (67)..(610): Homolog of NCBI NO: 30692996 NR Description: disease resistance protein (TIR-NBS-LRR class),
  misc_feature (665)..(1016): Homolog of NCBI NO: 30692996 NR Description: disease resistance protein (TIR-NBS-LRR class),
  misc_feature (1)..(51): Homolog of NCBI NO: 9759045 NR Description: disease resistance protein-like [Arabidopsis
  misc_feature (907)..(1318): Homolog of NCBI NO: 10178211 NR Description: TMV resistance protein N [Arabidopsis thaliana]
  misc_feature (60)..(1025): Homolog of NCBI NO: 37781356 NR Description: nematode resistance-like protein [Solanum
MVPIFYKVEPREVKEQNGPFEKDFEEHSKRFGEEKIQRWKGAMTTVGNISGFICGYEIQLEMETGVVPNRLKYSVFLSFRGFDTRTNFCERLYIALNEKQNVRVFRDNEGMEKGDKIDPSLFEAIEDSAASVIILSTNYANSSWCLDELALLCDLRSSLKRPMIPIFYGVNPEDVRKQSGEFRKDFEEKAKSFDEETIQRWKRAMNLVGNIPGYVCTAKTVGDDNEGINREKVDDMIDLVVKKVVAAVRNRPEIVADYTVGLESPIKDLMKLFNTESSSGIQVMGLYGMGGIGKTTLAKAFYNKIIVNFNRHRVFIESVRGKSSDQDGLVNLQKTLIKELFRLVPEIEDVSIGLEKIKENVHEKKIIVVLDDVDHIDQVNALVGETSWYGEGSLIVITTRDSEILSKLSVNQQYEVKCLTEPQALKLFSFYSLRKEKPPTQGLLELSKKIAEVTGLLPLAVKVFGSHFYDKDENEWQVELEKLKTQQDKLHGVLALSFKSLDEEEKKIFLDIACLFLKMDITKEEVVDILKGCGLNAEAALRVLIQKSLLTILTDDTLWMHDQIRDMGRQMVHKESSDDPEMRSRLWDRGEIMNVLDYMKGTSSIRGIVLDFNKKFARDHTADEIFSSNLRNNPGIYSVFNYLKNKLVRFPAEEKPKRSEITIPVESFAPMKKLRLLQINNVELEGDLKLLPSELKWIQWKGFPLENLPPDILSRQLGVLDLSESGVRRVKTLPRKRGDENLKVVNLRGCHGLEAIPDLSNHNALEKLVLERCNLLVKVPRSVGNLGKLLQLDLRRCSSLSEFLGDVSGLKCLEKFFLSGCSNLSVLPENIGSMPCLKELLLDGTAISNLPYSIFRLQKLEKLSLMGCRSIEELPSCVGYLTSLEDLYLDDTALRNLPSSIGDLKNLQKLHLMRCTSLSTIPETINKLMSLKELFINGSAVEELPIETGSLLCLTDLSAGDCKFLKQVPSSIGGLNSLLQLQLDSTPIEALPEEIGDLHFIRQLDLRNCKSLKALPKTIGKMDTLYSLNLVGSNIEELPEEFGKLENLVELRMNNCKMLKRLPKSFGDLKSLHRLYMQETLVAELPESFGNLSNLMVLEMLKKPLFRISESNVPGTSEEPRFVEVPNSFSKLLKLEELDACSWRISGKIPDDLEKLSCLMKLNLGNNYFHSLPSSLVKLSNLQELSLRDCRELKRLPPLPCKLEQLNLANCFSLESVSDLSELTILTDLNLTNCAKVVDIPGLEHLTALKRLYMTGCNSNYSLAVKKRLSKASLKMMRNLSLPGNRVPDWFSQGPVTFSAQPNRELRGVIIAVVVALNDETEDDDYQLPDVMEVQAQIHKLDHHKCTNTLHLSGVPRTNNDQLHICRYSAFHPLVTMLKDGYTIQVIKRNPPIKQGVELKMHGIHLVYEGDDDLEGRENTLPEAQQTVSQKLANFFSSFEEGEASAKGDSTVA

SEQ ID NO: 73564 - DNA, 2781 bp, Arabidopsis thaliana
  misc_feature (1)..(2781): Ceres Seq. ID no. 4972094
  misc_feature: MA Experiment ID: 20000171 Result: Up-regulated in Transcription
  misc_feature: MA Experiment 20000171 PARAMETER Experiment Name: At_42deg_Heat_P Parameter: Age (day) Value: 14
  misc_feature: MA Experiment 20000171 PARAMETER Experiment Name: At_42deg_Heat_P Parameter: Organism Value: A. thaliana
  misc_feature: MA Experiment 20000171 PARAMETER Experiment Name: At_42deg_Heat_P Parameter: Plant Line Value: WS
  misc_feature: MA Experiment 20000171 PARAMETER Experiment Name: At_42deg_Heat_P Parameter: Temperature (deg C) Value: 42 vs. 22
  misc_feature: MA Experiment 20000171 PARAMETER Experiment Name: At_42deg_Heat_P Parameter: Timepoint (hr) Value: 1
  misc_feature: MA Experiment 20000171 PARAMETER Experiment Name: At_42deg_Heat_P Parameter: Tissue Value: Aerial
  misc_feature: MA Experiment ID: 20000439 Result: Up-regulated in Transcription
  misc_feature: MA Experiment 20000439 PARAMETER Experiment Name: At_Roots__P Parameter: Age (day) Value: 14 vs. 21
  misc_feature: MA Experiment 20000439 PARAMETER Experiment Name: At_Roots__P Parameter: Organism Value: A. thaliana
  misc_feature: MA Experiment 20000439 PARAMETER Experiment Name: At_Roots__P Parameter: Tissue Value: Roots vs. Whole Plant
  misc_feature: MA Experiment ID: 20000527 Result: Down-regulated in Transcription
  misc_feature: MA Experiment 20000527 PARAMETER Experiment Name: At_10percent_PEG_P Parameter: Age (day) Value: 20
  misc_feature: MA Experiment 20000527 PARAMETER Experiment Name: At_10percent_PEG_P Parameter: Organism Value: A. thaliana
  misc_feature: MA Experiment 20000527 PARAMETER Experiment Name: At_10percent_PEG_P Parameter: Plant Line Value: WS
  misc_feature: MA Experiment 20000527 PARAMETER Experiment Name: At_10percent_PEG_P Parameter: Timepoint (day) Value: 20
  misc_feature: MA Experiment 20000527 PARAMETER Experiment Name: At_10percent_PEG_P Parameter: Tissue Value: Whole Plant
  misc_feature: MA Experiment 20000527 PARAMETER Experiment Name: At_10percent_PEG_P Parameter: Treatment Value: 10percent PEG vs. No Treatment
  misc_feature: MA Experiment ID: 20000573 Result: Down-regulated in Transcription
  misc_feature: MA Experiment 20000573 PARAMETER Experiment Name: At_100uM_ABA_Mutants__P Parameter: Organism Value: A. thaliana
  misc_feature: MA Experiment 20000573 PARAMETER Experiment Name: At_100uM_ABA_Mutants__P Parameter: Plant Line Value: CS22 vs. Ler wt
  misc_feature: MA Experiment 20000573 PARAMETER Experiment Name: At_100uM_ABA_Mutants__P Parameter: Timepoint (hr) Value: N/A
  misc_feature: MA Experiment 20000573 PARAMETER Experiment Name: At_100uM_ABA_Mutants__P Parameter: Tissue Value: Whole Plant
  misc_feature: MA Experiment 20000573 PARAMETER Experiment Name: At_100uM_ABA_Mutants__P Parameter: Treatment Value: None
atgaagttatcgcctctgagtttctctacgagttcgagtttcagtcacgccgatggaatcgacgacggtgttgagttaatatcatctccatttgccggcggcgcaatgctgccggtttttctcaacgatttgagtcgtaacagtggagaatccggaagcggtagtagctgggaaagagagctcgtggaggttacgttagagctcgacgtcggcgatgactccatactcgtctgcggaatgtctgaggcggcgtctgttgattctcgggcgagatcggtggatttggtaaccgcgaggttatcgaggaatttatcgaatgcgtctacgagaatccgccagaaactagggaagttactgaggtcggaatcgtggaaaacgacgacgtcttctaccgccggcgagagagatagagatcttgaacgtcagacggcggtgactttggggattctgacggcgagggataaacggaaagaagacgcgaaactacagcgatcaacgtcgagtgcgcaaagagcgttaaaaggattacagtttataaataaaaccacgagaggaaatagctgcgtctgcgattgggattgcgattgcgatcagatgtggaaaaaagttgaaaagcgattcgaatcgctttctaaaaatggattactcgcccgagacgattttggcgagtgcgttgggatggtggattcgaaggactttgcggtgagtgtattcgacgcgttggctaggagaagaagacagaaactggagaagataacgaaagatgaacttcatgatttctggttacagatttctgaccaaagcttcgacgcacgtcttcaaattttcttcgacatggctgatagtaacgaagacgggaagatcactagagaagaaatcaaagaacttctaatgctaagtgcatcagcaaacaagttagcaaaactcaaggaacaagctgaagagtacgcatctctgatcatggaagagcttgatcctgagaattttggatacattgagttatggcaactcgagacactcttacttcagagagacgcatacatgaattacagtagaccacttagcacaacaagcggtggagtaaataactggcaaagaagctgggttcttttagtgtgggtcatgcttatggccatcctctttgtctggaagtttctagagtacagagaaaaagctgcgtttaaggtcatggggtattgtttaaccactgctaaaggagctgcagagactcttaagctcaacatggctctggttttattacctgtctgtagaaacacattgacttggctaagatctacacgcgctcgagcttgtgttccttttgatgacaacatcaatttccataagattattgcttgtgccatagcgattgggatacttgttcatgctggtactcatttggcgtgtgatttcccccggattataaactcgagtccagaacaatttgtcttgatcgcttctgccttcaatggtactaagcctacattcaaagacctgatgacaggtgcagaaggaatcaccgggatctcgatggtgatcttgacaaccattgcattcacattagcatcaactcatttcaggagaaaccgtgtgaggcttccggcaccacttgatcggttgactggctttaacgcattctggtacactcatcaccttctagtggttgtctacatcatgctcattgtccacgggaccttcctgttctttgctgataagtggtatcagaaaacgacttggatgtacatctcggttcctttggtgctctacgtggcagaacgaagtctgcgagcttgtaggtcaaagcattactctgtcaaaatcctcaaggtttccatgctacctggagaagtactcagcttaatcatgtcaaagcctcctggattcaagtacaagagcggtcagtacatattcttgcagtgtccaactatctctcgatttgaatggcacccattttctattacctctgcaccaggagatgaccaacttagtgttcacatccgaacactcggagactggacagaggagctacgacgagttctaactgtgggcaaagatctttcaacatgcgtgattgggcgttcaaaattctctgcctattgcaatattgatatgataaaccgaccaaaattactagtagacggtccatatggagctccagcacaggactacagaagctatgatgtcttgctcctcattggactgggaataggagctactcctttcataagcatcctgaaggatctgctgaacaattcaagagacgaacaaacagacaatgaattcagcagatcggatttcagctggaatagctgtacatcttcatataccacagcaaccccaacttcaacacatggagggaaaaagaaagcagtgaaggctcacttttactgggtcacaagggagccaggatccgttgaatggtttagaggagtaatggaggaaatatcagacatggactgcagaggccagattgagttgcacaactaccttacaagcgtatatgatgaaggtgatgcaagatcaaccctgataaaaatggtccaggctttgaaccatgccaaacatggagttgatattctatccggaacacgggtgagaacacattttgcaaggcccaactggaaggaagtcttcagtagcatagcaagaaagcatccaaattcgacagtcggagtgttttactgcggcatacaaaccgtggcaaaggagttgaagaagcaagcacaagacatgagtcaaaaaacaaccacacggttcgagttccataaggagcatttctaa

SEQ ID NO: 73565 - protein, 926 aa, Arabidopsis thaliana
  peptide (1)..(926): Ceres Seq. ID no. 4972095
  misc_feature (397)..(925): Pfam Name: Ferric reductase like transmembrane component Pfam Description: Ferric reductase like transmembrane component
  misc_feature (69)..(926): Homolog of NCBI NO: 18407959 NR Description: cytochrome b245 beta chain homolog RbohAp108, protein id: At1g64060.1, supported by cDNA: gi_2654867, supported
  misc_feature (69)..(926): Homolog of NCBI NO: 3242456 NR Description: Atrboh F [Arabidopsis thaliana]
  misc_feature (69)..(857): Homolog of NCBI NO: 25354658 NR Description: protein F22C12.18 [imported] - Arabidopsis >gi|6692109|gb|AAF24574.1|AC007764_16 F22C12.18 [Arabidopsis
  misc_feature (813)..(926): Homolog of NCBI NO: 25354658 NR Description: protein F22C12.18 [imported] - Arabidopsis >gi|6692109|gb|AAF24574.1|AC007764_16 F22C12.18 [Arabidopsis
  misc_feature (363)..(926): Homolog of NCBI NO: 4585142 NR Description: NADPH oxidase; gp91; phox homolog [Lycopersicon
  misc_feature (150)..(358): Homolog of NCBI NO: 4585142 NR Description: NADPH oxidase; gp91; phox homolog [Lycopersicon
  misc_feature (362)..(926): Homolog of NCBI NO: 7489460 NR Description: cytochrome b245 beta chain homolog rbohA - rice
  misc_feature (211)..(358): Homolog of NCBI NO: 7489460 NR Description: cytochrome b245 beta chain homolog rbohA - rice
  misc_feature (363)..(926): Homolog of NCBI NO: 18389310 NR Description: respiratory burst oxidase protein F [Solanum
  misc_feature (69)..(358): Homolog of NCBI NO: 18389310 NR Description: respiratory burst oxidase protein F [Solanum
MKLSPLSFSTSSSFSHADGIDDGVELISSPFAGGAMLPVFLNDLSRNSGESGSGSSWERELVEVTLELDVGDDSILVCGMSEAASVDSRARSVDLVTARLSRNLSNASTRIRQKLGKLLRSESWKTTTSSTAGERDRDLERQTAVTLGILTARDKRKEDAKLQRSTSSAQRALKGLQFINKTTRGNSCVCDWDCDCDQMWKKVEKRFESLSKNGLLARDDFGECVGMVDSKDFAVSVFDALARRRRQKLEKITKDELHDFWLQISDQSFDARLQIFFDMADSNEDGKITREEIKELLMLSASANKLAKLKEQAEEYASLIMEELDPENFGYIELWQLETLLLQRDAYMNYSRPLSTTSGGVNNWQRSWVLLVWVMLMAILFVWKFLEYREKAAFKVMGYCLTTAKGAAETLKLNMALVLLPVCRNTLTWLRSTRARACVPFDDNINFHKIIACAIAIGILVHAGTHLACDFPRIINSSPEQFVLIASAFNGTKPTFKDLMTGAEGITGISMVILTTIAFTLASTHFRRNRVRLPAPLDRLTGFNAFWYTHHLLVVVYIMLIVHGTFLFFADKWYQKTTWMYISVPLVLYVAERSLRACRSKHYSVKILKVSMLPGEVLSLIMSKPPGFKYKSGQYIFLQCPTISRFEWHPFSITSAPGDDQLSVHIRTLGDWTEELRRVLTVGKDLSTCVIGRSKFSAYCNIDMINRPKLLVDGPYGAPAQDYRSYDVLLLIGLGIGATPFISILKDLLNNSRDEQTDNEFSRSDFSWNSCTSSYTTATPTSTHGGKKKAVKAHFYWVTREPGSVEWFRGVMEEISDMDCRGQIELHNYLTSVYDEGDARSTLIKMVQALNHAKHGVDILSGTRVRTHFARPNWKEVFSSIARKHPNSTVGVFYCGIQTVAKELKKQAQDMSQKTTTRFEFHKEHF

SEQ ID NO: 73566 - protein, 891 aa, Arabidopsis thaliana
  peptide (1)..(891): Ceres Seq. ID no. 4972096
  misc_feature (362)..(890): Pfam Name: Ferric reductase like transmembrane component Pfam Description: Ferric reductase like transmembrane component
  misc_feature (34)..(891): Homolog of NCBI NO: 18407959 NR Description: cytochrome b245 beta chain homolog RbohAp108, protein id: At1g64060.1, supported by cDNA: gi_2654867, supported
  misc_feature (34)..(891): Homolog of NCBI NO: 3242456 NR Description: Atrboh F [Arabidopsis thaliana]
  misc_feature (34)..(822): Homolog of NCBI NO: 25354658 NR Description: protein F22C12.18 [imported] - Arabidopsis >gi|6692109|gb|AAF24574.1|AC007764_16 F22C12.18 [Arabidopsis
  misc_feature (778)..(891): Homolog of NCBI NO: 25354658 NR Description: protein F22C12.18 [imported] - Arabidopsis >gi|6692109|gb|AAF24574.1|AC007764_16 F22C12.18 [Arabidopsis
  misc_feature (328)..(891): Homolog of NCBI NO: 4585142 NR Description: NADPH oxidase; gp91; phox homolog [Lycopersicon
  misc_feature (115)..(323): Homolog of NCBI NO: 4585142 NR Description: NADPH oxidase; gp91; phox homolog [Lycopersicon
  misc_feature (327)..(891): Homolog of NCBI NO: 7489460 NR Description: cytochrome b245 beta chain homolog rbohA - rice
  misc_feature (176)..(323): Homolog of NCBI NO: 7489460 NR Description: cytochrome b245 beta chain homolog rbohA - rice
  misc_feature (328)..(891): Homolog of NCBI NO: 18389310 NR Description: respiratory burst oxidase protein F [Solanum
  misc_feature (34)..(323): Homolog of NCBI NO: 18389310 NR Description: respiratory burst oxidase protein F [Solanum
MLPVFLNDLSRNSGESGSGSSWERELVEVTLELDVGDDSILVCGMSEAASVDSRARSVDLVTARLSRNLSNASTRIRQKLGKLLRSESWKTTTSSTAGERDRDLERQTAVTLGILTARDKRKEDAKLQRSTSSAQRALKGLQFINKTTRGNSCVCDWDCDCDQMWKKVEKRFESLSKNGLLARDDFGECVGMVDSKDFAVSVFDALARRRRQKLEKITKDELHDFWLQISDQSFDARLQIFFDMADSNEDGKITREEIKELLMLSASANKLAKLKEQAEEYASLIMEELDPENFGYIELWQLETLLLQRDAYMNYSRPLSTTSGGVNNWQRSWVLLVWVMLMAILFVWKFLEYREKAAFKVMGYCLTTAKGAAETLKLNMALVLLPVCRNTLTWLRSTRARACVPFDDNINFHKIIACAIAIGILVHAGTHLACDFPRIINSSPEQFVLIASAFNGTKPTFKDLMTGAEGITGISMVILTTIAFTLASTHFRRNRVRLPAPLDRLTGFNAFWYTHHLLVVVYIMLIVHGTFLFFADKWYQKTTWMYISVPLVLYVAERSLRACRSKHYSVKILKVSMLPGEVLSLIMSKPPGFKYKSGQYIFLQCPTISRFEWHPFSITSAPGDDQLSVHIRTLGDWTEELRRVLTVGKDLSTCVIGRSKFSAYCNIDMINRPKLLVDGPYGAPAQDYRSYDVLLLIGLGIGATPFISILKDLLNNSRDEQTDNEFSRSDFSWNSCTSSYTTATPTSTHGGKKKAVKAHFYWVTREPGSVEWFRGVMEEISDMDCRGQIELHNYLTSVYDEGDARSTLIKMVQALNHAKHGVDILSGTRVRTHFARPNWKEVFSSIARKHPNSTVGVFYCGIQTVAKELKKQAQDMSQKTTTRFEFHKEHF

SEQ ID NO: 73567 - protein, 847 aa, Arabidopsis thaliana
  peptide (1)..(847): Ceres Seq. ID no. 4972097
  misc_feature (318)..(846): Pfam Name: Ferric reductase like transmembrane component Pfam Description: Ferric reductase like transmembrane component
  misc_feature (1)..(847): Homolog of NCBI NO: 18407959 NR Description: cytochrome b245 beta chain homolog RbohAp108, protein id: At1g64060.1, supported by cDNA: gi_2654867, supported
  misc_feature (1)..(847): Homolog of NCBI NO: 3242456 NR Description: Atrboh F [Arabidopsis thaliana]
  misc_feature (1)..(778): Homolog of NCBI NO: 25354658 NR Description: protein F22C12.18 [imported] - Arabidopsis >gi|6692109|gb|AAF24574.1|AC007764_16 F22C12.18 [Arabidopsis
  misc_feature (734)..(847): Homolog of NCBI NO: 25354658 NR Description: protein F22C12.18 [imported] - Arabidopsis >gi|6692109|gb|AAF24574.1|AC007764_16 F22C12.18 [Arabidopsis
  misc_feature (284)..(847): Homolog of NCBI NO: 4585142 NR Description: NADPH oxidase; gp91; phox homolog [Lycopersicon
  misc_feature (71)..(279): Homolog of NCBI NO: 4585142 NR Description: NADPH oxidase; gp91; phox homolog [Lycopersicon
  misc_feature (283)..(847): Homolog of NCBI NO: 7489460 NR Description: cytochrome b245 beta chain homolog rbohA - rice
  misc_feature (132)..(279): Homolog of NCBI NO: 7489460 NR Description: cytochrome b245 beta chain homolog rbohA - rice
  misc_feature (284)..(847): Homolog of NCBI NO: 18389310 NR Description: respiratory burst oxidase protein F [Solanum
  misc_feature (1)..(279): Homolog of NCBI NO: 18389310 NR Description: respiratory burst oxidase protein F [Solanum
MSEAASVDSRARSVDLVTARLSRNLSNASTRIRQKLGKLLRSESWKTTTSSTAGERDRDLERQTAVTLGILTARDKRKEDAKLQRSTSSAQRALKGLQFINKTTRGNSCVCDWDCDCDQMWKKVEKRFESLSKNGLLARDDFGECVGMVDSKDFAVSVFDALARRRRQKLEKITKDELHDFWLQISDQSFDARLQIFFDMADSNEDGKITREEIKELLMLSASANKLAKLKEQAEEYASLIMEELDPENFGYIELWQLETLLLQRDAYMNYSRPLSTTSGGVNNWQRSWVLLVWVMLMAILFVWKFLEYREKAAFKVMGYCLTTAKGAAETLKLNMALVLLPVCRNTLTWLRSTRARACVPFDDNINFHKIIACAIAIGILVHAGTHLACDFPRIINSSPEQFVLIASAFNGTKPTFKDLMTGAEGITGISMVILTTIAFTLASTHFRRNRVRLPAPLDRLTGFNAFWYTHHLLVVVYIMLIVHGTFLFFADKWYQKTTWMYISVPLVLYVAERSLRACRSKHYSVKILKVSMLPGEVLSLIMSKPPGFKYKSGQYIFLQCPTISRFEWHPFSITSAPGDDQLSVHIRTLGDWTEELRRVLTVGKDLSTCVIGRSKFSAYCNIDMINRPKLLVDGPYGAPAQDYRSYDVLLLIGLGIGATPFISILKDLLNNSRDEQTDNEFSRSDFSWNSCTSSYTTATPTSTHGGKKKAVKAHFYWVTREPGSVEWFRGVMEEISDMDCRGQIELHNYLTSVYDEGDARSTLIKMVQALNHAKHGVDILSGTRVRTHFARPNWKEVFSSIARKHPNSTVGVFYCGIQTVAKELKKQAQDMSQKTTTRFEFHKEHF

SEQ ID NO: 73568 - DNA, 1497 bp, Arabidopsis thaliana
  misc_feature (1)..(1497): Ceres Seq. ID no. 4972102
  misc_feature: MA Experiment ID: 20000182 Result: Up-regulated in Transcription
  misc_feature: MA Experiment 20000182 PARAMETER Experiment Name: At_2mM_SA_P Parameter: Age (day) Value: 14
  misc_feature: MA Experiment 20000182 PARAMETER Experiment Name: At_2mM_SA_P Parameter: Organism Value: A. thaliana
  misc_feature: MA Experiment 20000182 PARAMETER Experiment Name: At_2mM_SA_P Parameter: Plant Line Value: WS
  misc_feature: MA Experiment 20000182 PARAMETER Experiment Name: At_2mM_SA_P Parameter: Timepoint (hr) Value: 6
  misc_feature: MA Experiment 20000182 PARAMETER Experiment Name: At_2mM_SA_P Parameter: Tissue Value: Aerial
  misc_feature: MA Experiment 20000182 PARAMETER Experiment Name: At_2mM_SA_P Parameter: Treatment Value: 2mM SA vs. No Treatment
  misc_feature: MA Experiment ID: 20000527 Result: Down-regulated in Transcription
  misc_feature: MA Experiment 20000527 PARAMETER Experiment Name: At_10percent_PEG_P Parameter: Age (day) Value: 20
  misc_feature: MA Experiment 20000527 PARAMETER Experiment Name: At_10percent_PEG_P Parameter: Organism Value: A. thaliana
  misc_feature: MA Experiment 20000527 PARAMETER Experiment Name: At_10percent_PEG_P Parameter: Plant Line Value: WS
  misc_feature: MA Experiment 20000527 PARAMETER Experiment Name: At_10percent_PEG_P Parameter: Timepoint (day) Value: 20
  misc_feature: MA Experiment 20000527 PARAMETER Experiment Name: At_10percent_PEG_P Parameter: Tissue Value: Whole Plant
  misc_feature: MA Experiment 20000527 PARAMETER Experiment Name: At_10percent_PEG_P Parameter: Treatment Value: 10percent PEG vs. No Treatment
atggcttctaactatgataagcttacttcttcgagagtagccatcatcggtgctggtgttagcggattagcagccgctaagaacttagttcatcacaacccgaccgtattcgaagcctcggattcagtcggaggtgtttggaggagctgcacttacgagacgactaaattacaatcggctcgagtcgattacgagttctccgactttccatggcccaataatagagatgacacaactttcccaccttaccttgagatattagattacttggaatcttatgccaaacattttgatcttctcaaattcatgaagtttggctctaaggtcatcgaagtaaggttcatcggtgatggcgaaactcctcagatggttgaccttggtgcttacggcaacttgttgcccggaaaacctgtatgggaattcgtggttgtgtgtaccgggaaatacggcgacgttccaagaataccagcttttccggcaaagaaagggccggagatgtttcaaggaaaagtaatgcattcgatggattactgcaagttagagaaagaagaagcttctactctcctcagtggcaaaaaagtagccgtcatcggcttcaagaaatccgccattgatttggctttagagtctgctttagctaatcaaggggaaggaggaaaagcttgcacaatggtggtgagaacaactcattgggggatcccacattattgggtgtggggcttaccattcttcttgttctactcttcgagagcttctcagttcctccatgataggcctaaccaaagcttccttagaactctcttttgcctcctcttctctcttctgctacctcttgagaaatatggtctaaaaccaaaccattctttcgaggaagactatgcttcttgtcaaatggcgatcataccggagaatttctttgaggaagcggataaagggatgatccggtttaagaaatcatcaaaatggtggttttatgaagaagggattgtgtttgaagatgggacgacattagaagctgatgttgtgatacttgctactggttatgatggcaagaagaagctcaaagctattgttcctgaacctttccgaacttggcttgagtttccaagcggtgtcatgcctttatacaggggaacaatccatccattgataccaaacatgggtttcgtaggatacgtccaaagcagctcgaacttacacacatcagagctacgttcaatgtggctaagccggctagtggatgagaaattcagattaccaagcaaagagaagatgttggatcaattcttaaaagaaatggaagtgacgagaaactcaagcagattctacaaacgtcattgcatttccacgttcagcatccaacatgctgatgatatgtgcaacgacatgggactcaatccttggcgtaaatccaacttcctccttgaagcttttagtccttatggttctcaagattaccgactcggtcaagaagaaaaagaagatatgactgcttaa

SEQ ID NO: 73569 - protein, 498 aa, Arabidopsis thaliana
  peptide (1)..(498): Ceres Seq. ID no. 4972103
  misc_feature (15)..(177): Pfam Name: Pyridine nucleotide-disulphide oxidoreductase Pfam Description: Pyridine nucleotide-disulphide oxidoreductase
  misc_feature (1)..(498): Homolog of NCBI NO: 15221981 NR Description: unknown protein; protein id: At1g19250.1
  misc_feature (139)..(498): Homolog of NCBI NO: 25513456 NR Description: T29M8.12 protein - Arabidopsis thaliana
  misc_feature (1)..(152): Homolog of NCBI NO: 25513456 NR Description: T29M8.12 protein - Arabidopsis thaliana
  misc_feature (9)..(237): Homolog of NCBI NO: 15242332 NR Description: dimethylaniline monooxygenase
  misc_feature (276)..(467): Homolog of NCBI NO: 15242332 NR Description: dimethylaniline monooxygenase
  misc_feature (231)..(487): Homolog of NCBI NO: 24960753 NR Description: Hypothetical protein [Oryza sativa (japonica
  misc_feature (12)..(146): Homolog of NCBI NO: 24960753 NR Description: Hypothetical protein [Oryza sativa (japonica
  misc_feature (139)..(336): Homolog of NCBI NO: 24960753 NR Description: Hypothetical protein [Oryza sativa (japonica
  misc_feature (140)..(486): Homolog of NCBI NO: 38344126 NR Description: OSJNBb0072N21.5 [Oryza sativa (japonica
  misc_feature (8)..(119): Homolog of NCBI NO: 38344126 NR Description: OSJNBb0072N21.5 [Oryza sativa (japonica
MASNYDKLTSSRVAIIGAGVSGLAAAKNLVHHNPTVFEASDSVGGVWRSCTYETTKLQSARVDYEFSDFPWPNNRDDTTFPPYLEILDYLESYAKHFDLLKFMKFGSKVIEVRFIGDGETPQMVDLGAYGNLLPGKPVWEFVVVCTGKYGDVPRIPAFPAKKGPEMFQGKVMHSMDYCKLEKEEASTLLSGKKVAVIGFKKSAIDLALESALANQGEGGKACTMVVRTTHWGIPHYWVWGLPFFLFYSSRASQFLHDRPNQSFLRTLFCLLFSLLLPLEKYGLKPNHSFEEDYASCQMAIIPENFFEEADKGMIRFKKSSKWWFYEEGIVFEDGTTLEADVVILATGYDGKKKLKAIVPEPFRTWLEFPSGVMPLYRGTIHPLIPNMGFVGYVQSSSNLHTSELRSMWLSRLVDEKFRLPSKEKMLDQFLKEMEVTRNSSRFYKRHCISTFSIQHADDMCNDMGLNPWRKSNFLLEAFSPYGSQDYRLGQEEKEDMTA

SEQ ID NO: 73570 - protein, 396 aa, Arabidopsis thaliana
  peptide (1)..(396): Ceres Seq. ID no. 4972104
  misc_feature (1)..(75): Pfam Name: Pyridine nucleotide-disulphide oxidoreductase Pfam Description: Pyridine nucleotide-disulphide oxidoreductase
  misc_feature (1)..(396): Homolog of NCBI NO: 15221981 NR Description: unknown protein; protein id: At1g19250.1
  misc_feature (37)..(396): Homolog of NCBI NO: 25513456 NR Description: T29M8.12 protein - Arabidopsis thaliana
  misc_feature (1)..(50): Homolog of NCBI NO: 25513456 NR Description: T29M8.12 protein - Arabidopsis thaliana
  misc_feature (1)..(135): Homolog of NCBI NO: 15242332 NR Description: dimethylaniline monooxygenase
  misc_feature (174)..(365): Homolog of NCBI NO: 15242332 NR Description: dimethylaniline monooxygenase
  misc_feature (129)..(385): Homolog of NCBI NO: 24960753 NR Description: Hypothetical protein [Oryza sativa (japonica
  misc_feature (1)..(44): Homolog of NCBI NO: 24960753 NR Description: Hypothetical protein [Oryza sativa (japonica
  misc_feature (37)..(234): Homolog of NCBI NO: 24960753 NR Description: Hypothetical protein [Oryza sativa (japonica
  misc_feature (38)..(384): Homolog of NCBI NO: 38344126 NR Description: OSJNBb0072N21.5 [Oryza sativa (japonica
  misc_feature (1)..(17): Homolog of NCBI NO: 38344126 NR Description: OSJNBb0072N21.5 [Oryza sativa (japonica
MKFGSKVIEVRFIGDGETPQMVDLGAYGNLLPGKPVWEFVVVCTGKYGDVPRIPAFPAKKGPEMFQGKVMHSMDYCKLEKEEASTLLSGKKVAVIGFKKSAIDLALESALANQGEGGKACTMVVRTTHWGIPHYWVWGLPFFLFYSSRASQFLHDRPNQSFLRTLFCLLFSLLLPLEKYGLKPNHSFEEDYASCQMAIIPENFFEEADKGMIRFKKSSKWWFYEEGIVFEDGTTLEADVVILATGYDGKKKLKAIVPEPFRTWLEFPSGVMPLYRGTIHPLIPNMGFVGYVQSSSNLHTSELRSMWLSRLVDEKFRLPSKEKMLDQFLKEMEVTRNSSRFYKRHCISTFSIQHADDMCNDMGLNPWRKSNFLLEAFSPYGSQDYRLGQEEKEDMTA

SEQ ID NO: 73571 - protein, 376 aa, Arabidopsis thaliana
  peptide (1)..(376): Ceres Seq. ID no. 4972105
  misc_feature (1)..(55): Pfam Name: Pyridine nucleotide-disulphide oxidoreductase Pfam Description: Pyridine nucleotide-disulphide oxidoreductase
  misc_feature (1)..(376): Homolog of NCBI NO: 15221981 NR Description: unknown protein; protein id: At1g19250.1
  misc_feature (17)..(376): Homolog of NCBI NO: 25513456 NR Description: T29M8.12 protein - Arabidopsis thaliana
  misc_feature (1)..(30): Homolog of NCBI NO: 25513456 NR Description: T29M8.12 protein - Arabidopsis thaliana
  misc_feature (1)..(115): Homolog of NCBI NO: 15242332 NR Description: dimethylaniline monooxygenase
  misc_feature (154)..(345): Homolog of NCBI NO: 15242332 NR Description: dimethylaniline monooxygenase
  misc_feature (109)..(365): Homolog of NCBI NO: 24960753 NR Description: Hypothetical protein [Oryza sativa (japonica
  misc_feature (1)..(24): Homolog of NCBI NO: 24960753 NR Description: Hypothetical protein [Oryza sativa (japonica
  misc_feature (17)..(214): Homolog of NCBI NO: 24960753 NR Description: Hypothetical protein [Oryza sativa (japonica
  misc_feature (18)..(364): Homolog of NCBI NO: 38344126 NR Description: OSJNBb0072N21.5 [Oryza sativa (japonica
  misc_feature (18)..(364): Homolog of NCBI NO: 38344124 NR Description: OSJNBb0072N21.3 [Oryza sativa (japonica
MVDLGAYGNLLPGKPVWEFVVVCTGKYGDVPRIPAFPAKKGPEMFQGKVMHSMDYCKLEKEEASTLLSGKKVAVIGFKKSAIDLALESALANQGEGGKACTMVVRTTHWGIPHYWVWGLPFFLFYSSRASQFLHDRPNQSFLRTLFCLLFSLLLPLEKYGLKPNHSFEEDYASCQMAIIPENFFEEADKGMIRFKKSSKWWFYEEGIVFEDGTTLEADVVILATGYDGKKKLKAIVPEPFRTWLEFPSGVMPLYRGTIHPLIPNMGFVGYVQSSSNLHTSELRSMWLSRLVDEKFRLPSKEKMLDQFLKEMEVTRNSSRFYKRHCISTFSIQHADDMCNDMGLNPWRKSNFLLEAFSPYGSQDYRLGQEEKEDMTA

SEQ ID NO: 73572 - DNA, 693 bp, Arabidopsis thaliana
  misc_feature (1)..(693): Ceres Seq. ID no. 4972116
  misc_feature: MA Experiment ID: 20000349 Result: Up-regulated in Transcription
  misc_feature: MA Experiment 20000349 PARAMETER Experiment Name: At_100uM_ABA_Sub_P Parameter: Age (day) Value: 14
  misc_feature: MA Experiment 20000349 PARAMETER Experiment Name: At_100uM_ABA_Sub_P Parameter: Organism Value: A. thaliana
  misc_feature: MA Experiment 20000349 PARAMETER Experiment Name: At_100uM_ABA_Sub_P Parameter: Plant Line Value: WS
  misc_feature: MA Experiment 20000349 PARAMETER Experiment Name: At_100uM_ABA_Sub_P Parameter: Timepoint (hr) Value: 6
  misc_feature: MA Experiment 20000349 PARAMETER Experiment Name: At_100uM_ABA_Sub_P Parameter: Tissue Value: Aerial
  misc_feature: MA Experiment 20000349 PARAMETER Experiment Name: At_100uM_ABA_Sub_P Parameter: Treatment Value: 100uM ABA vs. No Treatment
atggcgattttctccacatcacatcttctcttcatctccttcatcatagccacatgtacaatttctgtctccggtacaaccttcaccttaacaaaccattgcggctccacaatctggcctggaatcctcaccgcaaacggcgcacaactcggcgacggcggatttgccttagcttcaggatcttccgtaaccttcaccgtttctccaggctcaggtaaatgcggtaccggggactgcggcagcaagttaaaatgcgccggcgcaggaggagctccaccagccacactcgccgaattcacaatcggctcctccggaaagaaaaacgccgtgcaagatttttacgacgtgagcctcgtagatggttataacgttcagatgaaaatcacaccgcaaggtggctcaggggattgtaaaaccgcgggatgcgtttcggacgtgaacgcgatttgtccaaaagagctacaagttacgggcccatcgggtgttgcagcgtgtaagagtgcttgtgaggcttttaacaagccggagtattgttgcaccggcgcgtatagtacaccggcgacttgtccgcccacgaattactcgaagatatttaaacaagcttgtccgagtgcgtatagctatgcatacgatgatgcttccagtacttttacttgtactaatgctaattatgagatcagtttctgttcttag

SEQ ID NO: 73573 - protein, 230 aa, Arabidopsis thaliana
  peptide (1)..(230): Ceres Seq. ID no. 4972117
  misc_feature (70)..(230): Pfam Name: Thaumatin family Pfam Description: Thaumatin family
  misc_feature (70)..(230): Homolog of NCBI NO: 30686314 NR Description: thaumatin family [Arabidopsis thaliana]
  misc_feature (1)..(81): Homolog of NCBI NO: 30686314 NR Description: thaumatin family [Arabidopsis thaliana]
  misc_feature (71)..(230): Homolog of NCBI NO: 28973703 NR Description: putative pathogenesis-related protein 5 precursor
  misc_feature (1)..(89): Homolog of NCBI NO: 28973703 NR Description: putative pathogenesis-related protein 5 precursor
  misc_feature (1)..(229): Homolog of NCBI NO: 15222088 NR Description: thaumatin-like protein (PR-5); protein id: supported by cDNA: gi_2435405 [Arabidopsis thaliana]
  misc_feature (1)..(229): Homolog of NCBI NO: 2435406 NR Description: thaumatin-like protein [Arabidopsis thaliana]
  misc_feature (153)..(230): Homolog of NCBI NO: 15224623 NR Description: putative thaumatin-like pathogenesis-related protein id: At2g24810.1 [Arabidopsis thaliana]
  misc_feature (1)..(73): Homolog of NCBI NO: 15224623 NR Description: putative thaumatin-like pathogenesis-related protein id: At2g24810.1 [Arabidopsis thaliana]
  misc_feature (3)..(229): Homolog of NCBI NO: 15222090 NR Description: thaumatin-like protein; protein id: At1g75050.1
  misc_feature (1)..(229): Homolog of NCBI NO: 15222089 NR Description: thaumatin-like protein; protein id: At1g75040.1, by cDNA: gi_14334527, supported by cDNA: gi_1448918, supported by
MAIFSTSHLLFISFIIATCTISVSGTTFTLTNHCGSTIWPGILTANGAQLGDGGFALASGSSVTFTVSPGSGKCGTGDCGSKLKCAGAGGAPPATLAEFTIGSSGKKNAVQDFYDVSLVDGYNVQMKITPQGGSGDCKTAGCVSDVNAICPKELQVTGPSGVAACKSACEAFNKPEYCCTGAYSTPATCPPTNYSKIFKQACPSAYSYAYDDASSTFTCTNANYEISFCS

SEQ ID NO: 73574 - DNA, 1371 bp, Arabidopsis thaliana
  misc_feature (1)..(1371): Ceres Seq. ID no. 4972157
  misc_feature: MA Experiment ID: 20000437 Result: Up-regulated in Transcription
  misc_feature: MA Experiment 20000437 PARAMETER Experiment Name: At_Drought_P Parameter: Age (day) Value: 8
  misc_feature: MA Experiment 20000437 PARAMETER Experiment Name: At_Drought_P Parameter: Organism Value: A. thaliana
  misc_feature: MA Experiment 20000437 PARAMETER Experiment Name: At_Drought_P Parameter: Plant Line Value: WS
  misc_feature: MA Experiment 20000437 PARAMETER Experiment Name: At_Drought_P Parameter: Timepoint (hr) Value: 24
  misc_feature: MA Experiment 20000437 PARAMETER Experiment Name: At_Drought_P Parameter: Tissue Value: Whole Plant
  misc_feature: MA Experiment 20000437 PARAMETER Experiment Name: At_Drought_P Parameter: Treatment Value: Drought vs. No Drought
  misc_feature: MA Experiment ID: 20000439 Result: Up-regulated in Transcription
  misc_feature: MA Experiment 20000439 PARAMETER Experiment Name: At_Roots__P Parameter: Age (day) Value: 14 vs. 21
  misc_feature: MA Experiment 20000439 PARAMETER Experiment Name: At_Roots__P Parameter: Organism Value: A. thaliana
  misc_feature: MA Experiment 20000439 PARAMETER Experiment Name: At_Roots__P Parameter: Tissue Value: Roots vs. Whole Plant
  misc_feature: MA Experiment ID: 20001451 Result: Down-regulated in Transcription
  misc_feature: MA Experiment 20001451 PARAMETER Experiment Name: At_Far-red-induction_P Parameter: Age (day) Value: 7
  misc_feature: MA Experiment 20001451 PARAMETER Experiment Name: At_Far-red-induction_P Parameter: Light Value: Far-red vs. White
  misc_feature: MA Experiment 20001451 PARAMETER Experiment Name: At_Far-red-induction_P Parameter: Organism Value: A. thaliana
  misc_feature: MA Experiment 20001451 PARAMETER Experiment Name: At_Far-red-induction_P Parameter: Plant Line Value: Columbia
  misc_feature: MA Experiment 20001451 PARAMETER Experiment Name: At_Far-red-induction_P Parameter: Timepoint (hr) Value: 24
  misc_feature: MA Experiment 20001451 PARAMETER Experiment Name: At_Far-red-induction_P Parameter: Tissue Value: Whole Plant
  misc_feature: MA Experiment ID: 20001558 Result: Up-regulated in Transcription
  misc_feature: MA Experiment 20001558 PARAMETER Experiment Name: At_Drought_Soil_Dry_P Parameter: Age (day) Value: 27
  misc_feature: MA Experiment 20001558 PARAMETER Experiment Name: At_Drought_Soil_Dry_P Parameter: Organism Value: A. thaliana
  misc_feature: MA Experiment 20001558 PARAMETER Experiment Name: At_Drought_Soil_Dry_P Parameter: Plant Line Value: WS
  misc_feature: MA Experiment 20001558 PARAMETER Experiment Name: At_Drought_Soil_Dry_P Parameter: Post Timepoint (hr) Value: 6
  misc_feature: MA Experiment 20001558 PARAMETER Experiment Name: At_Drought_Soil_Dry_P Parameter: Post-Treatment Value: Re-Water vs. No Drought
  misc_feature: MA Experiment 20001558 PARAMETER Experiment Name: At_Drought_Soil_Dry_P Parameter: Timepoint (day) Value: 13
  misc_feature: MA Experiment 20001558 PARAMETER Experiment Name: At_Drought_Soil_Dry_P Parameter: Treatment Value: Drought vs. No Drought
atggggctggttgtggaatcatgtgggcctcgttttaggaaaatatggcttgagatggtccatcgaactctggaaagagcaggtcctgcttttatcaaatggggtcaatgggcagccacgcgacctgatctattccccaaggatttgtgttcacagctctcaaagcttcacagtaatgctcctgagcatagcttcgcctacactaagaaaactatcgagaaggcatttggtcgtaaactttctgagatatttgaggagtttgatgaggtgccagtggcatctgggagtattgcccaagtacatagagcttctttaaggtttcagtatccaggacaaaagtccaagtcttcgctggttgcggttaaagttagacatccgggtgttggtgaatcgattaggagagattttgtgataattaatttggtggcaaagatatcgactttaattccagctttgaaatggttgagattggacgagagtgtgcaacagtttggtgtcttcatgttgtctcaagttgatctcgcgagggaagcttcacatttgagtcggttcatatataacttccgtagatggaaggatgtctctttccctaaacctgtgtatcctcttgtacatcctgctgttttggtggagacatatgagcatggagaaagtgtggcacgttatgttgatggaatggaaggacatgaatggattaagactagattggctcacatcgggacccatgccctcttgaagatgctcttggttgataactttattcacgctgacatgcatccgggaaatatccttgtccggaaaaaggcttcccgtggaggccttttcaaaacgaagaagcctcacattgttttccttgatgtgggaatgactgcagaacttgcaaagaatgaccgagagaacttacttgactttttcaaggcggttgcgcgtagagatggccggactgctgctgaacgaacacttaaattatcaagaaagcagaattgtcccaatccagaggcttttatcgaggaagtagaggaagcattcaaattctggggaacccctgagggagatttagtacatccagcagattgtatgcacgaattacttgagaaagtaagacgtcatagagtaaatattgatgggaatgtgtgcactgttatggtgacaacattagttctcgagaaagctaagcttattatagaaccagagcttaaagctgtagccattaaaactgtttttagcttagagaatggtttctatagccttggttggcaacggaaacttgacccaggatatgatgtgatgcacacgttgcaaacaatggtgttgaaaaccgactgggctaagtctctttcttatacggtggatggtctgatggcgccgtag

SEQ ID NO: 73575 - protein, 456 aa, Arabidopsis thaliana
  peptide (1)..(456): Ceres Seq. ID no. 4972158
  misc_feature (74)..(200): Pfam Name: ABC1 family Pfam Description: ABC1 family
  misc_feature (1)..(397): Homolog of NCBI NO: 30682208 NR Description: hypethetical 62.8 KD protein in SSE1-CAR1
  misc_feature (418)..(456): Homolog of NCBI NO: 30682208 NR Description: hypethetical 62.8 KD protein in SSE1-CAR1
  misc_feature (1)..(397): Homolog of NCBI NO: 25404331 NR Description: hypothetical protein T25B24.1 [imported] - thaliana >gi|4585871|gb|AAD25544.1|AC005850_1 Unknown protein
  misc_feature (1)..(397): Homolog of NCBI NO: 30696591 NR Description: expressed protein [Arabidopsis thaliana] unknown protein [Arabidopsis thaliana]
  misc_feature (418)..(456): Homolog of NCBI NO: 25404331 NR Description: hypothetical protein T25B24.1 [imported] - thaliana >gi|4585871|gb|AAD25544.1|AC005850_1 Unknown protein
  misc_feature (418)..(456): Homolog of NCBI NO: 30696591 NR Description: expressed protein [Arabidopsis thaliana] unknown protein [Arabidopsis thaliana]
  misc_feature (1)..(417): Homolog of NCBI NO: 19387282 NR Description: putative 62.8 kDa protein [Oryza sativa (japonica
  misc_feature (418)..(456): Homolog of NCBI NO: 19387282 NR Description: putative 62.8 kDa protein [Oryza sativa (japonica
  misc_feature (1)..(417): Homolog of NCBI NO: 32488318 NR Description: OSJNBa0015K02.12 [Oryza sativa (japonica
  misc_feature (418)..(456): Homolog of NCBI NO: 32488318 NR Description: OSJNBa0015K02.12 [Oryza sativa (japonica
MGLVVESCGPRFRKIWLEMVHRTLERAGPAFIKWGQWAATRPDLFPKDLCSQLSKLHSNAPEHSFAYTKKTIEKAFGRKLSEIFEEFDEVPVASGSIAQVHRASLRFQYPGQKSKSSLVAVKVRHPGVGESIRRDFVIINLVAKISTLIPALKWLRLDESVQQFGVFMLSQVDLAREASHLSRFIYNFRRWKDVSFPKPVYPLVHPAVLVETYEHGESVARYVDGMEGHEWIKTRLAHIGTHALLKMLLVDNFIHADMHPGNILVRKKASRGGLFKTKKPHIVFLDVGMTAELAKNDRENLLDFFKAVARRDGRTAAERTLKLSRKQNCPNPEAFIEEVEEAFKFWGTPEGDLVHPADCMHELLEKVRRHRVNIDGNVCTVMVTTLVLEKAKLIIEPELKAVAIKTVFSLENGFYSLGWQRKLDPGYDVMHTLQTMVLKTDWAKSLSYTVDGLMAP

SEQ ID NO: 73576 - protein, 438 aa, Arabidopsis thaliana
  peptide (1)..(438): Ceres Seq. ID no. 4972159
  misc_feature (56)..(182): Pfam Name: ABC1 family Pfam Description: ABC1 family
  misc_feature (1)..(379): Homolog of NCBI NO: 30682208 NR Description: hypethetical 62.8 KD protein in SSE1-CAR1
  misc_feature (400)..(438): Homolog of NCBI NO: 30682208 NR Description: hypethetical 62.8 KD protein in SSE1-CAR1
  misc_feature (1)..(379): Homolog of NCBI NO: 25404331 NR Description: hypothetical protein T25B24.1 [imported] - thaliana >gi|4585871|gb|AAD25544.1|AC005850_1 Unknown protein
  misc_feature (1)..(379): Homolog of NCBI NO: 30696591 NR Description: expressed protein [Arabidopsis thaliana] unknown protein [Arabidopsis thaliana]
  misc_feature (400)..(438): Homolog of NCBI NO: 25404331 NR Description: hypothetical protein T25B24.1 [imported] - thaliana >gi|4585871|gb|AAD25544.1|AC005850_1 Unknown protein
  misc_feature (400)..(438): Homolog of NCBI NO: 30696591 NR Description: expressed protein [Arabidopsis thaliana] unknown protein [Arabidopsis thaliana]
  misc_feature (1)..(399): Homolog of NCBI NO: 19387282 NR Description: putative 62.8 kDa protein [Oryza sativa (japonica
  misc_feature (400)..(438): Homolog of NCBI NO: 19387282 NR Description: putative 62.8 kDa protein [Oryza sativa (japonica
  misc_feature (1)..(399): Homolog of NCBI NO: 32488318 NR Description: OSJNBa0015K02.12 [Oryza sativa (japonica
  misc_feature (400)..(438): Homolog of NCBI NO: 32488318 NR Description: OSJNBa0015K02.12 [Oryza sativa (japonica
MVHRTLERAGPAFIKWGQWAATRPDLFPKDLCSQLSKLHSNAPEHSFAYTKKTIEKAFGRKLSEIFEEFDEVPVASGSIAQVHRASLRFQYPGQKSKSSLVAVKVRHPGVGESIRRDFVIINLVAKISTLIPALKWLRLDESVQQFGVFMLSQVDLAREASHLSRFIYNFRRWKDVSFPKPVYPLVHPAVLVETYEHGESVARYVDGMEGHEWIKTRLAHIGTHALLKMLLVDNFIHADMHPGNILVRKKASRGGLFKTKKPHIVFLDVGMTAELAKNDRENLLDFFKAVARRDGRTAAERTLKLSRKQNCPNPEAFIEEVEEAFKFWGTPEGDLVHPADCMHELLEKVRRHRVNIDGNVCTVMVTTLVLEKAKLIIEPELKAVAIKTVFSLENGFYSLGWQRKLDPGYDVMHTLQTMVLKTDWAKSLSYTVDGLMAP

SEQ ID NO: 73577 - protein, 289 aa, Arabidopsis thaliana
  peptide (1)..(289): Ceres Seq. ID no. 4972160
  misc_feature (1)..(230): Homolog of NCBI NO: 30682208 NR Description: hypethetical 62.8 KD protein in SSE1-CAR1
  misc_feature (251)..(289): Homolog of NCBI NO: 30682208 NR Description: hypethetical 62.8 KD protein in SSE1-CAR1
  misc_feature (1)..(230): Homolog of NCBI NO: 25404331 NR Description: hypothetical protein T25B24.1 [imported] - thaliana >gi|4585871|gb|AAD25544.1|AC005850_1 Unknown protein
  misc_feature (1)..(230): Homolog of NCBI NO: 30696591 NR Description: expressed protein [Arabidopsis thaliana] unknown protein [Arabidopsis thaliana]
  misc_feature (251)..(289): Homolog of NCBI NO: 25404331 NR Description: hypothetical protein T25B24.1 [imported] - thaliana >gi|4585871|gb|AAD25544.1|AC005850_1 Unknown protein
  misc_feature (251)..(289): Homolog of NCBI NO: 30696591 NR Description: expressed protein [Arabidopsis thaliana] unknown protein [Arabidopsis thaliana]
  misc_feature (1)..(250): Homolog of NCBI NO: 19387282 NR Description: putative 62.8 kDa protein [Oryza sativa (japonica
  misc_feature (251)..(289): Homolog of NCBI NO: 19387282 NR Description: putative 62.8 kDa protein [Oryza sativa (japonica
  misc_feature (1)..(250): Homolog of NCBI NO: 32488318 NR Description: OSJNBa0015K02.12 [Oryza sativa (japonica
  misc_feature (251)..(289): Homolog of NCBI NO: 32488318 NR Description: OSJNBa0015K02.12 [Oryza sativa (japonica
MLSQVDLAREASHLSRFIYNFRRWKDVSFPKPVYPLVHPAVLVETYEHGESVARYVDGMEGHEWIKTRLAHIGTHALLKMLLVDNFIHADMHPGNILVRKKASRGGLFKTKKPHIVFLDVGMTAELAKNDRENLLDFFKAVARRDGRTAAERTLKLSRKQNCPNPEAFIEEVEEAFKFWGTPEGDLVHPADCMHELLEKVRRHRVNIDGNVCTVMVTTLVLEKAKLIIEPELKAVAIKTVFSLENGFYSLGWQRKLDPGYDVMHTLQTMVLKTDWAKSLSYTVDGLMAP

SEQ ID NO: 73578 - DNA, 2523 bp, Arabidopsis thaliana
  misc_feature (1)..(2523): Ceres Seq. ID no. 4972161
  misc_feature: MA Experiment ID: 20000314 Result: Down-regulated in Transcription
  misc_feature: MA Experiment 20000314 PARAMETER Experiment Name: At_14day_Shoots-Roots_Sub_P Parameter: Age (day) Value: 14
  misc_feature: MA Experiment 20000314 PARAMETER Experiment Name: At_14day_Shoots-Roots_Sub_P Parameter: Organism Value: A. thaliana
  misc_feature: MA Experiment 20000314 PARAMETER Experiment Name: At_14day_Shoots-Roots_Sub_P Parameter: Plant Line Value: WS
  misc_feature: MA Experiment 20000314 PARAMETER Experiment Name: At_14day_Shoots-Roots_Sub_P Parameter: Tissue Value: Roots vs. Whole Plant
  misc_feature: MA Experiment ID: 20000355 Result: Up-regulated in Transcription
  misc_feature: MA Experiment 20000355 PARAMETER Experiment Name: At_Siliques_Sub_P Parameter: Age (day) Value: 21
  misc_feature: MA Experiment 20000355 PARAMETER Experiment Name: At_Siliques_Sub_P Parameter: Organism Value: A. thaliana
  misc_feature: MA Experiment 20000355 PARAMETER Experiment Name: At_Siliques_Sub_P Parameter: Plant Line Value: WS
  misc_feature: MA Experiment 20000355 PARAMETER Experiment Name: At_Siliques_Sub_P Parameter: Tissue Value: Less Than 5mm Siliques vs. Whole Plant
  misc_feature: MA Experiment ID: 20000440 Result: Up-regulated in Transcription
  misc_feature: MA Experiment 20000440 PARAMETER Experiment Name: At_Closed-Flower__Sub_P Parameter: Tissue Value: Closed Flower vs. Whole Plant
atgaagttcttctttatctttttcattttcttgttctccttcttgattcaatcttgttactctgacaacacaatcttgagaagtcagtctttgaaagatggtgatgttatatactctgaaggaaagagatttgcttttggattcttcagcttggggaattcaaagctcaggtatgttgggatttggtatgctcaagtctctgagcagactattgtatgggttgcaaatagagatcatcctattaatgacacatctggtctgataaagttcagtaccagagggaatctttgtgtgtatgcatctggcaatggaacagagcctatttggtctactgatgttattgatatgatccaagaacctgctttagttgcgaagctatctgatttaggcaaccttgttctacttgatcctgtcacagggaaaagtttctgggagagctttaatcatcctacaaacactttgcttccctttatgaagtttggattcactcgtcaaagcggtgtggatcgtattatgacgtcttggagatctcctggtgacccgggttctggaaacattacataccggatagaacgtagagggtttccgcagatgatgatgtacaagggtctgactctttggtggcgtactgggtcatggacagggcaaagatggagtggtgtgcctgaaatgacaaacaagtttatcttcaatatctcgtttgtgaataatccagatgaagtatcaatcacttatggagtgttagatgcttcggttacaacaagaatggtgctaaacgagacaggaactctgcaacggtttcgctggaacgggagagataagaaatggatcgggttctggtcagctcccgaagataagtgtgacatctacaaccactgtggctttaacggttactgtgattccaccagtacagagaagtttgagtgctcttgcttaccggggtacgagcctaagacacctcgagattggttcttgagagatgcttcggatgggtgcacgaggataaaagcagattcgatatgtaatgggaaagaagggtttgcaaagttgaagcgagtgaagattcccaatacatcagctgttaatgtggatatgaacataacactgaaggaatgtgaacagaggtgcttgaagaactgctcatgtgttgcttatgcgagtgcttaccacgagagtcaagatggagctaaagggtgcttgacatggcacggcaatatgttggatactaggacatacttgagctcaggacaggatttctatttacgcgtagataagtcagacgcggtggaatggaaatggcgcatcggggaagaagagacttgttttaattctcatcagtttgattgcagtcgtgatgttactactgatcagttttcactgttatttaaggaagcgaagacaacgaacacgcttagaaaagctccatcaagcttcgctccgagctcttttgatcttgaagactcattcatacttgaagagcttgaggacaaatcaagaagccgggagttgcctctctttgagcttagcacgattgctacagcaacgaataattttgcttttcaaaacaagcttggagcaggtggttttggacctgtttataaaggtgtgttacaaaatggtatggaaatagcagtgaagaggttgtcaaaaagctcaggtcaaggaatggaagagttcaagaacgaggtcaagttgatatcgaagctgcagcatcgaaatctcgtgaggatcttaggatgttgtgttgaatttgaagagaagatgttggtatacgagtatttaccaaacaagagcctagactatttcatattccatgaagagcaaagagcagagttggattggccaaaaagaatggggataatccgcgggattggtcgtggaatcttataccttcatcaagattcaaggctgaggatcatccacagagaccttaaggccagcaatgtacttcttgacaatgaaatgataccgaagattgcggatttcggcctggctagaatcttcggaggcaaccaaatcgaaggaagcacaaatcgagtcgtcggaacatatggatacatgtcaccagagtatgcaatggacggccagttctctattaaatccgatgtatacagctttggagtattgatcttagagatcataaccggaaagagaaacagtgctttttatgaggaatctttgaatctagtcaaacatatttgggatcgatgggaaaatggtgaagctatagagatcatagacaaattaatgggtgaagagacgtatgatgagggcgaagtaatgaagtgcttacacattgggttactttgcgtgcaagaaaactcttcagacagaccagacatgtcctctgttgtcttcatgttaggtcataacgccattgatcttccatctccgaagcatcctgcatttacggcgggaaggaggagaaacaccaaaactggcggcagctcagataattggcccagcggagaaaccagcagtactattaacgacgttactctcaccgatgttcaaggtcgttaa

SEQ ID NO: 73579 - protein, 840 aa, Arabidopsis thaliana
  peptide (1)..(840): Ceres Seq. ID no. 4972162
  misc_feature (68)..(182): Pfam Name: D-mannose binding lectin Pfam Description: D-mannose binding lectin
  misc_feature (1)..(571): Homolog of NCBI NO: 25287699 NR Description: receptor-like protein kinase [imported] -
  misc_feature (605)..(840): Homolog of NCBI NO: 25287699 NR Description: receptor-like protein kinase [imported] -
  misc_feature (3)..(432): Homolog of NCBI NO: 7434408 NR Description: S-receptor kinase (EC 2.7.1.-) 1 - turnip
  misc_feature (495)..(840): Homolog of NCBI NO: 7434408 NR Description: S-receptor kinase (EC 2.7.1.-) 1 - turnip
  misc_feature (3)..(840): Homolog of NCBI NO: 913140 NR Description: ARK2 product/receptor-like serine/threonine
  misc_feature (1)..(524): Homolog of NCBI NO: 6554177 NR Description: T23J18.1 [Arabidopsis thaliana]
  misc_feature (4)..(840): Homolog of NCBI NO: 15218805 NR Description: receptor kinase, putative; protein id:
  misc_feature (4)..(840): Homolog of NCBI NO: 6686398 NR Description: F1E22.15 [Arabidopsis thaliana]
  misc_feature (28)..(840): Homolog of NCBI NO: 6686398 NR Description: F1E22.15 [Arabidopsis thaliana]
  misc_feature (4)..(427): Homolog of NCBI NO: 30314606 NR Description: S receptor kinase [Brassica rapa]
MKFFFIFFIFLFSFLIQSCYSDNTILRSQSLKDGDVIYSEGKRFAFGFFSLGNSKLRYVGIWYAQVSEQTIVWVANRDHPINDTSGLIKFSTRGNLCVYASGNGTEPIWSTDVIDMIQEPALVAKLSDLGNLVLLDPVTGKSFWESFNHPTNTLLPFMKFGFTRQSGVDRIMTSWRSPGDPGSGNITYRIERRGFPQMMMYKGLTLWWRTGSWTGQRWSGVPEMTNKFIFNISFVNNPDEVSITYGVLDASVTTRMVLNETGTLQRFRWNGRDKKWIGFWSAPEDKCDIYNHCGFNGYCDSTSTEKFECSCLPGYEPKTPRDWFLRDASDGCTRIKADSICNGKEGFAKLKRVKIPNTSAVNVDMNITLKECEQRCLKNCSCVAYASAYHESQDGAKGCLTWHGNMLDTRTYLSSGQDFYLRVDKSDAVEWKWRIGEEETCFNSHQFDCSRDVTTDQFSLLFKEAKTTNTLRKAPSSFAPSSFDLEDSFILEELEDKSRSRELPLFELSTIATATNNFAFQNKLGAGGFGPVYKGVLQNGMEIAVKRLSKSSGQGMEEFKNEVKLISKLQHRNLVRILGCCVEFEEKMLVYEYLPNKSLDYFIFHEEQRAELDWPKRMGIIRGIGRGILYLHQDSRLRIIHRDLKASNVLLDNEMIPKIADFGLARIFGGNQIEGSTNRVVGTYGYMSPEYAMDGQFSIKSDVYSFGVLILEIITGKRNSAFYEESLNLVKHIWDRWENGEAIEIIDKLMGEETYDEGEVMKCLHIGLLCVQENSSDRPDMSSVVFMLGHNAIDLPSPKHPAFTAGRRRNTKTGGSSDNWPSGETSSTINDVTLTDVQGR

SEQ ID NO: 73580 - protein, 725 aa, Arabidopsis thaliana
  peptide (1)..(725): Ceres Seq. ID no. 4972163
  misc_feature (1)..(67): Pfam Name: D-mannose binding lectin Pfam Description: D-mannose binding lectin
  misc_feature (1)..(456): Homolog of NCBI NO: 25287699 NR Description: receptor-like protein kinase [imported] -
  misc_feature (490)..(725): Homolog of NCBI NO: 25287699 NR Description: receptor-like protein kinase [imported] -
  misc_feature (1)..(317): Homolog of NCBI NO: 7434408 NR Description: S-receptor kinase (EC 2.7.1.-) 1 - turnip
  misc_feature (380)..(725): Homolog of NCBI NO: 7434408 NR Description: S-receptor kinase (EC 2.7.1.-) 1 - turnip
  misc_feature (1)..(725): Homolog of NCBI NO: 913140 NR Description: ARK2 product/receptor-like serine/threonine
  misc_feature (1)..(409): Homolog of NCBI NO: 6554177 NR Description: T23J18.1 [Arabidopsis thaliana]
  misc_feature (1)..(725): Homolog of NCBI NO: 15218805 NR Description: receptor kinase, putative; protein id:
  misc_feature (1)..(725): Homolog of NCBI NO: 6686398 NR Description: F1E22.15 [Arabidopsis thaliana]
  misc_feature (1)..(725): Homolog of NCBI NO: 6686398 NR Description: F1E22.15 [Arabidopsis thaliana]
  misc_feature (1)..(312): Homolog of NCBI NO: 30314606 NR Description: S receptor kinase [Brassica rapa]
MIQEPALVAKLSDLGNLVLLDPVTGKSFWESFNHPTNTLLPFMKFGFTRQSGVDRIMTSWRSPGDPGSGNITYRIERRGFPQMMMYKGLTLWWRTGSWTGQRWSGVPEMTNKFIFNISFVNNPDEVSITYGVLDASVTTRMVLNETGTLQRFRWNGRDKKWIGFWSAPEDKCDIYNHCGFNGYCDSTSTEKFECSCLPGYEPKTPRDWFLRDASDGCTRIKADSICNGKEGFAKLKRVKIPNTSAVNVDMNITLKECEQRCLKNCSCVAYASAYHESQDGAKGCLTWHGNMLDTRTYLSSGQDFYLRVDKSDAVEWKWRIGEEETCFNSHQFDCSRDVTTDQFSLLFKEAKTTNTLRKAPSSFAPSSFDLEDSFILEELEDKSRSRELPLFELSTIATATNNFAFQNKLGAGGFGPVYKGVLQNGMEIAVKRLSKSSGQGMEEFKNEVKLISKLQHRNLVRILGCCVEFEEKMLVYEYLPNKSLDYFIFHEEQRAELDWPKRMGIIRGIGRGILYLHQDSRLRIIHRDLKASNVLLDNEMIPKIADFGLARIFGGNQIEGSTNRVVGTYGYMSPEYAMDGQFSIKSDVYSFGVLILEIITGKRNSAFYEESLNLVKHIWDRWENGEAIEIIDKLMGEETYDEGEVMKCLHIGLLCVQENSSDRPDMSSVVFMLGHNAIDLPSPKHPAFTAGRRRNTKTGGSSDNWPSGETSSTINDVTLTDVQGR

SEQ ID NO: 73581 - protein, 683 aa, Arabidopsis thaliana
  peptide (1)..(683): Ceres Seq. ID no. 4972164
  misc_feature (1)..(414): Homolog of NCBI NO: 25287699 NR Description: receptor-like protein kinase [imported] -
  misc_feature (448)..(683): Homolog of NCBI NO: 25287699 NR Description: receptor-like protein kinase [imported] -
  misc_feature (1)..(275): Homolog of NCBI NO: 7434408 NR Description: S-receptor kinase (EC 2.7.1.-) 1 - turnip
  misc_feature (338)..(683): Homolog of NCBI NO: 7434408 NR Description: S-receptor kinase (EC 2.7.1.-) 1 - turnip
  misc_feature (1)..(683): Homolog of NCBI NO: 913140 NR Description: ARK2 product/receptor-like serine/threonine
  misc_feature (1)..(367): Homolog of NCBI NO: 6554177 NR Description: T23J18.1 [Arabidopsis thaliana]
  misc_feature (1)..(683): Homolog of NCBI NO: 15218805 NR Description: receptor kinase, putative; protein id:
  misc_feature (1)..(683): Homolog of NCBI NO: 6686398 NR Description: F1E22.15 [Arabidopsis thaliana]
  misc_feature (1)..(683): Homolog of NCBI NO: 6686398 NR Description: F1E22.15 [Arabidopsis thaliana]
  misc_feature (1)..(270): Homolog of NCBI NO: 30314606 NR Description: S receptor kinase [Brassica rapa]
MKFGFTRQSGVDRIMTSWRSPGDPGSGNITYRIERRGFPQMMMYKGLTLWWRTGSWTGQRWSGVPEMTNKFIFNISFVNNPDEVSITYGVLDASVTTRMVLNETGTLQRFRWNGRDKKWIGFWSAPEDKCDIYNHCGFNGYCDSTSTEKFECSCLPGYEPKTPRDWFLRDASDGCTRIKADSICNGKEGFAKLKRVKIPNTSAVNVDMNITLKECEQRCLKNCSCVAYASAYHESQDGAKGCLTWHGNMLDTRTYLSSGQDFYLRVDKSDAVEWKWRIGEEETCFNSHQFDCSRDVTTDQFSLLFKEAKTTNTLRKAPSSFAPSSFDLEDSFILEELEDKSRSRELPLFELSTIATATNNFAFQNKLGAGGFGPVYKGVLQNGMEIAVKRLSKSSGQGMEEFKNEVKLISKLQHRNLVRILGCCVEFEEKMLVYEYLPNKSLDYFIFHEEQRAELDWPKRMGIIRGIGRGILYLHQDSRLRIIHRDLKASNVLLDNEMIPKIADFGLARIFGGNQIEGSTNRVVGTYGYMSPEYAMDGQFSIKSDVYSFGVLILEIITGKRNSAFYEESLNLVKHIWDRWENGEAIEIIDKLMGEETYDEGEVMKCLHIGLLCVQENSSDRPDMSSVVFMLGHNAIDLPSPKHPAFTAGRRRNTKTGGSSDNWPSGETSSTINDVTLTDVQGR

SEQ ID NO: 73582 - DNA, 1704 bp, Arabidopsis thaliana
  misc_feature (1)..(1704): Ceres Seq. ID no. 4972268
  misc_feature: MA Experiment ID: 20000307 Result: Up-regulated in Transcription
  misc_feature: MA Experiment 20000307 PARAMETER Experiment Name: At_Germinating_Seeds_Sub_P Parameter: Age (hr) Value: 24 vs. 0
  misc_feature: MA Experiment 20000307 PARAMETER Experiment Name: At_Germinating_Seeds_Sub_P Parameter: Organism Value: A. thaliana
  misc_feature: MA Experiment 20000307 PARAMETER Experiment Name: At_Germinating_Seeds_Sub_P Parameter: Plant Line Value: WS
  misc_feature: MA Experiment 20000307 PARAMETER Experiment Name: At_Germinating_Seeds_Sub_P Parameter: Tissue Value: Germinating Seeds
  misc_feature: MA Experiment ID: 20000315 Result: Down-regulated in Transcription
  misc_feature: MA Experiment 20000315 PARAMETER Experiment Name: At_14day_Shoots-Roots_Sub_P Parameter: Age (day) Value: 14
  misc_feature: MA Experiment 20000315 PARAMETER Experiment Name: At_14day_Shoots-Roots_Sub_P Parameter: Organism Value: A. thaliana
  misc_feature: MA Experiment 20000315 PARAMETER Experiment Name: At_14day_Shoots-Roots_Sub_P Parameter: Plant Line Value: WS
  misc_feature: MA Experiment 20000315 PARAMETER Experiment Name: At_14day_Shoots-Roots_Sub_P Parameter: Tissue Value: Shoots vs. Whole Plant
  misc_feature: MA Experiment ID: 20000328 Result: Down-regulated in Transcription
  misc_feature: MA Experiment 20000328 PARAMETER Experiment Name: At_42deg_Heat_Sub_P Parameter: Age (day) Value: 14
  misc_feature: MA Experiment 20000328 PARAMETER Experiment Name: At_42deg_Heat_Sub_P Parameter: Organism Value: A. thaliana
  misc_feature: MA Experiment 20000328 PARAMETER Experiment Name: At_42deg_Heat_Sub_P Parameter: Plant Line Value: WS
  misc_feature: MA Experiment 20000328 PARAMETER Experiment Name: At_42deg_Heat_Sub_P Parameter: Temperature (deg C) Value: 42 vs. 22
  misc_feature: MA Experiment 20000328 PARAMETER Experiment Name: At_42deg_Heat_Sub_P Parameter: Timepoint (hr) Value: 6
  misc_feature: MA Experiment 20000328 PARAMETER Experiment Name: At_42deg_Heat_Sub_P Parameter: Tissue Value: Aerial
  misc_feature: MA Experiment ID: 20000355 Result: Down-regulated in Transcription
  misc_feature: MA Experiment 20000355 PARAMETER Experiment Name: At_Siliques_Sub_P Parameter: Age (day) Value: 21
  misc_feature: MA Experiment 20000355 PARAMETER Experiment Name: At_Siliques_Sub_P Parameter: Organism Value: A. thaliana
  misc_feature: MA Experiment 20000355 PARAMETER Experiment Name: At_Siliques_Sub_P Parameter: Plant Line Value: WS
  misc_feature: MA Experiment 20000355 PARAMETER Experiment Name: At_Siliques_Sub_P Parameter: Tissue Value: Less Than 5mm Siliques vs. Whole Plant
  misc_feature: MA Experiment ID: 20000440 Result: Down-regulated in Transcription
  misc_feature: MA Experiment 20000440 PARAMETER Experiment Name: At_Closed-Flower__Sub_P Parameter: Tissue Value: Closed Flower vs. Whole Plant
atgggtaattgtatcgcctgcgtcaagtttgacccagacaactcaaaaccaaaccagaagaagaaacctccacggggacggcaacgaaacccatacgacgatcccgatggtttaagaactcacgcaccgttacgtgtgattcctatgagccatcaatctcagatcagcgacaagtacatcttaggacgagaactcggtcgcggcgaattcggaatcacgtatctttgtacagatagagagactcgtgaagctttagcttgcaaatcaatctccaagagaaagctccgaaccgccgtcgatgtggaagacgtccgtcgtgaagtcacgatcatgtcaactttaccggaacacccaaacgttgtgaaacttaaagcgacttatgaggataacgagaacgtgcatcttgtgatggagctttgtgaaggaggtgagctttttgatcggattgttgccagaggacattatacagagcgtgcggcggctaccgtcgcgagaacgatcgcggaggttgtgaggatgtgtcatgtcaatggtgttatgcatagagatttgaagcctgagaatttcttgtttgctaacaagaaggagaattctgcacttaaggctattgattttggtttatctgttctctttaaacctggagagaggtttacagagattgttggaagtccttattatatggctccagaagtgttgaagagaaattatggaccagaggttgatgtgtggagtgctggagttatcctctacatcttgctttgtggtgttcctccgttttgggcagagactgaacaaggtgtggctcttgccatcttgaggggagttcttgattttaagagagatccttggtcgcagatatcagagagcgcaaagagccttgtgaagcagatgttggaacctgattcaactaagcgtttgactgctcagcaagttcttggtaataatgctgttcttgtgtcacttatggagaaaatggcatttaaagtgaaaacggtttctgtttccttctttgcagatcacccttggatacagaatgcaaagaaagctccaaatgttcctttaggggatattgttaggtcaaggttgaagcaattctccatgatgaatagattgaaaaagaaagctctgcgtgttatcgccgaacacttgtctattcaagaagttgaagtgatcagaaacatgtttacgctgatggatgatgacaacgacggtaaaatatcatatctagaactcagagctggactccggaaagtcggttcacaactgggtgaaccagagatcaaattgttaatggaagtggcggatgttaatggaaatggatgcttggactatggagagtttgtagcagtgataattcacttgcagaagatggagaatgatgagcatttcagacaagcttttatgttctttgacaaagatggaagtggatacatcgaatcagaagaactacgtgaagctttaaccgacgagttaggtgaaccagacaacagtgttataatcgatataatgcgtgaagtcgacactgacaaggacggaaaaataaactatgatgagtttgtggtgatgatgaaagctggaactgattggagaaaggcatcaagacaatactcaagagagaggtttaaaagcttaagcttaaacttgatgaaagacgggtcaatgcatctacacgacgcactcactggacaatctattgcagtttga

SEQ ID NO: 73583 - protein, 567 aa, Arabidopsis thaliana
  peptide (1)..(567): Ceres Seq. ID no. 4972269
  misc_feature (59)..(312): Pfam Name: Protein kinase domain Pfam Description: Protein kinase domain
  misc_feature (1)..(314): Homolog of NCBI NO: 25287677 NR Description: calcium-dependent protein kinase 1 [imported] -
  misc_feature (340)..(567): Homolog of NCBI NO: 25287677 NR Description: calcium-dependent protein kinase 1 [imported] -
  misc_feature (1)..(314): Homolog of NCBI NO: 28416563 NR Description: At1g18890 [Arabidopsis thaliana]
  misc_feature (340)..(567): Homolog of NCBI NO: 28416563 NR Description: At1g18890 [Arabidopsis thaliana]
  misc_feature (49)..(314): Homolog of NCBI NO: 18394667 NR Description: calcium-dependent protein kinase, putative; id: At1g18890.1, supported by cDNA: gi_1235716 [Arabidopsis
  misc_feature (340)..(567): Homolog of NCBI NO: 18394667 NR Description: calcium-dependent protein kinase, putative; id: At1g18890.1, supported by cDNA: gi_1235716 [Arabidopsis
  misc_feature (49)..(314): Homolog of NCBI NO: 1084334 NR Description: calcium-dependent protein kinase (EC 2.7.1.-) 1 -
  misc_feature (340)..(567): Homolog of NCBI NO: 1084334 NR Description: calcium-dependent protein kinase (EC 2.7.1.-) 1 -
  misc_feature (34)..(312): Homolog of NCBI NO: 22331739 NR Description: calcium-dependent protein kinase; protein id:
  misc_feature (339)..(556): Homolog of NCBI NO: 22331739 NR Description: calcium-dependent protein kinase; protein id:
MGNCIACVKFDPDNSKPNQKKKPPRGRQRNPYDDPDGLRTHAPLRVIPMSHQSQISDKYILGRELGRGEFGITYLCTDRETREALACKSISKRKLRTAVDVEDVRREVTIMSTLPEHPNVVKLKATYEDNENVHLVMELCEGGELFDRIVARGHYTERAAATVARTIAEVVRMCHVNGVMHRDLKPENFLFANKKENSALKAIDFGLSVLFKPGERFTEIVGSPYYMAPEVLKRNYGPEVDVWSAGVILYILLCGVPPFWAETEQGVALAILRGVLDFKRDPWSQISESAKSLVKQMLEPDSTKRLTAQQVLGNNAVLVSLMEKMAFKVKTVSVSFFADHPWIQNAKKAPNVPLGDIVRSRLKQFSMMNRLKKKALRVIAEHLSIQEVEVIRNMFTLMDDDNDGKISYLELRAGLRKVGSQLGEPEIKLLMEVADVNGNGCLDYGEFVAVIIHLQKMENDEHFRQAFMFFDKDGSGYIESEELREALTDELGEPDNSVIIDIMREVDTDKDGKINYDEFVVMMKAGTDWRKASRQYSRERFKSLSLNLMKDGSMHLHDALTGQSIAV

SEQ ID NO: 73584 - protein, 519 aa, Arabidopsis thaliana
  peptide (1)..(519): Ceres Seq. ID no. 4972270
  misc_feature (11)..(264): Pfam Name: Protein kinase domain Pfam Description: Protein kinase domain
  misc_feature (1)..(266): Homolog of NCBI NO: 25287677 NR Description: calcium-dependent protein kinase 1 [imported] -
  misc_feature (292)..(519): Homolog of NCBI NO: 25287677 NR Description: calcium-dependent protein kinase 1 [imported] -
  misc_feature (1)..(266): Homolog of NCBI NO: 28416563 NR Description: At1g18890 [Arabidopsis thaliana]
  misc_feature (292)..(519): Homolog of NCBI NO: 28416563 NR Description: At1g18890 [Arabidopsis thaliana]
  misc_feature (1)..(266): Homolog of NCBI NO: 18394667 NR Description: calcium-dependent protein kinase, putative; id: At1g18890.1, supported by cDNA: gi_1235716 [Arabidopsis
  misc_feature (292)..(519): Homolog of NCBI NO: 18394667 NR Description: calcium-dependent protein kinase, putative; id: At1g18890.1, supported by cDNA: gi_1235716 [Arabidopsis
  misc_feature (1)..(266): Homolog of NCBI NO: 1084334 NR Description: calcium-dependent protein kinase (EC 2.7.1.-) 1 -
  misc_feature (292)..(519): Homolog of NCBI NO: 1084334 NR Description: calcium-dependent protein kinase (EC 2.7.1.-) 1 -
  misc_feature (1)..(264): Homolog of NCBI NO: 22331739 NR Description: calcium-dependent protein kinase; protein id:
  misc_feature (291)..(508): Homolog of NCBI NO: 22331739 NR Description: calcium-dependent protein kinase; protein id:
MSHQSQISDKYILGRELGRGEFGITYLCTDRETREALACKSISKRKLRTAVDVEDVRREVTIMSTLPEHPNVVKLKATYEDNENVHLVMELCEGGELFDRIVARGHYTERAAATVARTIAEVVRMCHVNGVMHRDLKPENFLFANKKENSALKAIDFGLSVLFKPGERFTEIVGSPYYMAPEVLKRNYGPEVDVWSAGVILYILLCGVPPFWAETEQGVALAILRGVLDFKRDPWSQISESAKSLVKQMLEPDSTKRLTAQQVLGNNAVLVSLMEKMAFKVKTVSVSFFADHPWIQNAKKAPNVPLGDIVRSRLKQFSMMNRLKKKALRVIAEHLSIQEVEVIRNMFTLMDDDNDGKISYLELRAGLRKVGSQLGEPEIKLLMEVADVNGNGCLDYGEFVAVIIHLQKMENDEHFRQAFMFFDKDGSGYIESEELREALTDELGEPDNSVIIDIMREVDTDKDGKINYDEFVVMMKAGTDWRKASRQYSRERFKSLSLNLMKDGSMHLHDALTGQSIAV

SEQ ID NO: 73585 - protein, 457 aa, Arabidopsis thaliana
  peptide (1)..(457): Ceres Seq. ID no. 4972271
  misc_feature (1)..(202): Pfam Name: Protein kinase domain Pfam Description: Protein kinase domain
  misc_feature (1)..(204): Homolog of NCBI NO: 25287677 NR Description: calcium-dependent protein kinase 1 [imported] -
  misc_feature (230)..(457): Homolog of NCBI NO: 25287677 NR Description: calcium-dependent protein kinase 1 [imported] -
  misc_feature (1)..(204): Homolog of NCBI NO: 28416563 NR Description: At1g18890 [Arabidopsis thaliana]
  misc_feature (230)..(457): Homolog of NCBI NO: 28416563 NR Description: At1g18890 [Arabidopsis thaliana]
  misc_feature (1)..(204): Homolog of NCBI NO: 18394667 NR Description: calcium-dependent protein kinase, putative; id: At1g18890.1, supported by cDNA: gi_1235716 [Arabidopsis
  misc_feature (230)..(457): Homolog of NCBI NO: 18394667 NR Description: calcium-dependent protein kinase, putative; id: At1g18890.1, supported by cDNA: gi_1235716 [Arabidopsis
  misc_feature (1)..(204): Homolog of NCBI NO: 1084334 NR Description: calcium-dependent protein kinase (EC 2.7.1.-) 1 -
  misc_feature (230)..(457): Homolog of NCBI NO: 1084334 NR Description: calcium-dependent protein kinase (EC 2.7.1.-) 1 -
  misc_feature (1)..(202): Homolog of NCBI NO: 22331739 NR Description: calcium-dependent protein kinase; protein id:
  misc_feature (229)..(446): Homolog of NCBI NO: 22331739 NR Description: calcium-dependent protein kinase; protein id:
MSTLPEHPNVVKLKATYEDNENVHLVMELCEGGELFDRIVARGHYTERAAATVARTIAEVVRMCHVNGVMHRDLKPENFLFANKKENSALKAIDFGLSVLFKPGERFTEIVGSPYYMAPEVLKRNYGPEVDVWSAGVILYILLCGVPPFWAETEQGVALAILRGVLDFKRDPWSQISESAKSLVKQMLEPDSTKRLTAQQVLGNNAVLVSLMEKMAFKVKTVSVSFFADHPWIQNAKKAPNVPLGDIVRSRLKQFSMMNRLKKKALRVIAEHLSIQEVEVIRNMFTLMDDDNDGKISYLELRAGLRKVGSQLGEPEIKLLMEVADVNGNGCLDYGEFVAVIIHLQKMENDEHFRQAFMFFDKDGSGYIESEELREALTDELGEPDNSVIIDIMREVDTDKDGKINYDEFVVMMKAGTDWRKASRQYSRERFKSLSLNLMKDGSMHLHDALTGQSIAV

SEQ ID NO: 73586 - DNA, 2097 bp, Arabidopsis thaliana
  misc_feature (1)..(2097): Ceres Seq. ID no. 4972347
  misc_feature: MA Experiment ID: 20000185 Result: Up-regulated in Transcription
  misc_feature: MA Experiment 20000185 PARAMETER Experiment Name: At_Roots__P Parameter: Age (day) Value: 7 vs. 21
  misc_feature: MA Experiment 20000185 PARAMETER Experiment Name: At_Roots__P Parameter: Organism Value: A. thaliana
  misc_feature: MA Experiment 20000185 PARAMETER Experiment Name: At_Roots__P Parameter: Tissue Value: Roots vs. Whole Plant
  misc_feature: MA Experiment ID: 20000235 Result: Up-regulated in Transcription
  misc_feature: MA Experiment 20000235 PARAMETER Experiment Name: At_Siliques_P Parameter: Age (day) Value: 21
  misc_feature: MA Experiment 20000235 PARAMETER Experiment Name: At_Siliques_P Parameter: Organism Value: A. thaliana
  misc_feature: MA Experiment 20000235 PARAMETER Experiment Name: At_Siliques_P Parameter: Plant Line Value: WS
  misc_feature: MA Experiment 20000235 PARAMETER Experiment Name: At_Siliques_P Parameter: Tissue Value: 5-10mm Siliques vs. Whole Plant
  misc_feature: MA Experiment ID: 20000439 Result: Up-regulated in Transcription
  misc_feature: MA Experiment 20000439 PARAMETER Experiment Name: At_Roots__P Parameter: Age (day) Value: 14 vs. 21
  misc_feature: MA Experiment 20000439 PARAMETER Experiment Name: At_Roots__P Parameter: Organism Value: A. thaliana
  misc_feature: MA Experiment 20000439 PARAMETER Experiment Name: At_Roots__P Parameter: Tissue Value: Roots vs. Whole Plant
  misc_feature: MA Experiment ID: 20001773 Result: Up-regulated in Transcription
  misc_feature: MA Experiment 20001773 PARAMETER Experiment Name: At_Far-red-enriched-adult_P Parameter: Age (day) Value: 30
  misc_feature: MA Experiment 20001773 PARAMETER Experiment Name: At_Far-red-enriched-adult_P Parameter: Light Value: Far-red enriched vs. White
  misc_feature: MA Experiment 20001773 PARAMETER Experiment Name: At_Far-red-enriched-adult_P Parameter: Organism Value: A. thaliana
  misc_feature: MA Experiment 20001773 PARAMETER Experiment Name: At_Far-red-enriched-adult_P Parameter: Plant Line Value: Columbia
  misc_feature: MA Experiment 20001773 PARAMETER Experiment Name: At_Far-red-enriched-adult_P Parameter: Timepoint (hr) Value: 48
  misc_feature: MA Experiment 20001773 PARAMETER Experiment Name: At_Far-red-enriched-adult_P Parameter: Tissue Value: Aerial
atgaaaaatcttgttcaagaaatgatcaaagctgttaaggctgttgttaagtgcggatctttcccaaccaagaggaagatcccattcacgagccatgctgttgcatctgcggcgaggaagctcgaagctgacgaaggatatgacaagaaggttgcaacggtgtttcattatttgaagaagaaatatggagccattaggaaatctgtgacgacaatctcattcaatagcaagtacatacagaagaagaagggtggaaagaatgaaaaggtggagggatcaccgagaagtcctcgacctgaaaccatagataaagaagagaaatttgggaggagaagtttggattctttatctggtaatgatctcttactcggtagaagaatatatgcaagtgaagtttccaaggctcaaggatctaagcatgatcaaagcagtggtagtagcaacaaattttggaagaagcaacattcatggcttcgtaggaactttaagtcgatagttttgatgatctcagtcaccggtttcattttctgtatggattccattatggtttcgatctttcattccgatagtagagccgtggtgcaagacatttcaaggttgagcaatatgactttgcataagaatggagcagtagatgcttcaccagttcaaatgtatagccgtcttctaaacttagcttcggattctcttgcaaagaatgaattcaaacccgatacaccaaacttccgggaggaaagatcttcaaagtcatcacagtggaagccttgtgcagataataacaaagcagctgtggcattagagaggtctagagaattaagcaatggttacatcatggttagtgcaaatggaggccttaatcaacagcgcgtggctatctgtaacgctgttgcggttgctgctctgctcaacgcgactctagttcttcctcggtttctttacagcaatgtatggaaagatcctagccaatttggtgatatataccaagaggatcattttatcgagtatctgaaagatgaggtgaatatagtgaagaatcttcctcaacatctaaaatctactgataacaagaatctcagcttggttactgatacggagcttgtaaaagaggcaacaccagtcgattacatcgaacatgttcttcctttgttaaagaagtatggaatggttcatcttttcggatacgggaatcgcctcgggtttgatccattgccttttgacgttcagagattacgatgtaaatgcaactttcacgcgctgaaattcgcgcccaagattcaagaagcgggatctctgttggtgaaacggataagaagattcaaaacatcgcgtagcagattggaagaagcattacttggtgaatccatggtgaaaagtactgttaaaggagaagaagaaccgttgaagtatcttgctttgcatctaaggtttgaagaagacatggttgcttattctctatgcgattttggaggaggagaagccgagcgcaaagagcttcaagcttaccgtgaagatcatttccctcttctactcaaacgtttgaagaaatcaaagccagtgtccccagaagagttaagaaaaacgggcaagtgtccactaacaccagaggaagcaactctggttcttgctggtcttggattcaagagaaaaacatatatttacttagctggatctcaaatctatggaggctcttctcgtatgcttcctttaacaagactgtacccgaatatcgcgaccaaagaaactctccttacacctcaagaacttgcgccattcaagaacttctcttctcagctagctgcactagatttcatagcttgtatagcatcagatgtctttgcaatgactgattctgggagtcaactatcatccttagtgtctggatttagaaactactacggaaacggtcaggcaccaacattgagacctaacaagaagaggcttgcagcaatcttatcagacagtgaaacaataaagtggaagatttttgaagatcgtgtgagaaaaatggtagaggaaggccaaaagcttcgtactaggccttatggacgcagcatttatagacaaccgagatgtcctgagtgtatgtgtaaattttga

SEQ ID NO: 73587 - protein, 698 aa, Arabidopsis thaliana
  peptide (1)..(698): Ceres Seq. ID no. 4972348
  misc_feature (321)..(662): Pfam Name: Plant protein family Pfam Description: Plant protein family
  misc_feature (321)..(698): Homolog of NCBI NO: 25518128 NR Description: hypothetical protein F12P21.7 - Arabidopsis >gi|9502419|gb|AAF88118.1|AC021043_11 Hypothetical protein
  misc_feature (91)..(294): Homolog of NCBI NO: 25518128 NR Description: hypothetical protein F12P21.7 - Arabidopsis >gi|9502419|gb|AAF88118.1|AC021043_11 Hypothetical protein
  misc_feature (219)..(696): Homolog of NCBI NO: 30696687 NR Description: expressed protein [Arabidopsis thaliana]
  misc_feature (236)..(696): Homolog of NCBI NO: 15221155 NR Description: putative growth regulator protein; protein id: [Arabidopsis thaliana] >gi|25402697|pir||H86254 hypothetical
  misc_feature (274)..(696): Homolog of NCBI NO: 7486106 NR Description: hypothetical protein F24O1.4 - Arabidopsis >gi|7940275|gb|AAF70834.1|AC003113_1 F24O1.5 [Arabidopsis
  misc_feature (421)..(697): Homolog of NCBI NO: 34908166 NR Description: axi 1-like protein [Oryza sativa (japonica
  misc_feature (209)..(437): Homolog of NCBI NO: 34908166 NR Description: axi 1-like protein [Oryza sativa (japonica
  misc_feature (451)..(697): Homolog of NCBI NO: 15226282 NR Description: similar to axi 1 protein from Nicotiana tabacum; id: At2g01480.1, supported by cDNA: gi_20260419 [Arabidopsis >gi|25410909|pir||C84425 similar to axi 1 protein from Nicotiana
  misc_feature (209)..(437): Homolog of NCBI NO: 15226282 NR Description: similar to axi 1 protein from Nicotiana tabacum; id: At2g01480.1, supported by cDNA: gi_20260419 [Arabidopsis >gi|25410909|pir||C84425 similar to axi 1 protein from Nicotiana
  misc_feature (421)..(697): Homolog of NCBI NO: 8778220 NR Description: F10B6.36 [Arabidopsis thaliana]
MKNLVQEMIKAVKAVVKCGSFPTKRKIPFTSHAVASAARKLEADEGYDKKVATVFHYLKKKYGAIRKSVTTISFNSKYIQKKKGGKNEKVEGSPRSPRPETIDKEEKFGRRSLDSLSGNDLLLGRRIYASEVSKAQGSKHDQSSGSSNKFWKKQHSWLRRNFKSIVLMISVTGFIFCMDSIMVSIFHSDSRAVVQDISRLSNMTLHKNGAVDASPVQMYSRLLNLASDSLAKNEFKPDTPNFREERSSKSSQWKPCADNNKAAVALERSRELSNGYIMVSANGGLNQQRVAICNAVAVAALLNATLVLPRFLYSNVWKDPSQFGDIYQEDHFIEYLKDEVNIVKNLPQHLKSTDNKNLSLVTDTELVKEATPVDYIEHVLPLLKKYGMVHLFGYGNRLGFDPLPFDVQRLRCKCNFHALKFAPKIQEAGSLLVKRIRRFKTSRSRLEEALLGESMVKSTVKGEEEPLKYLALHLRFEEDMVAYSLCDFGGGEAERKELQAYREDHFPLLLKRLKKSKPVSPEELRKTGKCPLTPEEATLVLAGLGFKRKTYIYLAGSQIYGGSSRMLPLTRLYPNIATKETLLTPQELAPFKNFSSQLAALDFIACIASDVFAMTDSGSQLSSLVSGFRNYYGNGQAPTLRPNKKRLAAILSDSETIKWKIFEDRVRKMVEEGQKLRTRPYGRSIYRQPRCPECMCKF

SEQ ID NO: 73588 - protein, 691 aa, Arabidopsis thaliana
  peptide (1)..(691): Ceres Seq. ID no. 4972349
  misc_feature (314)..(655): Pfam Name: Plant protein family Pfam Description: Plant protein family
  misc_feature (314)..(691): Homolog of NCBI NO: 25518128 NR Description: hypothetical protein F12P21.7 - Arabidopsis >gi|9502419|gb|AAF88118.1|AC021043_11 Hypothetical protein
  misc_feature (84)..(287): Homolog of NCBI NO: 25518128 NR Description: hypothetical protein F12P21.7 - Arabidopsis >gi|9502419|gb|AAF88118.1|AC021043_11 Hypothetical protein
  misc_feature (212)..(689): Homolog of NCBI NO: 30696687 NR Description: expressed protein [Arabidopsis thaliana]
  misc_feature (229)..(689): Homolog of NCBI NO: 15221155 NR Description: putative growth regulator protein; protein id: [Arabidopsis thaliana] >gi|25402697|pir||H86254 hypothetical
  misc_feature (267)..(689): Homolog of NCBI NO: 7486106 NR Description: hypothetical protein F24O1.4 - Arabidopsis >gi|7940275|gb|AAF70834.1|AC003113_1 F24O1.5 [Arabidopsis
  misc_feature (414)..(690): Homolog of NCBI NO: 34908166 NR Description: axi 1-like protein [Oryza sativa (japonica
  misc_feature (202)..(430): Homolog of NCBI NO: 34908166 NR Description: axi 1-like protein [Oryza sativa (japonica
  misc_feature (444)..(690): Homolog of NCBI NO: 15226282 NR Description: similar to axi 1 protein from Nicotiana tabacum; id: At2g01480.1, supported by cDNA: gi_20260419 [Arabidopsis >gi|25410909|pir||C84425 similar to axi 1 protein from Nicotiana
  misc_feature (202)..(430): Homolog of NCBI NO: 15226282 NR Description: similar to axi 1 protein from Nicotiana tabacum; id: At2g01480.1, supported by cDNA: gi_20260419 [Arabidopsis >gi|25410909|pir||C84425 similar to axi 1 protein from Nicotiana
  misc_feature (414)..(690): Homolog of NCBI NO: 8778220 NR Description: F10B6.36 [Arabidopsis thaliana]
MIKAVKAVVKCGSFPTKRKIPFTSHAVASAARKLEADEGYDKKVATVFHYLKKKYGAIRKSVTTISFNSKYIQKKKGGKNEKVEGSPRSPRPETIDKEEKFGRRSLDSLSGNDLLLGRRIYASEVSKAQGSKHDQSSGSSNKFWKKQHSWLRRNFKSIVLMISVTGFIFCMDSIMVSIFHSDSRAVVQDISRLSNMTLHKNGAVDASPVQMYSRLLNLASDSLAKNEFKPDTPNFREERSSKSSQWKPCADNNKAAVALERSRELSNGYIMVSANGGLNQQRVAICNAVAVAALLNATLVLPRFLYSNVWKDPSQFGDIYQEDHFIEYLKDEVNIVKNLPQHLKSTDNKNLSLVTDTELVKEATPVDYIEHVLPLLKKYGMVHLFGYGNRLGFDPLPFDVQRLRCKCNFHALKFAPKIQEAGSLLVKRIRRFKTSRSRLEEALLGESMVKSTVKGEEEPLKYLALHLRFEEDMVAYSLCDFGGGEAERKELQAYREDHFPLLLKRLKKSKPVSPEELRKTGKCPLTPEEATLVLAGLGFKRKTYIYLAGSQIYGGSSRMLPLTRLYPNIATKETLLTPQELAPFKNFSSQLAALDFIACIASDVFAMTDSGSQLSSLVSGFRNYYGNGQAPTLRPNKKRLAAILSDSETIKWKIFEDRVRKMVEEGQKLRTRPYGRSIYRQPRCPECMCKF

SEQ ID NO: 73589 - protein, 531 aa, Arabidopsis thaliana
  peptide (1)..(531): Ceres Seq. ID no. 4972350
  misc_feature (154)..(495): Pfam Name: Plant protein family Pfam Description: Plant protein family
  misc_feature (154)..(531): Homolog of NCBI NO: 25518128 NR Description: hypothetical protein F12P21.7 - Arabidopsis >gi|9502419|gb|AAF88118.1|AC021043_11 Hypothetical protein
  misc_feature (1)..(127): Homolog of NCBI NO: 25518128 NR Description: hypothetical protein F12P21.7 - Arabidopsis >gi|9502419|gb|AAF88118.1|AC021043_11 Hypothetical protein
  misc_feature (52)..(529): Homolog of NCBI NO: 30696687 NR Description: expressed protein [Arabidopsis thaliana]
  misc_feature (69)..(529): Homolog of NCBI NO: 15221155 NR Description: putative growth regulator protein; protein id: [Arabidopsis thaliana] >gi|25402697|pir||H86254 hypothetical
  misc_feature (107)..(529): Homolog of NCBI NO: 7486106 NR Description: hypothetical protein F24O1.4 - Arabidopsis >gi|7940275|gb|AAF70834.1|AC003113_1 F24O1.5 [Arabidopsis
  misc_feature (254)..(530): Homolog of NCBI NO: 34908166 NR Description: axi 1-like protein [Oryza sativa (japonica
  misc_feature (42)..(270): Homolog of NCBI NO: 34908166 NR Description: axi 1-like protein [Oryza sativa (japonica
  misc_feature (284)..(530): Homolog of NCBI NO: 15226282 NR Description: similar to axi 1 protein from Nicotiana tabacum; id: At2g01480.1, supported by cDNA: gi_20260419 [Arabidopsis >gi|25410909|pir||C84425 similar to axi 1 protein from Nicotiana
  misc_feature (42)..(270): Homolog of NCBI NO: 15226282 NR Description: similar to axi 1 protein from Nicotiana tabacum; id: At2g01480.1, supported by cDNA: gi_20260419 [Arabidopsis >gi|25410909|pir||C84425 similar to axi 1 protein from Nicotiana
  misc_feature (254)..(530): Homolog of NCBI NO: 8778220 NR Description: F10B6.36 [Arabidopsis thaliana]
MISVTGFIFCMDSIMVSIFHSDSRAVVQDISRLSNMTLHKNGAVDASPVQMYSRLLNLASDSLAKNEFKPDTPNFREERSSKSSQWKPCADNNKAAVALERSRELSNGYIMVSANGGLNQQRVAICNAVAVAALLNATLVLPRFLYSNVWKDPSQFGDIYQEDHFIEYLKDEVNIVKNLPQHLKSTDNKNLSLVTDTELVKEATPVDYIEHVLPLLKKYGMVHLFGYGNRLGFDPLPFDVQRLRCKCNFHALKFAPKIQEAGSLLVKRIRRFKTSRSRLEEALLGESMVKSTVKGEEEPLKYLALHLRFEEDMVAYSLCDFGGGEAERKELQAYREDHFPLLLKRLKKSKPVSPEELRKTGKCPLTPEEATLVLAGLGFKRKTYIYLAGSQIYGGSSRMLPLTRLYPNIATKETLLTPQELAPFKNFSSQLAALDFIACIASDVFAMTDSGSQLSSLVSGFRNYYGNGQAPTLRPNKKRLAAILSDSETIKWKIFEDRVRKMVEEGQKLRTRPYGRSIYRQPRCPECMCKF

SEQ ID NO: 73590 - DNA, 1653 bp, Arabidopsis thaliana
  misc_feature (1)..(1653): Ceres Seq. ID no. 4972355
  misc_feature: MA Experiment ID: 20000440 Result: Up-regulated in Transcription
  misc_feature: MA Experiment 20000440 PARAMETER Experiment Name: At_Closed-Flower__Sub_P Parameter: Tissue Value: Closed Flower vs. Whole Plant
atggcgtatcctgagagatctctcattgttgatcctagaagtggtttctgcaaatcaaactctacattctatagcaagcgccaaccattaagtctcccgccaaatctttcgcgtgacgtcaccacattcatctcctctcagccacaccgtggcaaaaccgcctttatcgacgctgccacaggccagtgcttaaccttctccgatctctggagagccgtcgatcgcgtcgccgactgtctatatcatgaagtcggaatacgaagaggcgacgtcgtcctcatcctttctccaaactccatcttcattcccgttgtttgcctctccgtcatgtctctcggcgccgttttcaccaccgccaacactctcaatacttccggtgaaatctccaaacagattgccgacagtaatccaactctcgtcttcactacgcgccagctggcaccaaaactccccgtcgctatctccgtcgttctcaccgacgacgaagtttaccaggagctcactagcgcaatcagagtcgttgggattttaagcgagatggtgaagaaagaaccgagtgggcaacgagtcagggaccgagtcaaccaggacgacacggcgatgatgctttactcgtcgggaaccacgggaccgagcaaaggagtgatctcgtctcaccggaatttaacagctcacgtggctagattcatatcggataatttgaaacgagacgatattttcatctgtaccgtcccgatgttccacacctacggtttattgaccttcgctatgggcaccgtagcattgggttcaacggtggtgatcctccggagatttcagctccacgatatgatggatgcggtggagaagcaccgagccacagctctggctttggcgccacctgttttggtagctatgattaacgacgcagatctgatcaaggctaagtacgatctgagctcactgaaaacggtgaggtgtggtggagcgccgttgagcaaggaggtgacggaagggtttctagagaaatatccgacggttgatatactgcaggggtatgctttgacggaatccaacggcggaggggctttcacgaattcagcggaggagagccggagatatggcacggcggggacgttgacgtctgatgtggaggcgaggatcgtggatccgaatacgggtcggttcatgggaattaaccaaacgggagagctctggctcaagggcccttctatttctaaaggttattttaaaaaccaagaagctacaaatgaaaccattaatttagagggatggctaaaaactggagatctttgctacatcgatgaagatgggtttctttttgttgtggatcgattgaaagaactgataaaatacaaaggctatcaggtgcctccagctgaactagaagctcttctgattactcatccggacattctcgatgccgccgttattccttttccggacaaagaagcaggacaatatccaatggcttacgtggttcgaaaacacgagagcaatctctctgagaaacaagtcattgacttcatctctaagcaggtagcaccatataagaagataagaaaggtctcatttataaactccataccaaaaactgcatccggtaagacgcttcgcaaggatctaatcaaattggctacttctaaactttga

SEQ ID NO: 73591 - protein, 550 aa, Arabidopsis thaliana
  peptide (1)..(550): Ceres Seq. ID no. 4972356
  misc_feature (65)..(477): Pfam Name: AMP-binding enzyme Pfam Description: AMP-binding enzyme
  misc_feature (1)..(543): Homolog of NCBI NO: 25402913 NR Description: protein F5M15.18 [imported] - Arabidopsis >gi|8778604|gb|AAF79612.1|AC027665_13 F5M15.18 [Arabidopsis
  misc_feature (1)..(407): Homolog of NCBI NO: 15217958 NR Description: hypothetical protein; protein id: At1g20490.1
  misc_feature (423)..(550): Homolog of NCBI NO: 15217958 NR Description: hypothetical protein; protein id: At1g20490.1
  misc_feature (1)..(425): Homolog of NCBI NO: 25402913 NR Description: protein F5M15.18 [imported] - Arabidopsis >gi|8778604|gb|AAF79612.1|AC027665_13 F5M15.18 [Arabidopsis
  misc_feature (423)..(522): Homolog of NCBI NO: 25402913 NR Description: protein F5M15.18 [imported] - Arabidopsis >gi|8778604|gb|AAF79612.1|AC027665_13 F5M15.18 [Arabidopsis
  misc_feature (1)..(408): Homolog of NCBI NO: 30686860 NR Description: 4-coumarate:CoA ligase 1 (4-coumaroyl-CoA
  misc_feature (1)..(550): Homolog of NCBI NO: 29888141 NR Description: 4-coumarate-CoA ligase-like protein [Arabidopsis
  misc_feature (1)..(550): Homolog of NCBI NO: 30693203 NR Description: 4-coumarate:CoA ligase (4-coumaroyl-CoA synthase)
  misc_feature (1)..(550): Homolog of NCBI NO: 10177788 NR Description: AMP-binding protein-like [Arabidopsis thaliana]
  misc_feature (10)..(548): Homolog of NCBI NO: 18394871 NR Description: expressed protein; protein id: At1g20510.1 thaliana] >gi|13430676|gb|AAK25960.1|AF360250_1 unknown protein thaliana] >gi|14532846|gb|AAK64105.1| unknown protein
MAYPERSLIVDPRSGFCKSNSTFYSKRQPLSLPPNLSRDVTTFISSQPHRGKTAFIDAATGQCLTFSDLWRAVDRVADCLYHEVGIRRGDVVLILSPNSIFIPVVCLSVMSLGAVFTTANTLNTSGEISKQIADSNPTLVFTTRQLAPKLPVAISVVLTDDEVYQELTSAIRVVGILSEMVKKEPSGQRVRDRVNQDDTAMMLYSSGTTGPSKGVISSHRNLTAHVARFISDNLKRDDIFICTVPMFHTYGLLTFAMGTVALGSTVVILRRFQLHDMMDAVEKHRATALALAPPVLVAMINDADLIKAKYDLSSLKTVRCGGAPLSKEVTEGFLEKYPTVDILQGYALTESNGGGAFTNSAEESRRYGTAGTLTSDVEARIVDPNTGRFMGINQTGELWLKGPSISKGYFKNQEATNETINLEGWLKTGDLCYIDEDGFLFVVDRLKELIKYKGYQVPPAELEALLITHPDILDAAVIPFPDKEAGQYPMAYVVRKHESNLSEKQVIDFISKQVAPYKKIRKVSFINSIPKTASGKTLRKDLIKLATSKL

SEQ ID NO: 73592 - protein, 441 aa, Arabidopsis thaliana
  peptide (1)..(441): Ceres Seq. ID no. 4972357
  misc_feature (1)..(368): Pfam Name: AMP-binding enzyme Pfam Description: AMP-binding enzyme
  misc_feature (1)..(434): Homolog of NCBI NO: 25402913 NR Description: protein F5M15.18 [imported] - Arabidopsis >gi|8778604|gb|AAF79612.1|AC027665_13 F5M15.18 [Arabidopsis
  misc_feature (1)..(298): Homolog of NCBI NO: 15217958 NR Description: hypothetical protein; protein id: At1g20490.1
  misc_feature (314)..(441): Homolog of NCBI NO: 15217958 NR Description: hypothetical protein; protein id: At1g20490.1
  misc_feature (1)..(316): Homolog of NCBI NO: 25402913 NR Description: protein F5M15.18 [imported] - Arabidopsis >gi|8778604|gb|AAF79612.1|AC027665_13 F5M15.18 [Arabidopsis
  misc_feature (314)..(413): Homolog of NCBI NO: 25402913 NR Description: protein F5M15.18 [imported] - Arabidopsis >gi|8778604|gb|AAF79612.1|AC027665_13 F5M15.18 [Arabidopsis
  misc_feature (1)..(299): Homolog of NCBI NO: 30686860 NR Description: 4-coumarate:CoA ligase 1 (4-coumaroyl-CoA
  misc_feature (1)..(441): Homolog of NCBI NO: 29888141 NR Description: 4-coumarate-CoA ligase-like protein [Arabidopsis
  misc_feature (1)..(441): Homolog of NCBI NO: 30693203 NR Description: 4-coumarate:CoA ligase (4-coumaroyl-CoA synthase)
  misc_feature (1)..(441): Homolog of NCBI NO: 10177788 NR Description: AMP-binding protein-like [Arabidopsis thaliana]
  misc_feature (1)..(439): Homolog of NCBI NO: 18394871 NR Description: expressed protein; protein id: At1g20510.1 thaliana] >gi|13430676|gb|AAK25960.1|AF360250_1 unknown protein thaliana] >gi|14532846|gb|AAK64105.1| unknown protein
MSLGAVFTTANTLNTSGEISKQIADSNPTLVFTTRQLAPKLPVAISVVLTDDEVYQELTSAIRVVGILSEMVKKEPSGQRVRDRVNQDDTAMMLYSSGTTGPSKGVISSHRNLTAHVARFISDNLKRDDIFICTVPMFHTYGLLTFAMGTVALGSTVVILRRFQLHDMMDAVEKHRATALALAPPVLVAMINDADLIKAKYDLSSLKTVRCGGAPLSKEVTEGFLEKYPTVDILQGYALTESNGGGAFTNSAEESRRYGTAGTLTSDVEARIVDPNTGRFMGINQTGELWLKGPSISKGYFKNQEATNETINLEGWLKTGDLCYIDEDGFLFVVDRLKELIKYKGYQVPPAELEALLITHPDILDAAVIPFPDKEAGQYPMAYVVRKHESNLSEKQVIDFISKQVAPYKKIRKVSFINSIPKTASGKTLRKDLIKLATSKL

SEQ ID NO: 73593 - protein, 371 aa, Arabidopsis thaliana
  peptide (1)..(371): Ceres Seq. ID no. 4972358
  misc_feature (1)..(298): Pfam Name: AMP-binding enzyme Pfam Description: AMP-binding enzyme
  misc_feature (1)..(364): Homolog of NCBI NO: 25402913 NR Description: protein F5M15.18 [imported] - Arabidopsis >gi|8778604|gb|AAF79612.1|AC027665_13 F5M15.18 [Arabidopsis
  misc_feature (1)..(228): Homolog of NCBI NO: 15217958 NR Description: hypothetical protein; protein id: At1g20490.1
  misc_feature (244)..(371): Homolog of NCBI NO: 15217958 NR Description: hypothetical protein; protein id: At1g20490.1
  misc_feature (1)..(246): Homolog of NCBI NO: 25402913 NR Description: protein F5M15.18 [imported] - Arabidopsis >gi|8778604|gb|AAF79612.1|AC027665_13 F5M15.18 [Arabidopsis
  misc_feature (244)..(343): Homolog of NCBI NO: 25402913 NR Description: protein F5M15.18 [imported] - Arabidopsis >gi|8778604|gb|AAF79612.1|AC027665_13 F5M15.18 [Arabidopsis
  misc_feature (1)..(229): Homolog of NCBI NO: 30686860 NR Description: 4-coumarate:CoA ligase 1 (4-coumaroyl-CoA
  misc_feature (1)..(371): Homolog of NCBI NO: 29888141 NR Description: 4-coumarate-CoA ligase-like protein [Arabidopsis
  misc_feature (1)..(371): Homolog of NCBI NO: 30693203 NR Description: 4-coumarate:CoA ligase (4-coumaroyl-CoA synthase)
  misc_feature (1)..(371): Homolog of NCBI NO: 10177788 NR Description: AMP-binding protein-like [Arabidopsis thaliana]
  misc_feature (1)..(369): Homolog of NCBI NO: 18394871 NR Description: expressed protein; protein id: At1g20510.1 thaliana] >gi|13430676|gb|AAK25960.1|AF360250_1 unknown protein thaliana] >gi|14532846|gb|AAK64105.1| unknown protein
MVKKEPSGQRVRDRVNQDDTAMMLYSSGTTGPSKGVISSHRNLTAHVARFISDNLKRDDIFICTVPMFHTYGLLTFAMGTVALGSTVVILRRFQLHDMMDAVEKHRATALALAPPVLVAMINDADLIKAKYDLSSLKTVRCGGAPLSKEVTEGFLEKYPTVDILQGYALTESNGGGAFTNSAEESRRYGTAGTLTSDVEARIVDPNTGRFMGINQTGELWLKGPSISKGYFKNQEATNETINLEGWLKTGDLCYIDEDGFLFVVDRLKELIKYKGYQVPPAELEALLITHPDILDAAVIPFPDKEAGQYPMAYVVRKHESNLSEKQVIDFISKQVAPYKKIRKVSFINSIPKTASGKTLRKDLIKLATSKL

SEQ ID NO: 73594 - DNA, 1593 bp, Arabidopsis thaliana
  misc_feature (1)..(1593): Ceres Seq. ID no. 4972359
  misc_feature: MA Experiment ID: 20000173 Result: Down-regulated in Transcription
  misc_feature: MA Experiment 20000173 PARAMETER Experiment Name: At_42deg_Heat_P Parameter: Age (day) Value: 14
  misc_feature: MA Experiment 20000173 PARAMETER Experiment Name: At_42deg_Heat_P Parameter: Organism Value: A. thaliana
  misc_feature: MA Experiment 20000173 PARAMETER Experiment Name: At_42deg_Heat_P Parameter: Plant Line Value: WS
  misc_feature: MA Experiment 20000173 PARAMETER Experiment Name: At_42deg_Heat_P Parameter: Temperature (deg C) Value: 42 vs. 22
  misc_feature: MA Experiment 20000173 PARAMETER Experiment Name: At_42deg_Heat_P Parameter: Timepoint (hr) Value: 6
  misc_feature: MA Experiment 20000173 PARAMETER Experiment Name: At_42deg_Heat_P Parameter: Tissue Value: Aerial
  misc_feature: MA Experiment ID: 20000180 Result: Up-regulated in Transcription
  misc_feature: MA Experiment 20000180 PARAMETER Experiment Name: At_Germinating_Seeds_P Parameter: Age (hr) Value: 24 vs. 0
  misc_feature: MA Experiment 20000180 PARAMETER Experiment Name: At_Germinating_Seeds_P Parameter: Tissue Value: Germinating Seeds
  misc_feature: MA Experiment ID: 20000265 Result: Up-regulated in Transcription
  misc_feature: MA Experiment 20000265 PARAMETER Experiment Name: At_Open_Flower_P Parameter: Age (day) Value: 21
  misc_feature: MA Experiment 20000265 PARAMETER Experiment Name: At_Open_Flower_P Parameter: Plant Line Value: WS
  misc_feature: MA Experiment 20000265 PARAMETER Experiment Name: At_Open_Flower_P Parameter: Tissue Value: Closed Flower vs. Whole Plant
  misc_feature: MA Experiment ID: 20000436 Result: Up-regulated in Transcription
  misc_feature: MA Experiment 20000436 PARAMETER Experiment Name: At_Drought_P Parameter: Age (day) Value: 7
  misc_feature: MA Experiment 20000436 PARAMETER Experiment Name: At_Drought_P Parameter: Organism Value: A. thaliana
  misc_feature: MA Experiment 20000436 PARAMETER Experiment Name: At_Drought_P Parameter: Plant Line Value: WS
  misc_feature: MA Experiment 20000436 PARAMETER Experiment Name: At_Drought_P Parameter: Timepoint (hr) Value: 12
  misc_feature: MA Experiment 20000436 PARAMETER Experiment Name: At_Drought_P Parameter: Tissue Value: Whole Plant
  misc_feature: MA Experiment 20000436 PARAMETER Experiment Name: At_Drought_P Parameter: Treatment Value: Drought vs. No Drought
  misc_feature: MA Experiment ID: 20000437 Result: Up-regulated in Transcription
  misc_feature: MA Experiment 20000437 PARAMETER Experiment Name: At_Drought_P Parameter: Age (day) Value: 8
  misc_feature: MA Experiment 20000437 PARAMETER Experiment Name: At_Drought_P Parameter: Organism Value: A. thaliana
  misc_feature: MA Experiment 20000437 PARAMETER Experiment Name: At_Drought_P Parameter: Plant Line Value: WS
  misc_feature: MA Experiment 20000437 PARAMETER Experiment Name: At_Drought_P Parameter: Timepoint (hr) Value: 24
  misc_feature: MA Experiment 20000437 PARAMETER Experiment Name: At_Drought_P Parameter: Tissue Value: Whole Plant
  misc_feature: MA Experiment 20000437 PARAMETER Experiment Name: At_Drought_P Parameter: Treatment Value: Drought vs. No Drought
  misc_feature: MA Experiment ID: 20000439 Result: Up-regulated in Transcription
  misc_feature: MA Experiment 20000439 PARAMETER Experiment Name: At_Roots__P Parameter: Age (day) Value: 14 vs. 21
  misc_feature: MA Experiment 20000439 PARAMETER Experiment Name: At_Roots__P Parameter: Organism Value: A. thaliana
  misc_feature: MA Experiment 20000439 PARAMETER Experiment Name: At_Roots__P Parameter: Tissue Value: Roots vs. Whole Plant
  misc_feature: MA Experiment ID: 20000794 Result: Up-regulated in Transcription
  misc_feature: MA Experiment 20000794 PARAMETER Experiment Name: At_Petals_P Parameter: Age (day) Value: 23-25 days
  misc_feature: MA Experiment 20000794 PARAMETER Experiment Name: At_Petals_P Parameter: Plant Line Value: WS
  misc_feature: MA Experiment 20000794 PARAMETER Experiment Name: At_Petals_P Parameter: Tissue Value: Petals vs. Whole plant
  misc_feature: MA Experiment ID: 20001557 Result: Down-regulated in Transcription
  misc_feature: MA Experiment 20001557 PARAMETER Experiment Name: At_Drought_Soil_Dry_P Parameter: Age (day) Value: 27
  misc_feature: MA Experiment 20001557 PARAMETER Experiment Name: At_Drought_Soil_Dry_P Parameter: Organism Value: A. thaliana
  misc_feature: MA Experiment 20001557 PARAMETER Experiment Name: At_Drought_Soil_Dry_P Parameter: Plant Line Value: WS
  misc_feature: MA Experiment 20001557 PARAMETER Experiment Name: At_Drought_Soil_Dry_P Parameter: Post Timepoint (hr) Value: 3
  misc_feature: MA Experiment 20001557 PARAMETER Experiment Name: At_Drought_Soil_Dry_P Parameter: Post-Treatment Value: Re-Water vs. No Drought
  misc_feature: MA Experiment 20001557 PARAMETER Experiment Name: At_Drought_Soil_Dry_P Parameter: Timepoint (day) Value: 13
  misc_feature: MA Experiment 20001557 PARAMETER Experiment Name: At_Drought_Soil_Dry_P Parameter: Treatment Value: Drought vs. No Drought
  misc_feature: MA Experiment ID: 20001560 Result: Down-regulated in Transcription
  misc_feature: MA Experiment 20001560 PARAMETER Experiment Name: At_Drought_Soil_Dry_P Parameter: Age (day) Value: 28
  misc_feature: MA Experiment 20001560 PARAMETER Experiment Name: At_Drought_Soil_Dry_P Parameter: Organism Value: A. thaliana
  misc_feature: MA Experiment 20001560 PARAMETER Experiment Name: At_Drought_Soil_Dry_P Parameter: Plant Line Value: WS
  misc_feature: MA Experiment 20001560 PARAMETER Experiment Name: At_Drought_Soil_Dry_P Parameter: Post Timepoint (hr) Value: None
  misc_feature: MA Experiment 20001560 PARAMETER Experiment Name: At_Drought_Soil_Dry_P Parameter: Post-Treatment Value: None
  misc_feature: MA Experiment 20001560 PARAMETER Experiment Name: At_Drought_Soil_Dry_P Parameter: Timepoint (day) Value: 14
  misc_feature: MA Experiment 20001560 PARAMETER Experiment Name: At_Drought_Soil_Dry_P Parameter: Treatment Value: Drought vs. No Drought
  misc_feature: MA Experiment ID: 20001905 Result: Down-regulated in Transcription
  misc_feature: MA Experiment 20001905 PARAMETER Experiment Name: At_Drought_Reproduction_P Parameter: Age (day) Value: 40
  misc_feature: MA Experiment 20001905 PARAMETER Experiment Name: At_Drought_Reproduction_P Parameter: Organism Value: A. thaliana
  misc_feature: MA Experiment 20001905 PARAMETER Experiment Name: At_Drought_Reproduction_P Parameter: Plant Line Value: WS
  misc_feature: MA Experiment 20001905 PARAMETER Experiment Name: At_Drought_Reproduction_P Parameter: Timepoint (day) Value: 10
  misc_feature: MA Experiment 20001905 PARAMETER Experiment Name: At_Drought_Reproduction_P Parameter: Tissue Value: Rosettes
  misc_feature: MA Experiment 20001905 PARAMETER Experiment Name: At_Drought_Reproduction_P Parameter: Treatment Value: Drought vs. No Drought
atggcgtatcctgagagagatctcattgttgatcctagaagcggtttctgcaaatcaaactctacattctatagcaagcgaaacccattatgtctcccgccaaatccgtcgcttgacgtcacaactttcatatcatctcaaccgcaacgcggcaccaccgccttcatcgacgcctccacgggccaccgcttaaccttctccgatctctggagagtcgttgatcgcgtcgctgactgtctatatcatgaagtcggaatacgaagaggcgacgtcgtcctcatcctctctccaaattcaatctacattcccgtcgtttgcctctccgtcatgtctctcggcgccgtcgtcaccaccgccaacactctcaacacctccggcgaaatctccaaacagatcgcccaaagtaatccaactctcgtcttcaccacgagccagctggcacccaaactcgcagccgcaatctccgtcgtcctcaccgacgaagaagacgagaagcgagtggagctcactagtggagtcagagtcgttgggattttgagcgagatgatgaagaaagaaacgagtggtcaacgagtcagagaccgagtcaaccaggacgacacggcgatgatgctttactcgtcgggaaccacagggacgagcaaaggagtgatctcgtctcaccggaatttaacagcttacgttgcgaaatacatcgacgataaatggaaacgagacgagatattcgtatgtaccgtgccgatgttccactccttcgggttattggcgttcgcaatgggctccgtagcatcgggttcaacggtggtgattctccggagattcgggctcgacgatatgatgcaagcggtggagaagtacaaagccacgattctgagtttggctccaccggttttggtagctatgattaacggtgcagatcagctcaaggccaagtacgatttgacctccctgagaaaggttaggtgtggtggagcaccgttgagcaaggaggttatggatagcttcctagagaaatatccaacggttaatatttttcaaggatatgcgttgactgagtcgcacggttcaggagcttcgacggaatctgtggaggagagtctgaaatacggtgcggttgggttgttgtcgtccggtattgaagcgaggattgtggatccggatacgggtcgggtcatgggtgtgaaccaacccggtgagctctggctcaagggtccttctatttctaaagatctctgctatatcgatgaagatgggtttctatttgttgtggatcgactgaaagaattgatcaaatacaaaggctatcaggtgcctccagctgaactagaggctcttttgatcgctcatccacacattcttgatgctgctgttattccgtttccggatagagaagccggacaatatccgatggcttatgtagcccgaaagcccgagagcaatctctccgaaaaagaagttattgacttcatctctaatcaggtggcaccgtataagaaaataagaaaggttgcattcataagttccataccaaagactgcatccggcaaaacacttcgcaaagatctaatcaaactatcaacttccaaactttga

SEQ ID NO: 73595 - protein, 530 aa, Arabidopsis thaliana
  peptide (1)..(530): Ceres Seq. ID no. 4972360
  misc_feature (65)..(409): Pfam Name: AMP-binding enzyme Pfam Description: AMP-binding enzyme
  misc_feature (1)..(530): Homolog of NCBI NO: 15217958 NR Description: hypothetical protein; protein id: At1g20490.1
  misc_feature (1)..(502): Homolog of NCBI NO: 25402913 NR Description: protein F5M15.18 [imported] - Arabidopsis >gi|8778604|gb|AAF79612.1|AC027665_13 F5M15.18 [Arabidopsis
  misc_feature (1)..(409): Homolog of NCBI NO: 25402913 NR Description: protein F5M15.18 [imported] - Arabidopsis >gi|8778604|gb|AAF79612.1|AC027665_13 F5M15.18 [Arabidopsis
  misc_feature (399)..(523): Homolog of NCBI NO: 25402913 NR Description: protein F5M15.18 [imported] - Arabidopsis >gi|8778604|gb|AAF79612.1|AC027665_13 F5M15.18 [Arabidopsis
  misc_feature (399)..(530): Homolog of NCBI NO: 25402913 NR Description: protein F5M15.18 [imported] - Arabidopsis >gi|8778604|gb|AAF79612.1|AC027665_13 F5M15.18 [Arabidopsis
  misc_feature (1)..(409): Homolog of NCBI NO: 29888141 NR Description: 4-coumarate-CoA ligase-like protein [Arabidopsis
  misc_feature (399)..(530): Homolog of NCBI NO: 29888141 NR Description: 4-coumarate-CoA ligase-like protein [Arabidopsis
  misc_feature (1)..(409): Homolog of NCBI NO: 30693203 NR Description: 4-coumarate:CoA ligase (4-coumaroyl-CoA synthase)
  misc_feature (399)..(530): Homolog of NCBI NO: 30693203 NR Description: 4-coumarate:CoA ligase (4-coumaroyl-CoA synthase)
  misc_feature (1)..(530): Homolog of NCBI NO: 10177788 NR Description: AMP-binding protein-like [Arabidopsis thaliana]
MAYPERDLIVDPRSGFCKSNSTFYSKRNPLCLPPNPSLDVTTFISSQPQRGTTAFIDASTGHRLTFSDLWRVVDRVADCLYHEVGIRRGDVVLILSPNSIYIPVVCLSVMSLGAVVTTANTLNTSGEISKQIAQSNPTLVFTTSQLAPKLAAAISVVLTDEEDEKRVELTSGVRVVGILSEMMKKETSGQRVRDRVNQDDTAMMLYSSGTTGTSKGVISSHRNLTAYVAKYIDDKWKRDEIFVCTVPMFHSFGLLAFAMGSVASGSTVVILRRFGLDDMMQAVEKYKATILSLAPPVLVAMINGADQLKAKYDLTSLRKVRCGGAPLSKEVMDSFLEKYPTVNIFQGYALTESHGSGASTESVEESLKYGAVGLLSSGIEARIVDPDTGRVMGVNQPGELWLKGPSISKDLCYIDEDGFLFVVDRLKELIKYKGYQVPPAELEALLIAHPHILDAAVIPFPDREAGQYPMAYVARKPESNLSEKEVIDFISNQVAPYKKIRKVAFISSIPKTASGKTLRKDLIKLSTSKL

SEQ ID NO: 73596 - protein, 421 aa, Arabidopsis thaliana
  peptide (1)..(421): Ceres Seq. ID no. 4972361
  misc_feature (1)..(300): Pfam Name: AMP-binding enzyme Pfam Description: AMP-binding enzyme
  misc_feature (1)..(421): Homolog of NCBI NO: 15217958 NR Description: hypothetical protein; protein id: At1g20490.1
  misc_feature (1)..(393): Homolog of NCBI NO: 25402913 NR Description: protein F5M15.18 [imported] - Arabidopsis >gi|8778604|gb|AAF79612.1|AC027665_13 F5M15.18 [Arabidopsis
  misc_feature (1)..(300): Homolog of NCBI NO: 25402913 NR Description: protein F5M15.18 [imported] - Arabidopsis >gi|8778604|gb|AAF79612.1|AC027665_13 F5M15.18 [Arabidopsis
  misc_feature (290)..(414): Homolog of NCBI NO: 25402913 NR Description: protein F5M15.18 [imported] - Arabidopsis >gi|8778604|gb|AAF79612.1|AC027665_13 F5M15.18 [Arabidopsis
  misc_feature (290)..(421): Homolog of NCBI NO: 25402913 NR Description: protein F5M15.18 [imported] - Arabidopsis >gi|8778604|gb|AAF79612.1|AC027665_13 F5M15.18 [Arabidopsis
  misc_feature (1)..(300): Homolog of NCBI NO: 29888141 NR Description: 4-coumarate-CoA ligase-like protein [Arabidopsis
  misc_feature (290)..(421): Homolog of NCBI NO: 29888141 NR Description: 4-coumarate-CoA ligase-like protein [Arabidopsis
  misc_feature (1)..(300): Homolog of NCBI NO: 30693203 NR Description: 4-coumarate:CoA ligase (4-coumaroyl-CoA synthase)
  misc_feature (290)..(421): Homolog of NCBI NO: 30693203 NR Description: 4-coumarate:CoA ligase (4-coumaroyl-CoA synthase)
  misc_feature (1)..(421): Homolog of NCBI NO: 10177788 NR Description: AMP-binding protein-like [Arabidopsis thaliana]
MSLGAVVTTANTLNTSGEISKQIAQSNPTLVFTTSQLAPKLAAAISVVLTDEEDEKRVELTSGVRVVGILSEMMKKETSGQRVRDRVNQDDTAMMLYSSGTTGTSKGVISSHRNLTAYVAKYIDDKWKRDEIFVCTVPMFHSFGLLAFAMGSVASGSTVVILRRFGLDDMMQAVEKYKATILSLAPPVLVAMINGADQLKAKYDLTSLRKVRCGGAPLSKEVMDSFLEKYPTVNIFQGYALTESHGSGASTESVEESLKYGAVGLLSSGIEARIVDPDTGRVMGVNQPGELWLKGPSISKDLCYIDEDGFLFVVDRLKELIKYKGYQVPPAELEALLIAHPHILDAAVIPFPDREAGQYPMAYVARKPESNLSEKEVIDFISNQVAPYKKIRKVAFISSIPKTASGKTLRKDLIKLSTSKL

SEQ ID NO: 73597 - protein, 349 aa, Arabidopsis thaliana
  peptide (1)..(349): Ceres Seq. ID no. 4972362
  misc_feature (1)..(228): Pfam Name: AMP-binding enzyme Pfam Description: AMP-binding enzyme
  misc_feature (1)..(349): Homolog of NCBI NO: 15217958 NR Description: hypothetical protein; protein id: At1g20490.1
  misc_feature (1)..(321): Homolog of NCBI NO: 25402913 NR Description: protein F5M15.18 [imported] - Arabidopsis >gi|8778604|gb|AAF79612.1|AC027665_13 F5M15.18 [Arabidopsis
  misc_feature (1)..(228): Homolog of NCBI NO: 25402913 NR Description: protein F5M15.18 [imported] - Arabidopsis >gi|8778604|gb|AAF79612.1|AC027665_13 F5M15.18 [Arabidopsis
  misc_feature (218)..(342): Homolog of NCBI NO: 25402913 NR Description: protein F5M15.18 [imported] - Arabidopsis >gi|8778604|gb|AAF79612.1|AC027665_13 F5M15.18 [Arabidopsis
  misc_feature (218)..(349): Homolog of NCBI NO: 25402913 NR Description: protein F5M15.18 [imported] - Arabidopsis >gi|8778604|gb|AAF79612.1|AC027665_13 F5M15.18 [Arabidopsis
  misc_feature (1)..(228): Homolog of NCBI NO: 29888141 NR Description: 4-coumarate-CoA ligase-like protein [Arabidopsis
  misc_feature (218)..(349): Homolog of NCBI NO: 29888141 NR Description: 4-coumarate-CoA ligase-like protein [Arabidopsis
  misc_feature (1)..(228): Homolog of NCBI NO: 30693203 NR Description: 4-coumarate:CoA ligase (4-coumaroyl-CoA synthase)
  misc_feature (218)..(349): Homolog of NCBI NO: 30693203 NR Description: 4-coumarate:CoA ligase (4-coumaroyl-CoA synthase)
  misc_feature (1)..(349): Homolog of NCBI NO: 10177788 NR Description: AMP-binding protein-like [Arabidopsis thaliana]
MMKKETSGQRVRDRVNQDDTAMMLYSSGTTGTSKGVISSHRNLTAYVAKYIDDKWKRDEIFVCTVPMFHSFGLLAFAMGSVASGSTVVILRRFGLDDMMQAVEKYKATILSLAPPVLVAMINGADQLKAKYDLTSLRKVRCGGAPLSKEVMDSFLEKYPTVNIFQGYALTESHGSGASTESVEESLKYGAVGLLSSGIEARIVDPDTGRVMGVNQPGELWLKGPSISKDLCYIDEDGFLFVVDRLKELIKYKGYQVPPAELEALLIAHPHILDAAVIPFPDREAGQYPMAYVARKPESNLSEKEVIDFISNQVAPYKKIRKVAFISSIPKTASGKTLRKDLIKLSTSKL

SEQ ID NO: 73598 - DNA, 5376 bp, Arabidopsis thaliana
  misc_feature (1)..(5376): Ceres Seq. ID no. 4972407
  misc_feature: MA Experiment ID: 20000314 Result: Up-regulated in Transcription
  misc_feature: MA Experiment 20000314 PARAMETER Experiment Name: At_14day_Shoots-Roots_Sub_P Parameter: Age (day) Value: 14
  misc_feature: MA Experiment 20000314 PARAMETER Experiment Name: At_14day_Shoots-Roots_Sub_P Parameter: Organism Value: A. thaliana
  misc_feature: MA Experiment 20000314 PARAMETER Experiment Name: At_14day_Shoots-Roots_Sub_P Parameter: Plant Line Value: WS
  misc_feature: MA Experiment 20000314 PARAMETER Experiment Name: At_14day_Shoots-Roots_Sub_P Parameter: Tissue Value: Roots vs. Whole Plant
  misc_feature: MA Experiment ID: 20000315 Result: Up-regulated in Transcription
  misc_feature: MA Experiment 20000315 PARAMETER Experiment Name: At_14day_Shoots-Roots_Sub_P Parameter: Age (day) Value: 14
  misc_feature: MA Experiment 20000315 PARAMETER Experiment Name: At_14day_Shoots-Roots_Sub_P Parameter: Organism Value: A. thaliana
  misc_feature: MA Experiment 20000315 PARAMETER Experiment Name: At_14day_Shoots-Roots_Sub_P Parameter: Plant Line Value: WS
  misc_feature: MA Experiment 20000315 PARAMETER Experiment Name: At_14day_Shoots-Roots_Sub_P Parameter: Tissue Value: Shoots vs. Whole Plant
atggcaggggccaacgtagaaacccccccgctgccgggttccagctcgcaaactcccctagccgagcagaacccgccagttcgtcggaatacggaccaggaggaacgacgcgttactgacggaacctatgtcgggcccggaggactactccagaacatcctcgaccacttaagtcgacaggaggccagaacggaagcacgattcgccaccctagccgctgcacaagcacattcgatggacgaaatcaatcgtctacaaaccagccgaacttcagtccataggccagtgtttgaaagcatcgagcatcgtcctcaagtccgtatcgccggtcccaccaacgatgtcgcaagagacgcagaagtcgccgacctcagacgcactatatctgaaatgagctccaagatccaccgcgcaacaagcacggcgcccgagctcgaccgcgttctggaggagactcagcaaaccccctttactcgacgaataactaacgtctcgatcagaggagcccaaaaaatcaagctggaaagttacaacggtagaaacgacccgaaagagttcctaacatcgttcaacgtcgccataaaccgggccgagctcacgatcgacaactttgatgccgggaggtgtcaaatattcatcgaacatctgaccggaccagctcacaactggttttcacgtctaaaacccaattccatcgacagcttccatcagctcacctcgtccttcctcaaacattacgcgcctctaattgaaaatcaaacatcgaacgccgacctatggtccatctctcagggagctaaagaatcacttcgatctttcgttgatcgtttcaaactggtagtcacaaatatcactgtgcccgacgaagctgcaatagttgcgctacgaaatgcagtatggtacgactccagattccgggatgacataacattacacgctccgagcaccctagaggacgccctgcatcgggcatccaggttcatcgaacttgaagaggagaagctcattctggcaagaaaacacaactcgaccaaaacccccgcatgtaaagacgcagtggttattaaggtcggacctgacgactcaaacgagccgcgacagcacctcgatcgcaatcccagtgcgggccgaaaaccaacttcattcttagtaagcaccgaaactcccgacgctaaaccttggaacaaatatattcgcgacgccgattccccagcagcagggccgatgtactgcgaataccacaaaagcagagcgcattcgaccgagaattgccgtttcctgcagggcctcctgatggccaagtataagagcggcggaataacaatcgaatgcgaccgacccccgataaataacaaaaatcaacgacgtaacgaaactacggcccgacaatatttgaacgatcaaaccaaaccaccgaccccagcagaacaagggataattacctcggctgacgatccggcagccaaaagacagcgaaacggaaaggctatcgccgcggaaccagtcgtggttagacaagttcacgtgataatggggggactccagaattgcagcgattcagtgcgctcaattaagcaataccgaaagaaagccgagatggtggtagcttggccctcatccacaagcacgacaagaaatccgaaccaaagcgctccgatctcattcaccgacgtcgacctagaaggtttggataccccgcacaacgacccgctcgttgtcgagttgatcataagcgatagcagagtaacaagggttctgattgacaccgggagctcggtagacttgattttcaaagatgttttaaccgcgatgaacataacggatcgtcagattaagccagtctcaaaacctctcgccggtttcgatggagatttcgtcatgacaataggcacgattaaactaccaatctttgtcggaggattaatcgcctgggtgaagttcgtcgtgattggcaaaccagcggtctacaacgttatcctcggcaccccctggattcaccaaatgcaagccatcccgtccacttatcatcagtgcgttaagttcccaacgcacaacggcatcttcactctccgagcgccgaaggaagccaagaccccgagtaggtcttacgaggagtccgagttgtgccgcaccgagatggtaaacatagatgagtccgacccgacaaggtgcgttggtgttggggcagagatttcaccatcaattcggctcgaactcattgcactacttaaacgaaattccaaaaccttcgcatggagcatcgaagatatgaagggaatcgacccggcaatcaccgcacacgaacttaacgtagatccaactttcaagccggtaaaacagaaacgaaggaaactcggcccggagcgtgcacgagcagtaaatgaagaggtggaaaaactccttaaggcggggcaaatcatcgaggtgaaataccctgaatggctagcaaatcccgtcgtcgtcaaaaagaagaacggaaagtggcgcgtctgtgtcgattataccgacctcaacaaagcctgcccaaaggatagttatccactaccgcacatcgaccggctcgtcgaagcaacttcagggaatggtctcctctccttcatggacgctttctcaggctacaaccagatcctgatgcacaaggacgatcaagaaaagacatcattcgttaccgaccgcggcacgtattgttacaaggtgatgtccttcgggcttaaaaacgccggggcaacataccagcggttcgtcaataaaatgttagccgaccagatcgggagaaccgtcgaggtgtacatcgacgacatgctcgtaaagtcattgaagcccgaagaccatgtcgagcatctgagcaaatgcttcgacgtcctcaatacatacggaatgaagctaaatccaaccaagtgcaccttcggagtaacatcgggagagtttcttgggtatgtcgtcactaaaagaggaatagaagcaaacccaaaacaaattcgcgctatcctcgaactaccatcaccgcggaacgcccgagaagtgcaaaggctcacaggacgaattgccgccctcaatcgattcatctcacgatcaacggacaagtgcctaccattctacaacctgctcaagcgccgggcccaattcgattgggataaggatagcgaggaagctttcgaaaagctaaaggactacctttccacaccaccgatcctggtaaagcccgaagtcggcgaaactttgtatctctatatcgcagtatcggatcacgcagtaagtagcgtactagtacgagaagaccgaggcgagcaaaggccgatcttctatacgagcaaatcactagtcgaagccgaaacacgatacccggtaatagaaaaagccgcgctggcagtcgtcacgtcggcacgaaaactgcgaccatacttccaatcacatacaatagccgtcctgaccgatcaacctctaagagtcgccctacacagcccaagtcagtcaggacggatgacaaagtgggctgtggagttaagcgaatacgacatcgattttcgaccacgccccgcaatgaaatcacaggtcctggctgacttcctcatcgaactaccgttacagtcagcagaacgtgcggtcagtggaaaccgcggtgaagagtggagtctgtacgtggacggttcatcttcagctcgcggatcggggataggaattcgcctcgtctccccaaccgccgaggtgctagaacagtcctttcgtctccgattcgtcgcaacaaacaacgtggccgagtacgaggtcctaattgccgggctccgcctcgccgcggggatgcagataaccacgatccacgcattcaccgactcgcaactcatcgccgggcagctcagtggggagtacgaagcaaagaacgagaaaatggacgcctatctcaagatcgtccaactgatgacgaaagatttcgaaaactttaaactctcaaaaattccccgaggtgacaacgcaccggcagatgcgctcgccgccttagcgttaacttccgactccgacttgcgacgaatcatcccggtggaaagtattgataaaccaagtatcgattcgaccgacgccgtggaaatcgtaaataccatccgaagctcgaacgcccccgacccagcggatccgaccgattggcgagtagaaattcgcgattacctctccgatggaacattgccaagtgataagtggacagcgcggcgtctacgaatcaaagcggccaagtataccctcatgaaggagcatctccttaaggtcagcgcgttcggagcaatgctgaactgcctccacggaaccgagatcaatgaaataatgaaggaaactcacgaaggagcagccggaaaccactccggaggacgagctctcgcacttaagctcaaaaagttaggattttactggccaacaatgatttctgactgcaagaccttcacggccaagtgtgaacaatgtcaaagacacgcgcccaccatccatcaacccacggaactgctacgagccggagtcgcaccatacccctttatgcgatgggcaatggacatcgtcggcccgatgcctgcttcacgacagaaacggttcatccttgtaatgaccgattacttcacgaagtgggtcgaagccgaatcatacgcgacgatccgagccaatgatgtccaaaactttgtctggaaattcatcatctgccggcacggtctcccttatgaaatcataaccgataacggttcgcagttcatctcgctgtctttcgaaaatttctgcgccagctggaaaatacgactcaataagtccacgccacggtacccacaggggaatggccaggccgaggccacaaacaagacaattctctccggtctgaagaaaagactagacgaaaagaaaggagcttgggcagacgagctggatggtgtcctatggtcctaccgaacgacgccccgaagtgcaacggatcaaactccattcgcacacgcatacggaatggaggccatggcccctgccgaggtaggatactccagtcttcgaagatccatgatggtgaaaaaccccgaactcaacgacagaatgatgctcgatcgactcgacgacctggaagaaatacggaacgccgccctctgccgcattcagaactaccaactcgccgccgccaaacactataaccaaaaggtccacaatcgccacttcgacgtcggagatctcgttctccggaaagttttcgaaaatacagccgagatcaacgccggcaaactgggagcgaactgggaaggatcataccaagtatcgaaaatcgtccgacccggagactacgaactcctaacaatgagcggcaccgcggtgcctcgcacctggaactcaatgcacctgaagagatactattactaa

SEQ ID NO: 73599 - protein, 1791 aa, Arabidopsis thaliana
  peptide (1)..(1791): Ceres Seq. ID no. 4972408
  misc_feature (812)..(981): Pfam Name: Reverse transcriptase (RNA-dependent DNA polymerase) Pfam Description: Reverse transcriptase (RNA-dependent DNA
  misc_feature (711)..(1790): Homolog of NCBI NO: 4378066 NR Description: polyprotein [Sorghum bicolor]
  misc_feature (172)..(487): Homolog of NCBI NO: 4378066 NR Description: polyprotein [Sorghum bicolor]
  misc_feature (464)..(706): Homolog of NCBI NO: 4378066 NR Description: polyprotein [Sorghum bicolor]
  misc_feature (710)..(1695): Homolog of NCBI NO: 20161451 NR Description: putative polyprotein [Oryza sativa (japonica
  misc_feature (495)..(704): Homolog of NCBI NO: 20161451 NR Description: putative polyprotein [Oryza sativa (japonica
  misc_feature (174)..(335): Homolog of NCBI NO: 20161451 NR Description: putative polyprotein [Oryza sativa (japonica
  misc_feature (546)..(1622): Homolog of NCBI NO: 37533914 NR Description: putative retroelement [Oryza sativa (japonica group)] >gi|14018058|gb|AAK52121.1| Putative retroelement [Oryza >gi|31431827|gb|AAP53546.1| putative retroelement [Oryza sativa
  misc_feature (1528)..(1790): Homolog of NCBI NO: 37533914 NR Description: putative retroelement [Oryza sativa (japonica group)] >gi|14018058|gb|AAK52121.1| Putative retroelement [Oryza >gi|31431827|gb|AAP53546.1| putative retroelement [Oryza sativa
  misc_feature (174)..(424): Homolog of NCBI NO: 37533914 NR Description: putative retroelement [Oryza sativa (japonica group)] >gi|14018058|gb|AAK52121.1| Putative retroelement [Oryza >gi|31431827|gb|AAP53546.1| putative retroelement [Oryza sativa
  misc_feature (746)..(1790): Homolog of NCBI NO: 18071370 NR Description: putative gag-pol precursor [Oryza sativa]
MAGANVETPPLPGSSSQTPLAEQNPPVRRNTDQEERRVTDGTYVGPGGLLQNILDHLSRQEARTEARFATLAAAQAHSMDEINRLQTSRTSVHRPVFESIEHRPQVRIAGPTNDVARDAEVADLRRTISEMSSKIHRATSTAPELDRVLEETQQTPFTRRITNVSIRGAQKIKLESYNGRNDPKEFLTSFNVAINRAELTIDNFDAGRCQIFIEHLTGPAHNWFSRLKPNSIDSFHQLTSSFLKHYAPLIENQTSNADLWSISQGAKESLRSFVDRFKLVVTNITVPDEAAIVALRNAVWYDSRFRDDITLHAPSTLEDALHRASRFIELEEEKLILARKHNSTKTPACKDAVVIKVGPDDSNEPRQHLDRNPSAGRKPTSFLVSTETPDAKPWNKYIRDADSPAAGPMYCEYHKSRAHSTENCRFLQGLLMAKYKSGGITIECDRPPINNKNQRRNETTARQYLNDQTKPPTPAEQGIITSADDPAAKRQRNGKAIAAEPVVVRQVHVIMGGLQNCSDSVRSIKQYRKKAEMVVAWPSSTSTTRNPNQSAPISFTDVDLEGLDTPHNDPLVVELIISDSRVTRVLIDTGSSVDLIFKDVLTAMNITDRQIKPVSKPLAGFDGDFVMTIGTIKLPIFVGGLIAWVKFVVIGKPAVYNVILGTPWIHQMQAIPSTYHQCVKFPTHNGIFTLRAPKEAKTPSRSYEESELCRTEMVNIDESDPTRCVGVGAEISPSIRLELIALLKRNSKTFAWSIEDMKGIDPAITAHELNVDPTFKPVKQKRRKLGPERARAVNEEVEKLLKAGQIIEVKYPEWLANPVVVKKKNGKWRVCVDYTDLNKACPKDSYPLPHIDRLVEATSGNGLLSFMDAFSGYNQILMHKDDQEKTSFVTDRGTYCYKVMSFGLKNAGATYQRFVNKMLADQIGRTVEVYIDDMLVKSLKPEDHVEHLSKCFDVLNTYGMKLNPTKCTFGVTSGEFLGYVVTKRGIEANPKQIRAILELPSPRNAREVQRLTGRIAALNRFISRSTDKCLPFYNLLKRRAQFDWDKDSEEAFEKLKDYLSTPPILVKPEVGETLYLYIAVSDHAVSSVLVREDRGEQRPIFYTSKSLVEAETRYPVIEKAALAVVTSARKLRPYFQSHTIAVLTDQPLRVALHSPSQSGRMTKWAVELSEYDIDFRPRPAMKSQVLADFLIELPLQSAERAVSGNRGEEWSLYVDGSSSARGSGIGIRLVSPTAEVLEQSFRLRFVATNNVAEYEVLIAGLRLAAGMQITTIHAFTDSQLIAGQLSGEYEAKNEKMDAYLKIVQLMTKDFENFKLSKIPRGDNAPADALAALALTSDSDLRRIIPVESIDKPSIDSTDAVEIVNTIRSSNAPDPADPTDWRVEIRDYLSDGTLPSDKWTARRLRIKAAKYTLMKEHLLKVSAFGAMLNCLHGTEINEIMKETHEGAAGNHSGGRALALKLKKLGFYWPTMISDCKTFTAKCEQCQRHAPTIHQPTELLRAGVAPYPFMRWAMDIVGPMPASRQKRFILVMTDYFTKWVEAESYATIRANDVQNFVWKFIICRHGLPYEIITDNGSQFISLSFENFCASWKIRLNKSTPRYPQGNGQAEATNKTILSGLKKRLDEKKGAWADELDGVLWSYRTTPRSATDQTPFAHAYGMEAMAPAEVGYSSLRRSMMVKNPELNDRMMLDRLDDLEEIRNAALCRIQNYQLAAAKHYNQKVHNRHFDVGDLVLRKVFENTAEINAGKLGANWEGSYQVSKIVRPGDYELLTMSGTAVPRTWNSMHLKRYYY

SEQ ID NO: 73600 - protein, 1713 aa, Arabidopsis thaliana
  peptide (1)..(1713): Ceres Seq. ID no. 4972409
  misc_feature (734)..(903): Pfam Name: Reverse transcriptase (RNA-dependent DNA polymerase) Pfam Description: Reverse transcriptase (RNA-dependent DNA
  misc_feature (633)..(1712): Homolog of NCBI NO: 4378066 NR Description: polyprotein [Sorghum bicolor]
  misc_feature (94)..(409): Homolog of NCBI NO: 4378066 NR Description: polyprotein [Sorghum bicolor]
  misc_feature (386)..(628): Homolog of NCBI NO: 4378066 NR Description: polyprotein [Sorghum bicolor]
  misc_feature (632)..(1617): Homolog of NCBI NO: 20161451 NR Description: putative polyprotein [Oryza sativa (japonica
  misc_feature (417)..(626): Homolog of NCBI NO: 20161451 NR Description: putative polyprotein [Oryza sativa (japonica
  misc_feature (96)..(257): Homolog of NCBI NO: 20161451 NR Description: putative polyprotein [Oryza sativa (japonica
  misc_feature (468)..(1544): Homolog of NCBI NO: 37533914 NR Description: putative retroelement [Oryza sativa (japonica group)] >gi|14018058|gb|AAK52121.1| Putative retroelement [Oryza >gi|31431827|gb|AAP53546.1| putative retroelement [Oryza sativa
  misc_feature (1450)..(1712): Homolog of NCBI NO: 37533914 NR Description: putative retroelement [Oryza sativa (japonica group)] >gi|14018058|gb|AAK52121.1| Putative retroelement [Oryza >gi|31431827|gb|AAP53546.1| putative retroelement [Oryza sativa
  misc_feature (96)..(346): Homolog of NCBI NO: 37533914 NR Description: putative retroelement [Oryza sativa (japonica group)] >gi|14018058|gb|AAK52121.1| Putative retroelement [Oryza >gi|31431827|gb|AAP53546.1| putative retroelement [Oryza sativa
  misc_feature (668)..(1712): Homolog of NCBI NO: 18071370 NR Description: putative gag-pol precursor [Oryza sativa]
MDEINRLQTSRTSVHRPVFESIEHRPQVRIAGPTNDVARDAEVADLRRTISEMSSKIHRATSTAPELDRVLEETQQTPFTRRITNVSIRGAQKIKLESYNGRNDPKEFLTSFNVAINRAELTIDNFDAGRCQIFIEHLTGPAHNWFSRLKPNSIDSFHQLTSSFLKHYAPLIENQTSNADLWSISQGAKESLRSFVDRFKLVVTNITVPDEAAIVALRNAVWYDSRFRDDITLHAPSTLEDALHRASRFIELEEEKLILARKHNSTKTPACKDAVVIKVGPDDSNEPRQHLDRNPSAGRKPTSFLVSTETPDAKPWNKYIRDADSPAAGPMYCEYHKSRAHSTENCRFLQGLLMAKYKSGGITIECDRPPINNKNQRRNETTARQYLNDQTKPPTPAEQGIITSADDPAAKRQRNGKAIAAEPVVVRQVHVIMGGLQNCSDSVRSIKQYRKKAEMVVAWPSSTSTTRNPNQSAPISFTDVDLEGLDTPHNDPLVVELIISDSRVTRVLIDTGSSVDLIFKDVLTAMNITDRQIKPVSKPLAGFDGDFVMTIGTIKLPIFVGGLIAWVKFVVIGKPAVYNVILGTPWIHQMQAIPSTYHQCVKFPTHNGIFTLRAPKEAKTPSRSYEESELCRTEMVNIDESDPTRCVGVGAEISPSIRLELIALLKRNSKTFAWSIEDMKGIDPAITAHELNVDPTFKPVKQKRRKLGPERARAVNEEVEKLLKAGQIIEVKYPEWLANPVVVKKKNGKWRVCVDYTDLNKACPKDSYPLPHIDRLVEATSGNGLLSFMDAFSGYNQILMHKDDQEKTSFVTDRGTYCYKVMSFGLKNAGATYQRFVNKMLADQIGRTVEVYIDDMLVKSLKPEDHVEHLSKCFDVLNTYGMKLNPTKCTFGVTSGEFLGYVVTKRGIEANPKQIRAILELPSPRNAREVQRLTGRIAALNRFISRSTDKCLPFYNLLKRRAQFDWDKDSEEAFEKLKDYLSTPPILVKPEVGETLYLYIAVSDHAVSSVLVREDRGEQRPIFYTSKSLVEAETRYPVIEKAALAVVTSARKLRPYFQSHTIAVLTDQPLRVALHSPSQSGRMTKWAVELSEYDIDFRPRPAMKSQVLADFLIELPLQSAERAVSGNRGEEWSLYVDGSSSARGSGIGIRLVSPTAEVLEQSFRLRFVATNNVAEYEVLIAGLRLAAGMQITTIHAFTDSQLIAGQLSGEYEAKNEKMDAYLKIVQLMTKDFENFKLSKIPRGDNAPADALAALALTSDSDLRRIIPVESIDKPSIDSTDAVEIVNTIRSSNAPDPADPTDWRVEIRDYLSDGTLPSDKWTARRLRIKAAKYTLMKEHLLKVSAFGAMLNCLHGTEINEIMKETHEGAAGNHSGGRALALKLKKLGFYWPTMISDCKTFTAKCEQCQRHAPTIHQPTELLRAGVAPYPFMRWAMDIVGPMPASRQKRFILVMTDYFTKWVEAESYATIRANDVQNFVWKFIICRHGLPYEIITDNGSQFISLSFENFCASWKIRLNKSTPRYPQGNGQAEATNKTILSGLKKRLDEKKGAWADELDGVLWSYRTTPRSATDQTPFAHAYGMEAMAPAEVGYSSLRRSMMVKNPELNDRMMLDRLDDLEEIRNAALCRIQNYQLAAAKHYNQKVHNRHFDVGDLVLRKVFENTAEINAGKLGANWEGSYQVSKIVRPGDYELLTMSGTAVPRTWNSMHLKRYYY

SEQ ID NO: 73601 - protein, 1661 aa, Arabidopsis thaliana
  peptide (1)..(1661): Ceres Seq. ID no. 4972410
  misc_feature (682)..(851): Pfam Name: Reverse transcriptase (RNA-dependent DNA polymerase) Pfam Description: Reverse transcriptase (RNA-dependent DNA
  misc_feature (581)..(1660): Homolog of NCBI NO: 4378066 NR Description: polyprotein [Sorghum bicolor]
  misc_feature (42)..(357): Homolog of NCBI NO: 4378066 NR Description: polyprotein [Sorghum bicolor]
  misc_feature (334)..(576): Homolog of NCBI NO: 4378066 NR Description: polyprotein [Sorghum bicolor]
  misc_feature (580)..(1565): Homolog of NCBI NO: 20161451 NR Description: putative polyprotein [Oryza sativa (japonica
  misc_feature (365)..(574): Homolog of NCBI NO: 20161451 NR Description: putative polyprotein [Oryza sativa (japonica
  misc_feature (44)..(205): Homolog of NCBI NO: 20161451 NR Description: putative polyprotein [Oryza sativa (japonica
  misc_feature (416)..(1492): Homolog of NCBI NO: 37533914 NR Description: putative retroelement [Oryza sativa (japonica group)] >gi|14018058|gb|AAK52121.1| Putative retroelement [Oryza >gi|31431827|gb|AAP53546.1| putative retroelement [Oryza sativa
  misc_feature (1398)..(1660): Homolog of NCBI NO: 37533914 NR Description: putative retroelement [Oryza sativa (japonica group)] >gi|14018058|gb|AAK52121.1| Putative retroelement [Oryza >gi|31431827|gb|AAP53546.1| putative retroelement [Oryza sativa
  misc_feature (44)..(294): Homolog of NCBI NO: 37533914 NR Description: putative retroelement [Oryza sativa (japonica group)] >gi|14018058|gb|AAK52121.1| Putative retroelement [Oryza >gi|31431827|gb|AAP53546.1| putative retroelement [Oryza sativa
  misc_feature (616)..(1660): Homolog of NCBI NO: 18071370 NR Description: putative gag-pol precursor [Oryza sativa]
MSSKIHRATSTAPELDRVLEETQQTPFTRRITNVSIRGAQKIKLESYNGRNDPKEFLTSFNVAINRAELTIDNFDAGRCQIFIEHLTGPAHNWFSRLKPNSIDSFHQLTSSFLKHYAPLIENQTSNADLWSISQGAKESLRSFVDRFKLVVTNITVPDEAAIVALRNAVWYDSRFRDDITLHAPSTLEDALHRASRFIELEEEKLILARKHNSTKTPACKDAVVIKVGPDDSNEPRQHLDRNPSAGRKPTSFLVSTETPDAKPWNKYIRDADSPAAGPMYCEYHKSRAHSTENCRFLQGLLMAKYKSGGITIECDRPPINNKNQRRNETTARQYLNDQTKPPTPAEQGIITSADDPAAKRQRNGKAIAAEPVVVRQVHVIMGGLQNCSDSVRSIKQYRKKAEMVVAWPSSTSTTRNPNQSAPISFTDVDLEGLDTPHNDPLVVELIISDSRVTRVLIDTGSSVDLIFKDVLTAMNITDRQIKPVSKPLAGFDGDFVMTIGTIKLPIFVGGLIAWVKFVVIGKPAVYNVILGTPWIHQMQAIPSTYHQCVKFPTHNGIFTLRAPKEAKTPSRSYEESELCRTEMVNIDESDPTRCVGVGAEISPSIRLELIALLKRNSKTFAWSIEDMKGIDPAITAHELNVDPTFKPVKQKRRKLGPERARAVNEEVEKLLKAGQIIEVKYPEWLANPVVVKKKNGKWRVCVDYTDLNKACPKDSYPLPHIDRLVEATSGNGLLSFMDAFSGYNQILMHKDDQEKTSFVTDRGTYCYKVMSFGLKNAGATYQRFVNKMLADQIGRTVEVYIDDMLVKSLKPEDHVEHLSKCFDVLNTYGMKLNPTKCTFGVTSGEFLGYVVTKRGIEANPKQIRAILELPSPRNAREVQRLTGRIAALNRFISRSTDKCLPFYNLLKRRAQFDWDKDSEEAFEKLKDYLSTPPILVKPEVGETLYLYIAVSDHAVSSVLVREDRGEQRPIFYTSKSLVEAETRYPVIEKAALAVVTSARKLRPYFQSHTIAVLTDQPLRVALHSPSQSGRMTKWAVELSEYDIDFRPRPAMKSQVLADFLIELPLQSAERAVSGNRGEEWSLYVDGSSSARGSGIGIRLVSPTAEVLEQSFRLRFVATNNVAEYEVLIAGLRLAAGMQITTIHAFTDSQLIAGQLSGEYEAKNEKMDAYLKIVQLMTKDFENFKLSKIPRGDNAPADALAALALTSDSDLRRIIPVESIDKPSIDSTDAVEIVNTIRSSNAPDPADPTDWRVEIRDYLSDGTLPSDKWTARRLRIKAAKYTLMKEHLLKVSAFGAMLNCLHGTEINEIMKETHEGAAGNHSGGRALALKLKKLGFYWPTMISDCKTFTAKCEQCQRHAPTIHQPTELLRAGVAPYPFMRWAMDIVGPMPASRQKRFILVMTDYFTKWVEAESYATIRANDVQNFVWKFIICRHGLPYEIITDNGSQFISLSFENFCASWKIRLNKSTPRYPQGNGQAEATNKTILSGLKKRLDEKKGAWADELDGVLWSYRTTPRSATDQTPFAHAYGMEAMAPAEVGYSSLRRSMMVKNPELNDRMMLDRLDDLEEIRNAALCRIQNYQLAAAKHYNQKVHNRHFDVGDLVLRKVFENTAEINAGKLGANWEGSYQVSKIVRPGDYELLTMSGTAVPRTWNSMHLKRYYY

SEQ ID NO: 73602 - DNA, 1590 bp, Arabidopsis thaliana
  misc_feature (1)..(1590): Ceres Seq. ID no. 4972411
  misc_feature: MA Experiment ID: 20000184 Result: Down-regulated in Transcription
  misc_feature: MA Experiment 20000184 PARAMETER Experiment Name: At_Shoots__P Parameter: Age (day) Value: 7
  misc_feature: MA Experiment 20000184 PARAMETER Experiment Name: At_Shoots__P Parameter: Tissue Value: Shoots vs. Whole Plant
  misc_feature: MA Experiment ID: 20000234 Result: Up-regulated in Transcription
  misc_feature: MA Experiment 20000234 PARAMETER Experiment Name: At_Siliques_P Parameter: Age (day) Value: 21
  misc_feature: MA Experiment 20000234 PARAMETER Experiment Name: At_Siliques_P Parameter: Organism Value: A. thaliana
  misc_feature: MA Experiment 20000234 PARAMETER Experiment Name: At_Siliques_P Parameter: Plant Line Value: WS
  misc_feature: MA Experiment 20000234 PARAMETER Experiment Name: At_Siliques_P Parameter: Tissue Value: Less Than 5mm Siliques vs. Whole Plant
atggcttttcaacggcggcgcaacaattactacaaccgtctccgtcgtcttcttcctttcatttgcgctgtctctggagctcttctcatcctcttcgctcttctctccattctttcccctcctcctgatgattccgatcgccgcatctccaagcatattaactatggagccaatgatgagaagaagaacacaccagtggttttcacagttccggttaggcagagaggtggaggaagatcggatcgtgatatctggcgttcatggaatgctgaattcttttatggttgttgtaatgcaagcagcaagttcccaaatgctaaagcaattactagaaatgatcgatacttggcgattgccactagtggcggtttaaaccaacaacggactggtattgtagatgctgttgttgctgcaaggattctaaacgctacgcttgttattccgaagttggaccagaaatcctactggaaagatgccagtgacttctcgaacattttcgatgttgattggtttatgtcatttctctcaaaagatgtcaaaatcattgagaaacttccacagaaaggagggcaaacatggagccctcgcagaatgcgtgtaccgagaaaatgcaatgagaaatgctatatcaatcgggtgttacctgttcttcagaaaaggcatgcagttcaattgaataaatttgattacagactctcaaacaagttgagagatgatttgcagaagctgaggtttgaacctgatatgctcgccttctctggatgttactatggtggtggtgagaaggagaagaaagagttaggaacaatcagaaggagatggaaaactttgcatgtaaataaccctgaaaagcaaaggagacaaggaagatgtccacttacaccagaagaagttggattaatgcttagagctttgggatatggaagtgatgttcatatatatgttgcatcaggtgaagtttatggaggagaaaaatcattggctcctttgaaagcactttttccacatttctattcaaaagacaccatagctacaaaaatggagttaaaaccattttcttcttattcttcacgaatggctgcactcgatttccttgtgtgtgacgaaagcgatgttttcgttaccaacaataacggaaacatggcgagaatattagcaggtcgaaggagatactttggacataaaccaacaattagaccgaatgcgaaaaagctatacaagttgtttatgagcaaagagaatactacttgggaggagtttgcttcaagagtgagaacatttcagaaaggattcatgggagaaccaaaggaggtaagagccggaaaaggtgagtttcatgagaatccagcggcttgtatatgcgaagatactgatgctaaagtaaaagcgggaaagatggattcgagaaaattcgggaagaaagagcagaaagaagatgaagatgcagagttgtcgtcgtcagagacagattatgaggaagaccaaactgatttacaggacagaggcttgtataatggtacgaggttagattatgatgatgcgttatcggtttcagaagagcctgagctagaagaaatgctatcagattga

SEQ ID NO: 73603 - protein, 529 aa, Arabidopsis thaliana
  peptide (1)..(529): Ceres Seq. ID no. 4972412
  misc_feature (117)..(244): Pfam Name: Plant protein family Pfam Description: Plant protein family
  misc_feature (1)..(529): Homolog of NCBI NO: 30686880 NR Description: axi 1 protein -related [Arabidopsis thaliana]
  misc_feature (243)..(529): Homolog of NCBI NO: 8886957 NR Description: F2D10.3 [Arabidopsis thaliana]
  misc_feature (1)..(244): Homolog of NCBI NO: 8886957 NR Description: F2D10.3 [Arabidopsis thaliana]
  misc_feature (243)..(529): Homolog of NCBI NO: 8778600 NR Description: F5M15.13 [Arabidopsis thaliana]
  misc_feature (75)..(244): Homolog of NCBI NO: 8778600 NR Description: F5M15.13 [Arabidopsis thaliana]
  misc_feature (1)..(51): Homolog of NCBI NO: 8778600 NR Description: F5M15.13 [Arabidopsis thaliana]
  misc_feature (243)..(529): Homolog of NCBI NO: 18411065 NR Description: putative auxin-independent growth promoter; id: At1g76270.1, supported by cDNA: gi_15292904 [Arabidopsis
  misc_feature (1)..(244): Homolog of NCBI NO: 18411065 NR Description: putative auxin-independent growth promoter; id: At1g76270.1, supported by cDNA: gi_15292904 [Arabidopsis
  misc_feature (243)..(529): Homolog of NCBI NO: 25406439 NR Description: hypothetical protein F15M4.23 [imported] -
  misc_feature (1)..(244): Homolog of NCBI NO: 25406439 NR Description: hypothetical protein F15M4.23 [imported] -
MAFQRRRNNYYNRLRRLLPFICAVSGALLILFALLSILSPPPDDSDRRISKHINYGANDEKKNTPVVFTVPVRQRGGGRSDRDIWRSWNAEFFYGCCNASSKFPNAKAITRNDRYLAIATSGGLNQQRTGIVDAVVAARILNATLVIPKLDQKSYWKDASDFSNIFDVDWFMSFLSKDVKIIEKLPQKGGQTWSPRRMRVPRKCNEKCYINRVLPVLQKRHAVQLNKFDYRLSNKLRDDLQKLRFEPDMLAFSGCYYGGGEKEKKELGTIRRRWKTLHVNNPEKQRRQGRCPLTPEEVGLMLRALGYGSDVHIYVASGEVYGGEKSLAPLKALFPHFYSKDTIATKMELKPFSSYSSRMAALDFLVCDESDVFVTNNNGNMARILAGRRRYFGHKPTIRPNAKKLYKLFMSKENTTWEEFASRVRTFQKGFMGEPKEVRAGKGEFHENPAACICEDTDAKVKAGKMDSRKFGKKEQKEDEDAELSSSETDYEEDQTDLQDRGLYNGTRLDYDDALSVSEEPELEEMLSD

SEQ ID NO: 73604 - protein, 358 aa, Arabidopsis thaliana
  peptide (1)..(358): Ceres Seq. ID no. 4972413
  misc_feature (1)..(73): Pfam Name: Plant protein family Pfam Description: Plant protein family
  misc_feature (1)..(358): Homolog of NCBI NO: 30686880 NR Description: axi 1 protein -related [Arabidopsis thaliana]
  misc_feature (72)..(358): Homolog of NCBI NO: 8886957 NR Description: F2D10.3 [Arabidopsis thaliana]
  misc_feature (1)..(73): Homolog of NCBI NO: 8886957 NR Description: F2D10.3 [Arabidopsis thaliana]
  misc_feature (72)..(358): Homolog of NCBI NO: 8778600 NR Description: F5M15.13 [Arabidopsis thaliana]
  misc_feature (1)..(73): Homolog of NCBI NO: 8778600 NR Description: F5M15.13 [Arabidopsis thaliana]
  misc_feature (72)..(358): Homolog of NCBI NO: 18411065 NR Description: putative auxin-independent growth promoter; id: At1g76270.1, supported by cDNA: gi_15292904 [Arabidopsis
  misc_feature (1)..(73): Homolog of NCBI NO: 18411065 NR Description: putative auxin-independent growth promoter; id: At1g76270.1, supported by cDNA: gi_15292904 [Arabidopsis
  misc_feature (72)..(358): Homolog of NCBI NO: 25406439 NR Description: hypothetical protein F15M4.23 [imported] -
  misc_feature (1)..(73): Homolog of NCBI NO: 25406439 NR Description: hypothetical protein F15M4.23 [imported] -
  misc_feature (72)..(358): Homolog of NCBI NO: 6573718 NR Description: T23E18.20 [Arabidopsis thaliana]
MSFLSKDVKIIEKLPQKGGQTWSPRRMRVPRKCNEKCYINRVLPVLQKRHAVQLNKFDYRLSNKLRDDLQKLRFEPDMLAFSGCYYGGGEKEKKELGTIRRRWKTLHVNNPEKQRRQGRCPLTPEEVGLMLRALGYGSDVHIYVASGEVYGGEKSLAPLKALFPHFYSKDTIATKMELKPFSSYSSRMAALDFLVCDESDVFVTNNNGNMARILAGRRRYFGHKPTIRPNAKKLYKLFMSKENTTWEEFASRVRTFQKGFMGEPKEVRAGKGEFHENPAACICEDTDAKVKAGKMDSRKFGKKEQKEDEDAELSSSETDYEEDQTDLQDRGLYNGTRLDYDDALSVSEEPELEEMLSD

SEQ ID NO: 73605 - protein, 332 aa, Arabidopsis thaliana
  peptide (1)..(332): Ceres Seq. ID no. 4972414
  misc_feature (46)..(223): Pfam Name: Plant protein family Pfam Description: Plant protein family
  misc_feature (1)..(332): Homolog of NCBI NO: 30686880 NR Description: axi 1 protein -related [Arabidopsis thaliana]
  misc_feature (46)..(332): Homolog of NCBI NO: 8886957 NR Description: F2D10.3 [Arabidopsis thaliana]
  misc_feature (1)..(47): Homolog of NCBI NO: 8886957 NR Description: F2D10.3 [Arabidopsis thaliana]
  misc_feature (46)..(332): Homolog of NCBI NO: 8778600 NR Description: F5M15.13 [Arabidopsis thaliana]
  misc_feature (1)..(47): Homolog of NCBI NO: 8778600 NR Description: F5M15.13 [Arabidopsis thaliana]
  misc_feature (46)..(332): Homolog of NCBI NO: 18411065 NR Description: putative auxin-independent growth promoter; id: At1g76270.1, supported by cDNA: gi_15292904 [Arabidopsis
  misc_feature (1)..(47): Homolog of NCBI NO: 18411065 NR Description: putative auxin-independent growth promoter; id: At1g76270.1, supported by cDNA: gi_15292904 [Arabidopsis
  misc_feature (46)..(332): Homolog of NCBI NO: 25406439 NR Description: hypothetical protein F15M4.23 [imported] -
  misc_feature (1)..(47): Homolog of NCBI NO: 25406439 NR Description: hypothetical protein F15M4.23 [imported] -
  misc_feature (46)..(332): Homolog of NCBI NO: 6573718 NR Description: T23E18.20 [Arabidopsis thaliana]
MRVPRKCNEKCYINRVLPVLQKRHAVQLNKFDYRLSNKLRDDLQKLRFEPDMLAFSGCYYGGGEKEKKELGTIRRRWKTLHVNNPEKQRRQGRCPLTPEEVGLMLRALGYGSDVHIYVASGEVYGGEKSLAPLKALFPHFYSKDTIATKMELKPFSSYSSRMAALDFLVCDESDVFVTNNNGNMARILAGRRRYFGHKPTIRPNAKKLYKLFMSKENTTWEEFASRVRTFQKGFMGEPKEVRAGKGEFHENPAACICEDTDAKVKAGKMDSRKFGKKEQKEDEDAELSSSETDYEEDQTDLQDRGLYNGTRLDYDDALSVSEEPELEEMLSD

SEQ ID NO: 73606 - DNA, 3189 bp, Arabidopsis thaliana
  misc_feature (1)..(3189): Ceres Seq. ID no. 4972446
  misc_feature: MA Experiment ID: 20000185 Result: Up-regulated in Transcription
  misc_feature: MA Experiment 20000185 PARAMETER Experiment Name: At_Roots__P Parameter: Age (day) Value: 7 vs. 21
  misc_feature: MA Experiment 20000185 PARAMETER Experiment Name: At_Roots__P Parameter: Organism Value: A. thaliana
  misc_feature: MA Experiment 20000185 PARAMETER Experiment Name: At_Roots__P Parameter: Tissue Value: Roots vs. Whole Plant
  misc_feature: MA Experiment ID: 20000439 Result: Up-regulated in Transcription
  misc_feature: MA Experiment 20000439 PARAMETER Experiment Name: At_Roots__P Parameter: Age (day) Value: 14 vs. 21
  misc_feature: MA Experiment 20000439 PARAMETER Experiment Name: At_Roots__P Parameter: Organism Value: A. thaliana
  misc_feature: MA Experiment 20000439 PARAMETER Experiment Name: At_Roots__P Parameter: Tissue Value: Roots vs. Whole Plant
atggcacgtcttactctgtttctgtcttttctttctctagctttagtctctgttgtaaactgtcgtgttttaagttctgtgtctgaagataacaactcctccatcttggtctccgatggagtccaagacagatccagcaacgactttctcagtcttaatccgccaaatctttccgagagtgcttgtgttcatgtctacgggtttcttccatgtgcagacaatattgaaggatatgtcttccaagttttctcctttggttgtctattgataatcggtgaatactttttgtctaaaggaaggtctaagctctttgtcatcttcgaggtcggtttctttggcggaattatcttccctctacttacaatgttcccaagaattgcccttattctatccactggactgataggaagccgtgaaatagcaaactcgatgacgggtaataatgttgcagttactgttggatactctgtctttgctttgacaatgcaatggggagcttgtgttgtctttggcttgtctggtttgagatcagatgatcagtccataacttgtgacataagtagtccaagaagacaagttaagaagagcattaatctattgaagaacctagctggagctagcattagagcagatcctaagaacaagaaagcggcagggattatgctcctgactttattgcctttcgtcttagtcacattttcagagacatttcacataaaatcttgggatgacaatatggttttggtcacactcatattctctggttctgcaactgttctctactttgtttatttgtattttgataaagcggaccaagtgaagagcctagaatacgcgaagtttgagctcatgtcagaagttcataagcacttgcagaatttttcgcctcaaagccttataagaaatggacaactatgtcaagagagcttgaaaagtttgttcaaaaagtttgatgtcaacaaagacggaaagatccaagtatcagagttaaaagatctgacagtggactttggggtattagggagagtgaagtgtgatataaatgagcttgccactactttgcttgctgatttcgacagtaatagagatggtgagatagatgagactgaattcgccattggtatcgaaaaatggctgaaacagtacaaatttagcttcaatggcaccgagtcacaaggagaggacatagccgaggatgatggagttttgaaggtggaacaattactaaagggatgtctttttactaagttgcttacaaagagaaccttgaaagctgtcattgaagtcattatagggattactattgtcagctttcttgcaatgcctttcatgatgaatatcgaacttttgtcggtatcagctggagtgccttccttctatgttgtctttgcagtgatccctttggcaagaaacctaaagaacgctttgtctgctcacttctgtcgcaagaaagagaaagcaaaaattacatctgacacattttctgagatttatagagatgttacattgaacaatctgctggggataacaattatattggcgattgtgtacatcagaggattgacttgggattattcaacagaagttctcattattgtgatcgttggtctcataatagctttgatctctgttgtgaactgtcgtgttttaagttctttatctgagaaagactcaatcttggtctccgatggagttcaagacgggtccagctacgagtttctgagtcttgatccgccaaatgacattaccaagaatatgtgcgtacatgtctacgattttcttccatgtgcagacaatgttgcaggatatgtcttccaagttttctcgtttggttgcatcttgatcatcggtgaatacttcttgactaaaggaaggactaagctctttctcatattcgaggtcggtttttatggcggaatcatctttcctctccttactatgttcccacgaatcgcgcttattctctcgactggactggtgggaagccgcgaaatggcaagctcgagggttggtaatatcattggagttactgtgggatactctgtctttgctttgacaatacaatggggagcttgtattctctttggcttgtctggtactaaaccagaacagcccatagatttatctgcagctagtgtagaagcagatataacgaacaagaaatcggcagggattatgctcttgactatactacctttcatattggttttctttgtgaaaaactcgcagtattttgatagagacgaccaagcgaagagtttagatcacgcgaggtttgagctcatgtcagaagttcataagcatttacagattttttcacccaaaagccttataagagatggacaactaaatcaagagagcttgaaaagattgtttcaaaaaatcgatgcaaacggagatggaaagatccaagttgcagagttgaaagatcttacggtggagtttgggatgatagggagagtcaagtgtcacatagataagcttgtccatacattggttgatgatttcgacagggatggagatcgtgagatcgatgaggctgaattcgagattgggatcaaaaaatggctgaatcagtacaaattcagcttcgataccaccgtgccaccaagagaggaccaagctgagggagtaccaattctgaaggtagaaaagccagagcagagtcttgttaagaagctgctctcatggagaaccttgagagcttcccttgaagtcattttagggatgctagttgtcatctatcttgcaagacctttcatgatgaacatccaacttttgtcggaatcagctggagttccttctttctatgttgtctttgtagtcattcctttggcaagaaacctaaagaacaccttgtcagctcacttctgtcgcaagaaagacaaagcgaaaatcacatctgacacattttctgagatctacaaggatgttacaatgaacaatctcatgggaatttcaattatattggcaattgtgtacgcaagagaactagtttgggattacacaacagaagttctcattatagtgatcgttggtctcttaataggcttaccggcttatgtgagaacgacttatccattttggatatgtctcttggcctttgctctctacttcatctctcttgtcgtagtgtatttccatttcatgtctctcgaaaagggcacaactgtcacctttaacaaataa

SEQ ID NO: 73607 - protein, 1062 aa, Arabidopsis thaliana
  peptide (1)..(1062): Ceres Seq. ID no. 4972447
  misc_feature (917)..(1045): Pfam Name: Sodium/calcium exchanger protein Pfam Description: Sodium/calcium exchanger protein
  misc_feature (5)..(545): Homolog of NCBI NO: 26449859 NR Description: unknown protein [Arabidopsis thaliana]
  misc_feature (725)..(1049): Homolog of NCBI NO: 26449859 NR Description: unknown protein [Arabidopsis thaliana]
  misc_feature (542)..(735): Homolog of NCBI NO: 26449859 NR Description: unknown protein [Arabidopsis thaliana]
  misc_feature (266)..(504): Homolog of NCBI NO: 15226193 NR Description: unknown protein; protein id: At2g34030.1
  misc_feature (1)..(178): Homolog of NCBI NO: 15226193 NR Description: unknown protein; protein id: At2g34030.1
  misc_feature (266)..(517): Homolog of NCBI NO: 15226191 NR Description: unknown protein; protein id: At2g34020.1
  misc_feature (5)..(178): Homolog of NCBI NO: 15226191 NR Description: unknown protein; protein id: At2g34020.1
  misc_feature (740)..(981): Homolog of NCBI NO: 15226193 NR Description: unknown protein; protein id: At2g34030.1
  misc_feature (711)..(736): Homolog of NCBI NO: 26449859 NR Description: unknown protein [Arabidopsis thaliana]
  misc_feature (542)..(974): Homolog of NCBI NO: 15226191 NR Description: unknown protein; protein id: At2g34020.1
MARLTLFLSFLSLALVSVVNCRVLSSVSEDNNSSILVSDGVQDRSSNDFLSLNPPNLSESACVHVYGFLPCADNIEGYVFQVFSFGCLLIIGEYFLSKGRSKLFVIFEVGFFGGIIFPLLTMFPRIALILSTGLIGSREIANSMTGNNVAVTVGYSVFALTMQWGACVVFGLSGLRSDDQSITCDISSPRRQVKKSINLLKNLAGASIRADPKNKKAAGIMLLTLLPFVLVTFSETFHIKSWDDNMVLVTLIFSGSATVLYFVYLYFDKADQVKSLEYAKFELMSEVHKHLQNFSPQSLIRNGQLCQESLKSLFKKFDVNKDGKIQVSELKDLTVDFGVLGRVKCDINELATTLLADFDSNRDGEIDETEFAIGIEKWLKQYKFSFNGTESQGEDIAEDDGVLKVEQLLKGCLFTKLLTKRTLKAVIEVIIGITIVSFLAMPFMMNIELLSVSAGVPSFYVVFAVIPLARNLKNALSAHFCRKKEKAKITSDTFSEIYRDVTLNNLLGITIILAIVYIRGLTWDYSTEVLIIVIVGLIIALISVVNCRVLSSLSEKDSILVSDGVQDGSSYEFLSLDPPNDITKNMCVHVYDFLPCADNVAGYVFQVFSFGCILIIGEYFLTKGRTKLFLIFEVGFYGGIIFPLLTMFPRIALILSTGLVGSREMASSRVGNIIGVTVGYSVFALTIQWGACILFGLSGTKPEQPIDLSAASVEADITNKKSAGIMLLTILPFILVFFVKNSQYFDRDDQAKSLDHARFELMSEVHKHLQIFSPKSLIRDGQLNQESLKRLFQKIDANGDGKIQVAELKDLTVEFGMIGRVKCHIDKLVHTLVDDFDRDGDREIDEAEFEIGIKKWLNQYKFSFDTTVPPREDQAEGVPILKVEKPEQSLVKKLLSWRTLRASLEVILGMLVVIYLARPFMMNIQLLSESAGVPSFYVVFVVIPLARNLKNTLSAHFCRKKDKAKITSDTFSEIYKDVTMNNLMGISIILAIVYARELVWDYTTEVLIIVIVGLLIGLPAYVRTTYPFWICLLAFALYFISLVVVYFHFMSLEKGTTVTFNK

SEQ ID NO: 73608 - protein, 941 aa, Arabidopsis thaliana
  peptide (1)..(941): Ceres Seq. ID no. 4972448
  misc_feature (796)..(924): Pfam Name: Sodium/calcium exchanger protein Pfam Description: Sodium/calcium exchanger protein
  misc_feature (1)..(424): Homolog of NCBI NO: 26449859 NR Description: unknown protein [Arabidopsis thaliana]
  misc_feature (604)..(928): Homolog of NCBI NO: 26449859 NR Description: unknown protein [Arabidopsis thaliana]
  misc_feature (421)..(614): Homolog of NCBI NO: 26449859 NR Description: unknown protein [Arabidopsis thaliana]
  misc_feature (145)..(383): Homolog of NCBI NO: 15226193 NR Description: unknown protein; protein id: At2g34030.1
  misc_feature (1)..(57): Homolog of NCBI NO: 15226193 NR Description: unknown protein; protein id: At2g34030.1
  misc_feature (145)..(396): Homolog of NCBI NO: 15226191 NR Description: unknown protein; protein id: At2g34020.1
  misc_feature (1)..(57): Homolog of NCBI NO: 15226191 NR Description: unknown protein; protein id: At2g34020.1
  misc_feature (619)..(860): Homolog of NCBI NO: 15226193 NR Description: unknown protein; protein id: At2g34030.1
  misc_feature (590)..(615): Homolog of NCBI NO: 26449859 NR Description: unknown protein [Arabidopsis thaliana]
  misc_feature (421)..(853): Homolog of NCBI NO: 15226191 NR Description: unknown protein; protein id: At2g34020.1
MFPRIALILSTGLIGSREIANSMTGNNVAVTVGYSVFALTMQWGACVVFGLSGLRSDDQSITCDISSPRRQVKKSINLLKNLAGASIRADPKNKKAAGIMLLTLLPFVLVTFSETFHIKSWDDNMVLVTLIFSGSATVLYFVYLYFDKADQVKSLEYAKFELMSEVHKHLQNFSPQSLIRNGQLCQESLKSLFKKFDVNKDGKIQVSELKDLTVDFGVLGRVKCDINELATTLLADFDSNRDGEIDETEFAIGIEKWLKQYKFSFNGTESQGEDIAEDDGVLKVEQLLKGCLFTKLLTKRTLKAVIEVIIGITIVSFLAMPFMMNIELLSVSAGVPSFYVVFAVIPLARNLKNALSAHFCRKKEKAKITSDTFSEIYRDVTLNNLLGITIILAIVYIRGLTWDYSTEVLIIVIVGLIIALISVVNCRVLSSLSEKDSILVSDGVQDGSSYEFLSLDPPNDITKNMCVHVYDFLPCADNVAGYVFQVFSFGCILIIGEYFLTKGRTKLFLIFEVGFYGGIIFPLLTMFPRIALILSTGLVGSREMASSRVGNIIGVTVGYSVFALTIQWGACILFGLSGTKPEQPIDLSAASVEADITNKKSAGIMLLTILPFILVFFVKNSQYFDRDDQAKSLDHARFELMSEVHKHLQIFSPKSLIRDGQLNQESLKRLFQKIDANGDGKIQVAELKDLTVEFGMIGRVKCHIDKLVHTLVDDFDRDGDREIDEAEFEIGIKKWLNQYKFSFDTTVPPREDQAEGVPILKVEKPEQSLVKKLLSWRTLRASLEVILGMLVVIYLARPFMMNIQLLSESAGVPSFYVVFVVIPLARNLKNTLSAHFCRKKDKAKITSDTFSEIYKDVTMNNLMGISIILAIVYARELVWDYTTEVLIIVIVGLLIGLPAYVRTTYPFWICLLAFALYFISLVVVYFHFMSLEKGTTVTFNK
